(19) United States
(12) Patent Application Publication
(10) Pub. No.: US 2026/0185093 A1
(43) Pub. Date: Jul. 2, 2026

(54) REPROGRAMMABLE FANZOR POLYNUCLEOTIDES AND USES THEREOF

(71) Applicants: The Broad Institute, Inc., Cambridge, MA (US); Massachusetts Institute of Technology, Cambridge, MA (US)

(72) Inventors: Feng Zhang, Cambridge, MA (US); Han Altae-Tran, Cambridge, MA (US); Soumya Kannan, Cambridge, MA (US); Guilhem Faure, Cambridge, MA (US); Makoto Saito, Cambridge, MA (US); Peiyu Xu, Cambridge, MA (US)

(21) Appl. No.: 19/419,542

(22) Filed: Dec. 15, 2025

Related U.S. Application Data
(63) Continuation of application No. PCT/US2024/034093, filed on Jun. 14, 2024.
(60) Provisional application No. 63/508,473, filed on Jun. 15, 2023.

(51) Int. Cl. C12N 15/113; C12N 9/12; C12N 9/22; C12N 9/78; C12Q 1/34; C12Q 1/48; C12Q 1/6813

(52) U.S. Cl. CPC C12N 15/113; C12N 9/1276; C12N 9/222; C12N 9/78; C12Q 1/34; C12Q 1/48; C12Q 1/6813; C12Y 207/07049; C12Y 305/04; C12N 2310/20

(57) ABSTRACT

Systems, methods and composition for targeting polynucleotides are detailed herein. In particular, engineered DNA-targeting systems comprising novel Fanzor polypeptides and a reprogrammable targeting nucleic acid component and methods and application of use are described.

### CROSS-REFERENCE TO RELATED APPLICATIONS

[0001] This application is a Continuation application of International Patent Application No. PCT/US2024/034093, filed Jun. 14, 2024, which claims the benefit of and priority to U.S. Provisional Patent Application No. 63/508,473, filed on Jun. 15, 2023, the contents of which is incorporated by reference herein in their entireties.

### SEQUENCE LISTING

[0002] This application contains a sequence listing filed in electronic form as an xml file entitled BROD-5885US_ST26_Revised with size 15,370,641 bytes created on Dec. 23, 2025. The content of the sequence listing is incorporated herein in its entirety.

### TECHNICAL FIELD

[0003] The subject matter disclosed herein is generally directed to Fanzor polypeptide compositions, systems, and methods for targeted polynucleotide modification, particularly gene modification and editing.

### BACKGROUND

[0004] While there are genome-editing techniques available for producing targeted genome perturbations, there remains a need for new genome engineering technologies that employ innovative strategies and molecular mechanisms that are affordable, easy to set up, scalable, and amenable to targeting multiple positions within a genome or other polynucleotide. Additional desirable tools in genome and polynucleotide engineering and biotechnology would further advance the art.

[0005] Citation or identification of any document in this application is not an admission that such a document is available as prior art to the present invention.

### SUMMARY

[0006] In some aspects, the techniques described herein relate to a non-naturally occurring, engineered composition including a) a Fanzor polypeptide including a Ruv-C nuclease domain, the Ruv-C nuclease domain optionally including Ruv-CI, Ruv-CII, and Ruv-CIII subdomains, and b) an ωRNA component molecule including a scaffold and a reprogrammable spacer sequence, ωRNA component molecule capable of forming a complex with the Fanzor polypeptide and directing the Fanzor polypeptide to a target polynucleotide.

[0007] In some aspects, the techniques described herein relate to a composition, wherein the Fanzor polypeptide further includes a REC domain, a bridge helix domain, or both.

[0008] In some aspects, the techniques described herein relate to a composition, wherein the Fanzor polypeptide includes a non-native REC domain, a non-native WED domain, a non-native Ruv-C domain, a non-native NUC domain, or any combination thereof.

[0009] In some aspects, the techniques described herein relate to a composition, wherein the Fanzor polypeptide includes about 125 to about 1800 amino acids, optionally wherein the Fanzor polypeptide is about 400 to about 700 amino acids.

[0010] In some aspects, the techniques described herein relate to a composition, wherein the reprogrammable spacer sequence includes a spacer of 10 nucleotides to 50 nucleotides in length.

[0011] In some aspects, the techniques described herein relate to a composition, wherein the ωRNA component molecule includes a scaffold of about 20 to 200 nucleotides in length.

[0012] In some aspects, the techniques described herein relate to a composition, wherein the Fanzor complex binds a target adjacent motif (TAM) sequence 5′ and/or 3′ of the target polynucleotide.

[0013] In some aspects, the techniques described herein relate to a composition, wherein the target polynucleotide is DNA, optionally wherein the target polynucleotide is double stranded DNA.

[0014] In some aspects, the techniques described herein relate to a composition, further including a homologous recombination donor template including a donor sequence for insertion into a target polynucleotide.

[0015] In some aspects, the techniques described herein relate to a composition, further including a functional domain associated with the Fanzor polypeptide.

[0016] In some aspects, the techniques described herein relate to a composition, wherein the functional domain is a transposase, an integrase, a nucleobase deaminase, a reverse transcriptase, a recombinase, an integrase, a topoisomerase, a retrotransposon, phosphatase, polymerase, a ligase, a helitron, a helicase, a methylase, a demethylase, a translation activator, a translation repressor, a transcription activator, a transcription repressor, a transcription release factor, a chromatin modifier, a histone modifier, an acetylase, a deacetylase, a reverse transcriptase, a nuclease.

[0017] In some aspects, the techniques described herein relate to a composition, wherein the Fanzor polypeptide is operatively coupled to one or more nuclear localization signal polypeptides at a C-terminus, an N-terminus, or both of the Fanzor polypeptide.

[0018] In some aspects, the techniques described herein relate to a composition, wherein the Fanzor polypeptide includes one or more amino acid mutations as compared to a wild type, whereby the one or more amino acid mutations increase binding and/or interaction with a target DNA and/or an ωRNA component molecule, and/or increase Fanzor activity.

[0019] In some aspects, the techniques described herein relate to a composition, wherein the Fanzor polypeptide includes one or more mutations of one or more neutral and/or negatively charged amino acids to one or more positively charged amino acids, optionally wherein the one or more mutations is in a WED domain, REC domain, RuvC domain, NUC domain or any combination thereof, and optionally wherein one or more of the one or more mutations are in positions that correspond to a positively charged channel formed by the WED domain, REC domain, and RuvC domain when active and/or interacts with an RNA-DNA heteroduplex formed by the ωRNA component molecule and a target DNA.

[0020] In some aspects, the techniques described herein relate to a composition, wherein the one or more amino acid mutations are made in and/or in effective proximity to a DNA interaction region of the Fanzor polypeptide.

[0021] In some aspects, the techniques described herein relate to a composition, wherein the one or more amino acid mutations include one or more mutations of FIG. 10C-10E, FIG. 35, 56A-56D, 72D, 74E-74G, 75A-75C, 76B-76D, 77A-77C or any combination thereof, or wherein one or more of the amino acid mutations are at one or more amino acid residues identified in any one or more of FIG. 10C-10E, FIG. 35, 56A-56D, 72D, 74E-74G, 75A-75C, 76B-76D, 77A-77C or any combination thereof or are analogous thereto in a homologue, orthologue, or variant Fanzor polypeptide.

[0022] In some aspects, the techniques described herein relate to a composition, wherein the Fanzor polypeptide includes (a) a mutation at one or more amino acid residues selected from: W596^{NUC}, R601^{NUC}, N604^{NUC}, S598^{NUC}, Y602^{NUC}, R550^{NUC}, C611^{RuvC}, M607^{RuvC}, W603^{NUC}, L583^{NUC}, K562^{NUC}, R564^{NUC}, S567^{NUC}, R572^{NUC}, Q482^{RuvC}, R315^{WED}, R317^{WED}, K312^{WED}, R481^{RuvC}, K25^{WED}, R268^{REC} and R157^{REC}, Q148^{REC}, R407^{RuvC}, R420^{RuvC}, S269^{REC}, R268^{REC}, K440^{RuvC}, R260^{REC}, R96^{REC}, Q129^{REC}, and N133^{REC}, R291^{WED}, Q130^{REC}, and N133^{REC}, relative to SpuFz1, or in corresponding positions thereto in a homologue, orthologue, or a Fanzor variant; (b) one or more mutations selected from: D300R, C310R, D487K, E498R, and T513K relative to SpuFz1 or in corresponding mutations thereto in a homologue, orthologue, or a Fanzor variant; (c) a mutation at one or more amino acid residues selected from E541, D383, N385, D606, or any combination thereof, relative to SpuFz1, or in corresponding positions thereto in a homologue, orthologue, or a Fanzor variant; or (d) any combination of (a)-(d).

[0023] In some aspects, the techniques described herein relate to a composition, wherein Fanzor activity is increased 1 to 50-fold or more as compared to a wild-type Fanzor or a Fanzor lacking one or more nuclear localization signals.

[0024] In some aspects, the techniques described herein relate to a composition, wherein the Fanzor polypeptide is a. a yeast Fanzor polypeptide; b. an amoeba Fanzor polypeptide; c. a protist Fanzor polypeptide; d. a metazoan Fanzor polypeptide; e. an algae Fanzor polypeptide; f. a fungi Fanzor polypeptide; g. a eukaryotic Fanzor polypeptide; h. a Mollusca Fanzor polypeptide; i. from an organism of the genus Eremothecium, Ashbya, Spizellomyces, Torulaspora, Naegleria, Rhizopus, Guillardia, Batillaria, Dreissena, Mercenaria, Batrachochytrium, or Parasitella; j. a virus Fanzor polypeptide, optionally a Bodo saltans virus Fanzor polypeptide, a Harvforvirus Fanzor polypeptide, Homavirus Fanzor polypeptide, Dishui Lake Large Algae virus 1 Fanzor polypeptide, or Yasminevirus Fanzor polypeptide; k. a Fanzor polypeptide selected from a polypeptide or includes a polypeptide or is encoded by a polynucleotide set forth in any one or more of Table 1, Table 6, Table 7, Table 8, Table 9, Table 10, Table 11, Table 12, Table 13, Table 14, Table 15, Table 18, Table 20, Table 21, Table 22 Example 16, Example 17, Example 18, FIG. 18A-18B, FIG. 19A-19B, FIG. 20, FIG. 33, FIG. 35, FIG. 53A-53G, FIG. 56A-56D, FIG. 66, FIG. 72D, FIG. 74E-74G, FIG. 75A-75C, FIG. 77A-77C or any combination thereof, or is a homolog, ortholog, or variant thereof, and/or is or includes a polypeptide that is 80-100 percent identical to a polypeptide sequence set forth in or that is encoded by a polynucleotide sequence set forth in Table 1, Table 6, Table 7, Table 8, Table 9, Table 10, Table 11, Table 12, Table 13, Table 14, Table 15, Table 18, Table 20, Table 21, Table 22 Example 16, Example 17, Example 18, FIG. 18A-18B, FIG. 19A-19B, FIG. 20, FIG. 33, FIG. 35, FIG. 53A-53G, FIG. 56A-56D, FIG. 66, FIG. 72D, FIG. 74E-74G, FIG. 75A-75C, FIG. 77A-77C, or any combination thereof, or 1. any combination of a-k.

[0025] In some aspects, the techniques described herein relate to a vector system including one or more vectors encoding the Fanzor polypeptide, the ωRNA component molecule, or both of the present description.

[0026] In some aspects, the techniques described herein relate to an engineered cell including the composition and/or the vector system of the present description.

[0027] In some aspects, the techniques described herein relate to a method of modifying a target polynucleotide sequence in a cell, comprising introducing a composition of the present description into the cell.

[0028] In some aspects, the techniques described herein relate to a method, wherein modifying comprises cleaving a DNA polynucleotide.

[0029] In some aspects, the techniques described herein relate to a method, wherein cleavage occurs distal to a target-adjacent motif (TAM).

[0030] In some aspects, the techniques described herein relate to a method, wherein cleavage occurs at a spacer annealing site or 3′ of the target sequence.

[0031] In some aspects, the techniques described herein relate to a method, wherein cleavage occurs about 20-22 nucleotides away from the TAM.

[0032] In some aspects, the techniques described herein relate to a method, wherein the Fanzor polypeptide, the ωRNA component molecule, or both are provided via one or more polynucleotides encoding the Fanzor polypeptide, the ωRNA component molecule, or both, and wherein the one or more polynucleotides are operably configured to express the Fanzor polypeptide, the ωRNA component molecule, or both.

[0033] In some aspects, the techniques described herein relate to a method, wherein modifying includes introducing one or more mutations into the target polynucleotide sequence.

[0034] In some aspects, the techniques described herein relate to a method, wherein the one or more mutations include substitutions, deletions, insertions, or any combination thereof.

[0035] In some aspects, the techniques described herein relate to an engineered, non-naturally occurring composition including: (a) a Fanzor polypeptide, wherein the Fanzor polypeptide is catalytically inactive, (b) a nucleotide deaminase associated with or otherwise capable of forming a complex with the Fanzor polypeptide, and (c) an ωRNA component molecule capable of forming a complex with the Fanzor polypeptide and directing site-specific binding at a target sequence.

[0036] In some aspects, the techniques described herein relate to a composition, wherein the Fanzor polypeptide is selected from a polypeptide, or includes a polypeptide, or is encoded by a polynucleotide set forth in Table 1, Table 6, Table 7, Table 8, Table 9, Table 10, Table 11, Table 12, Table 13, Table 15, Table 18, Table 20, Table 21, Table 22 Example 16, Example 17, Example 18, FIG. 18A-18B, FIG. 19A-19B, FIG. 20, FIG. 33, FIG. 35, FIG. 53A-53G, FIG. 56A-56D, FIG. 66, FIG. 72D, FIG. 74E-74G, FIG. 75A-75C, FIG. 77A-77C, or any combination thereof, or is a homolog, ortholog, or variant thereof, and/or is or includes a polypeptide that is 80-100 percent identical to a polypeptide sequence set forth in or that is encoded by a polynucleotide sequence set forth in Table 1, Table 6, Table 7, Table 8, Table 9, Table 10, Table 11, Table 12, Table 13, Table 15, Table 18, Table 20, Table 21, Table 22 Example 16, Example 17, Example 18, FIG. 18A-18B, FIG. 19A-19B, FIG. 20, FIG. 33, FIG. 35, FIG. 53A-53G, FIG. 56A-56D, FIG. 66, FIG. 72D, FIG. 74E-74G, FIG. 75A-75C, FIG. 77A-77C, or any combination thereof.

[0037] In some aspects, the techniques described herein relate to a composition, wherein the nucleotide deaminase is an adenosine deaminase or a cytidine deaminase.

[0038] In some aspects, the techniques described herein relate to one or more polynucleotides encoding one or more components of the composition of the present description.

[0039] In some aspects, the techniques described herein relate to one or more vectors encoding the one or more polynucleotides.

[0040] In some aspects, the techniques described herein relate to a cell or progeny there 30-34.

[0041] In some aspects, the techniques described herein relate to a method of editing nucleic acids in target polynucleotides including delivering the composition of the present disclosure, the one or more polynucleotides of the present disclosure, or one or more vectors of the present disclosure to a cell or population of cells including the target polynucleotides.

[0042] In some aspects, the techniques described herein relate to a method, wherein the target polynucleotides are target sequences within genomic DNA.

[0043] In some aspects, the techniques described herein relate to a method of editing nucleic acids in target polynucleotides, wherein the target polynucleotides are edited at one or more bases to introduce (a) a G→A, C, or T mutation; (b) a C→A, T, or G mutation, (c) a A→C, T, or G mutation; (d) T→A, C, or G mutation; or any combination of (a)-(d).

[0044] In some aspects, the techniques described herein relate to an isolated cell or progeny thereof having one or more base edits made using in target polynucleotides of the present disclosure.

[0045] In some aspects, the techniques described herein relate to an engineered, non-naturally occurring composition including: (a) a catalytically dead Fanzor polypeptide, (b) a reverse transcriptase associated with or otherwise capable of forming a complex with the catalytically dead Fanzor polypeptide, and (c) an ωRNA component molecule capable of forming a complex with the catalytically dead Fanzor polypeptide and directing site-specific binding of the complex to a target sequence of a target polynucleotide, the ωRNA component molecule further including a donor template encoding a donor sequence for insertion into the target polynucleotide.

[0046] In some aspects, the techniques described herein relate to one or more polynucleotides encoding one or more components of the engineered, non-naturally occurring composition of the present description.

[0047] In some aspects, the techniques described herein relate to one or more vectors encoding one or more components of the engineered, non-naturally occurring composition of the present description.

[0048] In some aspects, the techniques described herein relate to a method of modifying target polynucleotides including delivering the composition of a composition of the present description, the one or more polynucleotides of the present description, or the one or more vectors of the present description to a cell, or population of cells, including the target polynucleotides, wherein the complex directs the reverse transcriptase to the target sequence and the reverse transcriptase facilitates insertion of a donor sequence encoded by the donor template from the ωRNA component molecule into the target polynucleotide.

[0049] In some aspects, the techniques described herein relate to a method of modifying target polynucleotides, wherein insertion of the donor sequence: (a) introduces one or more base edits; (b) corrects or introduces a premature stop codon; (c) disrupts a splice site; (d) inserts or restores a splice site; (e) inserts a gene or gene fragment at one or both alleles of the target polynucleotides; or (f) any combination thereof.

[0050] In some aspects, the techniques described herein relate to an isolated cell or progeny thereof including one or more modifications made using a method of modifying target polynucleotides of the present description.

[0051] In some aspects, the techniques described herein relate to an engineered, non-naturally occurring composition including: (a) a Fanzor polypeptide, (b) a non-LTR retrotransposon protein associated with or otherwise capable of forming a complex with the Fanzor polypeptide, and (c) an ωRNA component molecule capable of forming a complex with the Fanzor polypeptide and directing site-specific binding of the complex to a target sequence of a target polynucleotide, the ωRNA component molecule further including a donor template encoding a donor polynucleotide for insertion into the target polynucleotide and located between two binding elements capable of forming a complex with the non-LTR retrotransposon protein.

[0052] In some aspects, the techniques described herein relate to a composition, wherein the Fanzor polypeptide is fused to an N-terminus of the non-LTR retrotransposon protein.

[0053] In some aspects, the techniques described herein relate to a composition, wherein the Fanzor polypeptide is engineered to have nickase activity.

[0054] In some aspects, the techniques described herein relate to a composition, wherein the ωRNA component molecule directs the Fanzor polypeptide to a target sequence 5′ of ta targeted insertion site, and wherein the Fanzor polypeptide generates a strand break at the targeted insertion site.

[0055] In some aspects, the techniques described herein relate to a composition, wherein the ωRNA component molecule directs the Fanzor polypeptide to a target sequence 3′ of a targeted insertion site, and wherein the Fanzor polypeptide generates a strand break at the targeted insertion site.

[0056] In some aspects, the techniques described herein relate to a composition, wherein the donor polynucleotide further includes a polymerase processing element to facilitate 3′ end processing of the donor polynucleotide.

[0057] In some aspects, the techniques described herein relate to a composition, wherein the donor polynucleotide further includes a homology region on a 5′ end of the donor template, a 3′ end of the donor template, or both, wherein the homology region has homology to the target sequence.

[0058] In some aspects, the techniques described herein relate to a composition, wherein the homology region is from 8 to 25 base pairs.

[0059] In some aspects, the techniques described herein relate to one or more polynucleotides encoding one or more components of the engineered, non-naturally occurring composition of the present description.

[0060] In some aspects, the techniques described herein relate to one or more vectors including the one or more polynucleotides of the present description.

[0061] In some aspects, the techniques described herein relate to a method of modifying a target polynucleotide, the one or more polynucleotides, or one or more vectors to a cell or population of cells including the target polynucleotide, wherein the complex directs the non-LTR retrotransposon protein to the target sequence and the non-LTR retrotransposon protein facilitates insertion of the donor polynucleotide from the donor template into the target polynucleotide.

[0062] In some aspects, the techniques described herein relate to a method of modifying a target polynucleotide, wherein insertion of the donor polypeptide: (a) introduces one or more base edits; (b) corrects or introduces a premature stop codon; (c) disrupts a splice site; (d) inserts or restores a splice site; (e) inserts a gene or gene fragment at one or both alleles of the target polynucleotide; or (f) any combination thereof.

[0063] In some aspects, the techniques described herein relate to an isolated cell or progeny thereof including one or more modifications made using the method of modifying a target polynucleotide of the present description.

[0064] In some aspects, the techniques described herein relate to an engineered, non-naturally occurring composition including: (a) a Fanzor polypeptide, (b) an integrase protein associated with or otherwise capable of forming a complex with the Fanzor polypeptide, and optionally a reverse transcriptase, and (c) an ωRNA component molecule capable of forming a complex with the Fanzor polypeptide and directing site-specific binding of the complex to a target sequence of a target polynucleotide, the ωRNA component molecule further including a donor template encoding a donor polynucleotide for insertion into the target polynucleotide and located between two binding elements capable of forming a complex with the integrase protein.

[0065] In some aspects, the techniques described herein relate to a composition, wherein the Fanzor polypeptide is fused to the integrase protein and optionally the reverse transcriptase.

[0066] In some aspects, the techniques described herein relate to a composition, wherein the Fanzor polypeptide is engineered to have nickase activity.

[0067] In some aspects, the techniques described herein relate to a composition, wherein the ωRNA component molecule directs the Fanzor polypeptide to a target sequence, and wherein the Fanzor polypeptide generates a nick at a targeted insertion site.

[0068] In some aspects, the techniques described herein relate to a composition, wherein the donor polynucleotide further includes a homology region on the 5′ end of the donor template, the 3′ end of the donor template, or both, wherein the homology region has homology to the target sequence.

[0069] In some aspects, the techniques described herein relate to one or more polynucleotides encoding one or more components of a engineered, non-naturally occurring composition of the present disclosure.

[0070] In some aspects, the techniques described herein relate to one or more vectors including the one or more polynucleotides encoding one or more components of a engineered, non-naturally occurring composition of the present disclosure.

[0071] In some aspects, the techniques described herein relate to a method of modifying a target polynucleotide including delivering an engineered, non-naturally occurring composition of the present description, the one or more polynucleotides of the present description, or one or more vectors of the present description to a cell or population of cells including the target polynucleotide, wherein the complex directs the integrase protein to the target sequence and the integrase protein facilitates insertion of the donor polynucleotide from the donor template into the target polynucleotide.

[0072] In some aspects, the techniques described herein relate to a method of modifying a target polynucleotide, wherein insertion of the donor polynucleotide: (a) introduces one or more base edits; (b) corrects or introduces a premature stop codon; (c) disrupts a splice site; (d) inserts or restores a splice site; (e) inserts a gene or gene fragment at one or both alleles of the target polynucleotide; or (f) any combination thereof.

[0073] In some aspects, the techniques described herein relate to an isolated cell or progeny thereof including one or more modifications made using a of method modifying a target polynucleotide of the present disclosure.

[0074] In some aspects, the techniques described herein relate to a composition for detecting the presence of a target polynucleotide in a sample, including: one or more Fanzor polypeptides possessing collateral activity; at least one ωRNA component including a sequence capable of binding a target polynucleotide and designed to form a complex with the one or more Fanzor polypeptides; a detection construct including a polynucleotide component, wherein the one or more Fanzor polypeptides exhibits collateral nuclease activity and cleaves the polynucleotide component of the detection construct once activated by the target sequence; and optionally, one or more isothermal amplification reagents.

[0075] In some aspects, the techniques described herein relate to a composition, wherein the Fanzor polypeptide is a. a yeast Fanzor polypeptide; b. an amoeba Fanzor polypeptide; c. a protist Fanzor polypeptide; d. a metazoan Fanzor polypeptide; e. an algae Fanzor polypeptide; f. a fungi Fanzor polypeptide; g. a eukaryotic Fanzor polypeptide; h. a Mollusca Fanzor polypeptide; i. from an organism of the genus Eremothecium, Ashbya, Spizellomyces, Torulaspora, Naegleria, Rhizopus, Guillardia, Batillaria, Dreissena, Mercenaria, Batrachochytrium, or Parasitella; j. a virus Fanzor polypeptide, optionally a Bodo saltans virus Fanzor polypeptide, a Harvforvirus Fanzor polypeptide, Homavirus Fanzor polypeptide, Dishui Lake Large Algae virus 1 Fanzor polypeptide, or Yasminevirus r Fanzor polypeptide; k. a Fanzor polypeptide selected from a polypeptide, or includes a polypeptide, or is encoded by a polynucleotide set forth in Table 1, Table 6, Table 7, Table 8, Table 9, Table 10, Table 11, Table 12, Table 13, Table 14, Table 15, Table 18, Table 20, Table 21, Table 22, Example 16, Example 17, Example 18, FIG. 18A-18B, FIG. 19A-19B, FIG. 20, FIG. 33, FIG. 35, FIG. 53A-53G, FIG. 56A-56D, FIG. 66, FIG. 72D, FIG. 74E-74G, FIG. 75A-75C, FIG. 77A-77C, or any combination thereof, or is a homolog, ortholog, or variant thereof, and/or is 80-100 percent identical to a polypeptide sequence set forth in or that is encoded by a polynucleotide sequence set forth in Table 1, Table 6, Table 7, Table 8, Table 9, Table 10, Table 11, Table 12, Table 13, Table 14, Table 15, Table 18, Table 20, Table 21, Table 22, Example 16, Example 17, Example 18, FIG. 18A-18B, FIG. 19A-19B, FIG. 20, FIG. 33, FIG. 35, FIG. 53A-53G, FIG. 56A-56D, FIG. 66, FIG. 72D, FIG. 74E-74G, FIG. 75A-75C, FIG. 77A-77C, or any combination thereof; or 1. any combination of a-k.

[0076] In some aspects, the techniques described herein relate to a composition, wherein the isothermal amplification reagents are loop-mediated isothermal amplification (LAMP) reagents.

[0077] In some aspects, the techniques described herein relate to a composition, wherein the LAMP reagents include LAMP primers.

[0078] In some aspects, the techniques described herein relate to a composition, further including one or more additives to increase reaction specificity or kinetics.

[0079] In some aspects, the techniques described herein relate to a composition, further including polynucleotide binding beads.

[0080] In some aspects, the techniques described herein relate to a method for detecting polynucleotides in a sample, the method including; contacting one or more target polynucleotides with a Fanzor polypeptide, at least one ωRNA component molecule capable of forming a complex with the Fanzor polypeptide and direct sequence-specific binding to one or more target polynucleotides and a detection construct, wherein the Fanzor polypeptide exhibits collateral nuclease activity and cleaves the detection construction once activated by the one or more target polynucleotides; and detecting a signal produced by cleavage of the detection construction thereby detecting the one or more target polynucleotides.

[0081] In some aspects, the techniques described herein relate to a method for detecting polynucleotides in a sample, further including amplifying the one or more target polynucleotides using isothermal amplification prior to contacting.

[0082] These and other aspects, objects, features, and advantages of the example embodiments will become apparent to those having ordinary skill in the art upon consideration of the following detailed description of example embodiments.

### BRIEF DESCRIPTION OF THE DRAWINGS

[0083] An understanding of the features and advantages of the present invention will be obtained by reference to the following detailed description that sets forth illustrative embodiments, in which the principles of the invention may be utilized, and the accompanying drawings of which:

[0084] FIG. 1A-1Q—Exploration of the diversity of IS200/IS605 superfamily nucleases. (FIG. 1A) Evolution between IS200/IS605 transposon superfamily-encoded nucleases and associated RNAs. Dashed lines reflect tentative/unknown relationships. LCA, last common ancestor. (FIG. 1B) Locations of IscB loci and fragments in the I. tetrasporus genome. Intact locus is labeled as “ChlorIscB.” (FIG. 1C) Small RNA-seq of I. tetrasporus. (FIG. 1D) WebLogo of ChlorIscB cleavage TAM using a reprogrammed guide in an IVTT TAM screen. (FIG. 1E) WebLogo of OgeuIscB TAM using a reprogrammed guide in an IVTT TAM screen. (FIG. 1F (SEQ ID NO: 313-321)) Targeted OgeuIscB-mediated indel formation at the VEGFA locus in HEK293FT cells ordered by abundance, with indel size at left. (FIG. 1G) OgeuIscB-mediated indel formation at multiple sites in HEK293T cells. Error bars denote SD. *P<0.05. (FIG. 1H) Small RNA-seq of RNA from IsrB locus in K. racemifer strain SOSP1-21. (FIG. 11) WebLogo of Desulfovigula thermocuniculi (DthIsrB) TAM using a reprogrammed guide in an IVTT TAM screen. (FIG. 1J) DthIsrB mediates ωRNA-guided nontarget strand nicking in a TAM- and target-dependent manner in an IVTT cleavage assay using 5′ strand-specific labeled targets. (FIG. 1K) SmallRNA-seq of ωRNA from TnpB locus in K. racemifer strain SOSP1-21. (FIG. 1L (SEQ ID NO: 322-323)) Comparison of ωRNAs from K. racemifer IscB and TnpB loci. (FIG. 1M (SEQ ID NO: 324)) Secondary structure prediction of KraTnpB-associated ωRNA. (FIG. 1N) WebLogo of A. macrosporangiidus TnpB (AmaTnpB) TAM using a reprogrammed guide in an IVTT TAM screen. (FIG. 1O) In vitro reconstituted AmaTnpB cleavage of dsDNA substrates in the presence or absence of ωRNA, target, and/or TAM. (FIG. 1P) AmaTnpB performs ωRNA-guided, TAM-independent, target-dependent cleavage of 3′ Cy5.5-labeled ssDNA substrates. (FIG. 1Q) AmaTnpBcleavesa 3′ Cy5.5-labeled collateral ssDNA substrate in the presence of TAM- and target-containing dsDNA or target-containing ssDNA substrates. Contig accession and position information for all displayed loci are listed in table S6 of Altae-Tran et al. Science 374: 57-65 (2021).

[0085] FIG. 2 (SEQ ID NO: 325-350)—An alignment of exemplary TnpB sequences.

[0086] FIG. 3A-3B—OMEGA systems are small RNA-guided proteins (FIG. 3A) Schematic of the tnpB locus. TnpB and the associated ωRNA form a ribonucleic protein complex that cleaves DNA complementary to the guide region of the ωRNA. [22, Example 1] (FIG. 3B) Evolutionary relationship between prokaryotic TnpB and eukaryotic Fanzor. Protein domains are annotated as color boxes indicate. It is hypothesized that Fanzor is associated with an ωRNA [24, Example 1].

[0087] FIG. 4—Experimental workflow of small RNA-seq of ωRNA to identify ncRNA. RNA was pulled down using purified Fanzor protein. Small RNAs were then isolated from this pull-down, randomly fragmented, subjected to adaptor ligation, and amplified by PCR. NGS was then used to sequence the RNA reads, which were then mapped to the Fanzor locus.

[0088] FIG. 5—Experimental workflow of Western blotting to confirm Fanzor protein expression in HEK293FT cells. Cells are lysed by nonionic detergent containing buffer, and insoluble fractions including cellular debris were separated by tabletop centrifugation. Extracted proteins are then subjected to SDS-PAGE. After gel electrophoresis, proteins are transferred to PVDF membranes. These membranes are then incubated with primary antibody specific to epitope-tag attached to Fanzor. After blocking, a secondary antibody (labeled with horseradish peroxidase for chemiluminescence detection) is added to bind to the primary antibody. Chemiluminescence imaging is then used to visualize Fanzor protein expression.

[0089] FIG. 6—Experimental workflow for assessing Fanzor-mediated cleavage on the human genome. ωRNA expression vector targeting a locus on the human genome and Fanzor protein expression vectors are co-transfected into HEK293FT cells using lipofectamine. After incubation, cells are lysed to make the DNA accessible for sequencing. NGS is used to quantify indels, which are insertions or deletions, at the targeted locus.

[0090] FIG. 7A-7B—Comparisons of Cas12a, TnpB, and Fanzor. (FIG. 7A) Protein domain organization of Cas12a, TnpB, and Fanzor and their respective sizes (left); RNA guide locus organization and size for Cas12a, TnpB, and Fanzor (right). (FIG. 7B) Crystal structure of Cas12a in complex with guide RNA and target DNA and predicted structures of TnpB and Fanzor. Although much smaller than Cas12a, Fanzor retains the overall structure of the REC domain and bridge helix domain, both of which are important for RNA guide and target DNA binding.

[0091] FIG. 8A-8E—Reconstitution of Fanzor in human cells. (FIG. 8A) Secondary structure prediction of the Fanzor minimal ωRNA. The region corresponding to the transposon right end (RE) is highlighted in light blue, and the prospective guide sequence is highlighted in pink. (FIG. 8B) dsDNA cleavage by purified Fanzor-ωRNA complex. Cleaved DNA was ligated to adaptors for PCR amplification, and the cleavage position (mapped relative to the TAM (Transposon-Associated Motif)) was identified by next generation sequencing (NGS). Target guide RNA: guide sequence of minimal ωRNA was replaced by 30-nt target sequence. Non-target guide RNA: guide sequence of minimal ωRNA was replaced with a random 30-nt sequence. (FIG. 8C) Western blot showing expression of Fanzor in HEK293FT cells. N-terminal HA-NLS tagged Fanzor and C-terminal NLS-HA tagged Fanzor was expressed in HEK293FT cells with or without minimal ωRNA. Alpha-tubulin was used as a control to confirm cytosolic protein extraction, and histone H3 was used as a control for nuclear protein ex-traction. (FIG. 8D) Localization of Nuclear localization signal (NLS)-tagged Fanzor proteins. N-terminal HA-NLS tagged Fanzor or C-terminal NLS-HA tagged Fanzor was expressed in HEK293FT cells, and localization of Fanzor was examined via an HA-tag antibody. GAPDH was used as a control for cytosolic proteins. Blue: DAPI, Green: HA, Red: GAPDH (yellow: merged green and red signals). (FIG. 8E) Human genome cleavage assay for 12 representative genomic loci. C-terminal NLS-HA tagged Fanzor was expressed together with an ωRNA bearing a 30-nt guide sequence targeting each locus. Genomic DNA was extracted, and each target site was amplified with a specific pair of primers. The amplicons were analyzed by NGS, and the indel rate (%) was quantified by CRISPResso2.

[0092] FIG. 9A-9B—Identification of an optimal ωRNA boosts Fanzor activity in human cells. (FIG. 9A) Alignment of small-RNA sequencing reads (in blue) across the FZID16 locus. Pink horizontal bars show the 4 scaffold regions of the ωRNA identified and an additional scaffold region constructed with a hepatitis delta virus (HDV) attached to the 3′ end. Pink bars also indicate the distance from the FZID16-ORF in bp. (FIG. 9B) Fanzor activity (% indels) in HEK293FT cells at the on-target gID7 locus, off-target gID5 locus, or a no target locus with 5 ωRNA scaffold variants and an EGFP expression vector. An EGFP expression vector was used to control for successful transfection of DNA plasmids.

[0093] FIG. 10A-10E—Structure-guided engineering of Fanzor protein. (FIG. 10A) Crystal structure of site where cleavage is predicted to occur. This pocket region between the RuvC and Nuc lobe is likely where the target DNA will sit during cleavage. Mutated residues, located in this pocket region, are highlighted in red. (FIG. 10B) Gene editing activity (indel percentage) of Fanzor variants harboring mutations near the putative catalytic pocket site. Each N-terminal NLS tagged mutant and C-terminal tagged mutant was co-transfected with pMJ171 for targeting gID7. All Fanzors were co-expressed with an ωRNA with the optimal scaffold (pMJ 171). Each mutant was constructed with a N-terminal tagged version (blue) and a C-terminal tagged version (pink). Genomic DNA was extracted, and the target site was amplified with a specific pair of primers. The amplicons were analyzed by next generation sequencing, and the indel rate (%) was quantified. (FIG. 10C) To select candidate residues that may be involved in binding to the ωRNA, Fanzor orthologs were aligned to identify conserved positively-charged residues (K, R, or H) that are absent in FZID16. FIG. 10C shows alignment of Fanzor ortholgs for 3 mutated sites. (FIG. 10D) Thirty-two candidate mutation sites are shown on the predicted structure of Fanzor. Mutated residues are in red (see Table 5 for a list of mutations). (FIG. 10E) Gene editing activity (indel percentage) of Fanzor variants harboring mutations predicted to interact with the ωRNA. Each N-terminal NLS tagged mutant and C-terminal tagged mutant was co-transfected with pMJ171 for targeting gID7. Genomic DNA was extracted, and the target site was amplified with a specific pair of primers. The amplicons were analyzed by next generation sequencing, and the indel rate (%) was quantified.

[0094] FIG. 11—Further ωRNA variants for indel activity. Starting from pMJ171, additional 75, 150, 225 bp 5′ extended three ωRNA variants (pMJ204, 205 and 206, respectively) bearing gID7 were transfected with C-terminal NLS tagged FZID16. Higher bars indicate higher indel activities (mean±s.d.; n=3 independent experiments for pMJ204 to pMJ206, n=4 independent experiments for pMJ162 to pMJ171). N.s.: not significant, **: p<0.01, * * *: p<0.001.

[0095] FIG. 12A-12D—Gel electrophoresis images of PCR amplicons for catalytic site directed mutagenesis. Point mutants in FIG. 10A. N-terminal NLS tagged FZID16 (pMJ145) and C-terminal NLS tagged FZID16 (pMJ149) were amplified by PCR for point mutagenesis. Each 2 μl out of 25 μl PCR product was loaded on 1% Agarose gel. ˜6 kbp PCR amplicons are expected products for the following KLD reactions. The numbers on the lanes are unique sample numbers. Their detailed information is in Table 5.

[0096] FIG. 13A-13B—Gel electrophoresis images of PCR amplicons for consensus site directed mutagenesis. Point mutants in FIG. 10D. N-terminal NLS tagged FZID16 (pMJ145) and C-terminal NLS tagged FZID16 (pMJ149) were amplified by PCR for point mutagenesis. Each 2 μl out of 25 μl PCR product was loaded on 1% Agarose gel. ˜6 kbp PCR amplicons are expected products for the following KLD reactions. The numbers on the lanes are unique sample numbers. Their detailed information is in Table 5.

[0097] FIG. 14—Identification of eukaryotic TnpB-like proteins. 11 loci are confirmed (named Spu locus v1-v11). There was no intron. They are well structured by AlphaFold prediction. There are clear transposon ends and ncRNA region was clearly identifiable.

[0098] FIG. 15A-15B (SEQ ID NO: 351-363)—Spu expresses ncRNA from downstream of a Fanzor open reading frame (ORF).

[0099] FIG. 16A-16C (SEQ ID NO: 364-370)—Experimental strategy and results for a Fanzor RNP pull down assay in yeast and RNAseq analysis. RNP pull down assay with yeast worked for ncRNA identification for Spu.

[0100] FIG. 17—Strategy for a Fanzor RNP pooled pull down assay. The exemplary strategy shown demonstrates 12 contigs in 1 transformation for 1 L of yeast culture.

[0101] FIG. 18A-18B—Results for additional candidates with no introns (a single ORF in the transposon). FIG. 18A shows results from Torulaspora delbrueckii. FIG. 18B shows results for Naegleria lovaniensis.

[0102] FIG. 19A-19B—Results for additional candidates with no introns (2-4 ORFs in the transposon. A catalytic DDE was conserved.

[0103] FIG. 20—Contigs tested in yeast.

[0104] FIG. 21 (SEQ ID NO: 371)—An Spu RNP from yeast and RNAseq results. 87-88 nt at analogous position was always observed.

[0105] FIG. 22A-22B (SEQ ID NO: 372-378, 511)—T. del. RNP from yeast and RNAseq results. No ncRNA was identified from other yeast species Ashbya gossypii or Eremothecium cymbalariae DBVPG #7215.

[0106] FIG. 23A-23C (SEQ ID NO: 379-383)—Nlov Fanzor RNP from yeast and RNAseq results.

[0107] FIG. 24A-24B (SEQ ID NO: 384)—Mimiviridae Fanzor RNP from yeast and RNAseq results.

[0108] FIG. 25A-25B (SEQ ID NO: 385-387)—In vitro clevage/TAM screen with Fanzor-RNP from yeast.

[0109] FIG. 26 (SEQ ID NO: 388-391)—Results demonstrating that Spu Fanzor is active.

[0110] FIG. 27—Strategy for identifying suitable Fanzor polypeptides.

[0111] FIG. 28 (SEQ ID NO: 392-418)—Strategy for mining for remote ncRNA guided polypeptides in other locations in the genome.

[0112] FIG. 29—Loci with an inverted repeat (IR) and guide without a Fanzor gene.

[0113] FIG. 30—Results demonstrating a conserved region not containing a Fanzor gene.

[0114] FIG. 31—Fanzor in insects and mollusks.

[0115] FIG. 32—Ribbon diagram comparison of Fanzors from different organisms.

[0116] FIG. 33—Exemplary evaluation of multiple loci in the same genome (e.g., an insect genome) for determining boundaries. 4 loci are shown. Triangles upstream of the Fanzor (Fz) show repeats in various locations indicating structures of potential RNA structures. Inverted repeats are also indicated.

[0117] FIG. 34—Evaluation of activity of Fanzor systems with varying omega RNAs.

[0118] FIG. 35—Evaluation of activity of additional Fanzor variants.

[0119] FIG. 36—Bioinformatical and expression characterization of a Fanzor polypeptide and ωRNA from an exemplary alga (Guillardia theta).

[0120] FIG. 37 (SEQ ID NO: 426)—Predicted secondary structure of the ωRNA from G. theta of FIG. 36.

[0121] FIG. 38 (SEQ ID NO: 427-429)—Bioinformatical characterization and identification of G. theta predicted transposon ends from the identified G. theta ωRNA structure.

[0122] FIG. 39—Bioinformatical and expression characterization of a Fanzor polypeptide and ωRNA from Mollusca (Batillaria attramentaria), an exemplary multicellular eukaryotic organism.

[0123] FIG. 40 (SEQ ID NO: 430)—Predicted secondary structure of the ωRNA from B. attramentaria of FIG. 39.

[0124] FIG. 41—Bioinformatical and expression characterization of Fanzor polypeptides and ωRNA identified in Mollusca (Dreissena polymorpha), an exemplary multicellular eukaryotic organism. 4 contigs were evaluated, ωRNA was identified in 2 of them.

[0125] FIG. 42A-42B (SEQ ID NO: 431-432)—Predicted secondary structure an exemplary ωRNA identified the two contigs from D. polymorpha of FIG. 41.

[0126] FIG. 43—Bioinformatical and expression characterization of Fanzor polypeptides and ωRNA identified in Mollusca (Mercenaria mercenaria), an exemplary multicellular eukaryotic organism. 4 contigs were evaluated, ωRNA was identified in 3 of them.

[0127] FIG. 44A-44C (SEQ ID NO: 433-435)—Predicted secondary structure an exemplary ωRNA identified the three contigs from M. mercenaria of FIG. 43.

[0128] FIG. 45A-45C—Bioinformatical analysis and prediction of transposon ends of ωRNA identified M. mercenaria. Boxes indicate accession numbers of contigs where ωRNA was identified of the 4 contigs evaluated. FIG. 45A-45B (SEQ ID NO: 436-445) shows LE and RE transposon end analysis prior to considering ωRNA structure. FIG. 45C shows transposon end bioinformatical analysis from the ωRNA structure, which clarified the transposon LE and RE ends.

[0129] FIG. 46—Bioinformatical characterization of Fanzor polypeptides and ωRNA identified in an exemplary fungus (Batrachochytrium salamandrivorans, JAKFGG010000033). FIG. 46 shows analysis of 5 contigs were evaluated. Boxes indicate contigs where ωRNA was identified.

[0130] FIG. 47 (SEQ ID NO: 446)—Predicted secondary structure an exemplary ωRNA identified from B. salmandrivorans of FIG. 46.

[0131] FIG. 48A-48B—Bioinformatical characterization of Fanzor polypeptides and ωRNA identified in an exemplary fungus (Parasitella parasitica, LN731931 (FIG. 48A) and LN731111 (FIG. 48B)).

[0132] FIG. 49A-49B—Predicted secondary structure of an exemplary fungi (Parasitella parasitica, LN731931 (FIG. 49A (SEQ ID NO: 447)) and LN731111 (FIG. 49B (SEQ ID NO: 448))).

[0133] FIG. 50A-50D (SEQ ID NO: 449-453)—Bioinformatic characterization of small TnpB-like Fanzor polypeptides from Naegleria lovaniensis (Nlov) and omega RNA.

[0134] FIG. 51—Results from a TAM screen using Nov1 Fanzor yeast-RNP RNAseq.

[0135] FIG. 52A-52B (SEQ ID NO: 454-480)—Results from an indel assay in human cells for small TnpB-like Fanzors.

[0136] FIG. 53A-53G—Maps of Nlov Fanzors identified by bioinformatic analysis.

[0137] FIG. 54 (SEQ ID NO: 481-508)—Ternary Fanzor-omega RNA-target DNA complex modeling data based on Fanzor ID 83. The chain ID of the protein is P, the omega RNA is W, the DNA target strand is T, and the DNA non-target strand is N.

[0138] FIG. 55A-55D—Views of the 3D model structure (FIGS. 55A and 55C) and 3D ribbon model (FIGS. 55B and 55D) for an exemplary Fanzor-omega RNA-target DNA complex generated from the data shown in FIG. 54. NTS refers to the non-target strand. TS refers to the target strand.

[0139] FIG. 56A-56D—Functional screening of Fanzor mutation variants. (FIG. 56A) N- or C-terminally tagged SpuFanzor wild-type (WT) or variants harboring mutations were screened for indel activity against a target locus in the human genome. (FIG. 56B) R-substitution scanning of untagged Spu Fanzor WT (Fanzor ID16) or variants harboring point mutations in the WED and/or Bridge Helix domain. (FIG. 56C) Untagged or Tagged WT or SpuFanzor mutation variants harboring mutations in the RuvC domain were screened for indel activity against a target locus in the human genome. (FIG. 56D) Untagged or Tagged WT or SpuFanzor mutation variants harboring various combinations of point mutations were screened for indel activity against a target locus in the human genome.

[0140] FIG. 57—Architectures of TnpB/Fanzor/Cas12 proteins.

[0141] FIG. 58—REC architecture of TnpB, Fanzor2 and Fanzor 1 (e.g., ID83). The scaffoldREC (scaREC) can harbor REC1 domain.

[0142] FIG. 59A-59B—Comparison of TnpB and Fanzor (ID83) complexed with of a guide molecule (e.g., omega RNA) and target polynucleotide and engineering a minimal guide molecule. (FIG. 59A) The scaffoldREC+wREC (a WED domain harbored by a REC domain) cover the hybrid spacer:target duplex on one side. The Bridge helix (BH)+bREC cover the other side of the hybrid spacer:target duplex. Colors noted in FIG. 59A are represented in greyscale. The guide RNA of TnpB and some Cas12 proteins contains a core region (referred to as the “nexus area”, which is just a hairpin and interacts the same way with WED/BH areas in TnpB and some Cas12s. (FIG. 59B (SEQ ID NO: 509-510)) The minimal guide can be engineered to contain or model just the “nexus area”.

[0143] FIG. 60A-60L—Modeling Cas12 protein complexes (FIG. 60A-60K show Cas12a-Cas12k, respectively) FIG. 60L shows Cas12mC. 3 Cas12 proteins (Cas12a, Cas12d, and Cas12e) (FIGS. 60A, 60D, and 60E) that contain a secondary wREC (wREC2) domain positioned right after their first REC domain (wREC1). The Cas12 of FIG. 60C may have a REC upstream of the WED. The Cas12 of FIG. 60F was modeled to form a dimer, thus resulting the dimer having two RECs.

[0144] FIG. 61A-61C—Identification and modeling of a secondary wREC (wREC2) in Cpf1 (Cas12a) (FIG. 61A), Cas12d (FIG. 61B), and Cas12e (FIG. 61C).

[0145] FIG. 62A-62C—Phylogenetic analysis of Fanzor. FIG. 62A, Unrooted phylogenetic tree from representatives mined from Fanzor (Fz) and TnpB. Arrows indicate Fzs experimentally characterized in this study (Spizellomyces punctatus (SpuFz1), Guillardia theta (GtFz1), Naegleria lovaniensis (NlovFz2) and Mercenaria mercenaria (MmeFz2)). A detailed tree is shown on FIG. 68). FIG. 62B, Domain architectures of Acidamanococcus sp. Cas12 (AsCas12a), Deinococcus radiodurans ISDra2 TnpB, SpuFz1, GtFz1, NlovFz2, and MmeFz2 determined from structural analysis (see FIG. 69). FIG. 62C, (SEQ ID NO: 3844-3847) Top: Micrographs of S. punctatus, G. theta and N. lovaniensis and a photograph of M. mercenaria. Representative images from 3 independent cultures are shown. Middle: Small RNA-seq for RNPs of 4 representative Fz orthologs expressed in S. cerevisiae (n=3 independent technical replicates). Bottom: Secondary structure prediction of ωRNAs for the 4 representative orthologs. When the ωRNA overlaps the Fz gene, the stop codon is shown in orange; when not overlapping, the distance to the stop codon is indicated with an arrow. Guide region is shown in green and oriented vertically for comparison.

[0146] FIG. 63A-63G—Biochemical characterization of Fanzor. FIG. 63A, Scheme of TAM identification screen in S. cerevisiae. FIG. 63B, (SEQ ID NO: 3848-3855) TAMs of 4 representative Fz orthologs (SpuFz1, GtFz1, NlovFz2 and MmeFz2) and Sanger sequencing traces of the dsDNA targets with PSP1 target sequence matching reprogrammed ωRNA guides. The non-templated addition of a final base is an artifact of the polymerase (as a terminal A in the TS trace and a terminal T in the NTS trace). Cleavage sites are indicated by blue triangles. TS: target strand; NTS: non-target strand. FIG. 63C, SpuFz1-mediated target dsDNA cleavage with TAM mutations. Target dsDNA substrates were column-purified after proteinase treatment and run on a 2% agarose gel. FIG. 63D, SpuFz1-mediated target dsDNA cleavage dependence on divalent metal ions. Target dsDNA substrates were column-purified after proteinase treatment and run on a 2% agarose gel. All experiments except this panel were performed with Mg²⁺. FIG. 63E, Temperature dependence of SpuFz1-mediated target dsDNA cleavage activity. All experiments except this panel were performed at 37° C. FIG. 63F, SpuFz1 only cleaves target dsDNA. Target nucleic acid species were column-purified after proteinase treatment and run on a 2% agarose gel (for dsDNA) or denaturing PAGE gel (for ssDNA, dsRNA and ssRNA). The gels were imaged with SYBR Gold (for dsDNA) or using Cy3 (for ssDNA) and Cy5 (for dsRNA and ssRNA) channels. FIG. 63G, SpuFz1 does not exhibit collateral activity on Cy5.5-labeled collateral dsDNA, Cy5.5-labeled collateral ssDNA, Cy5-labeled collateral dsRNA or Cy5-labeled collateral ssRNA. Representative gel images from 3 independent technical replicates are shown.

[0147] FIG. 64A-64H—Human genome engineering with Fanzor. FIG. 64A, (SEQ ID NO: 3856-3860) Workflow for testing Fz activity in HEK293FT cells. FIG. 64B-64D, Indel rates and average indel length generated by SpuFz1 (FIG. 64B), NlovFz2 (FIG. 64C) and MmeFz2 (FIG. 64D) at 8 genomic loci in HEK293FT cells. Left: Average indel (%), data are presented as mean values+/−standard deviation (n=3). Right: Average indel length at B2M target site. FIG. 64E, (SEQ ID NO: 3861-3862) Secondary structure prediction of canonical (left) and ghost (right) ωRNAs for SpuFz1. Identical nucleotides between canonical and ghost ωRNA are highlighted in yellow. Guide region has been abbreviated for visualization purposes. FIG. 64F, SpuFz1 activity at B2M with canonical ωRNA, modified ωRNA and ghost ωRNA scaffolds. Average indel (%), data are presented as mean values+/−standard deviation (n=3). Statistical analysis was performed using a two-tailed t-test. *, p<0.05; **, p<0.01. FIG. 64G, Indel activity of combinatorial SpuFz1 point mutants at B2M. Average indel (%), data are presented as mean values+/−standard deviation (n=3). Statistical analysis was performed using a two-tailed t-test. *, p<0.05; **, p<0.01; ***, p<0.001; ****, p<0.0001. FIG. 64H, SpuFz1-v2 activity at 12 human genomic loci. Average indel (%), data are presented as mean values+/−standard deviation (n=3).

[0148] FIG. 65A-65F—Structure of SpuFanzor1. FIG. 65A, Domain organization of SpuFz1. White regions represent the flexible loop. FIG. 65B, Cryo-EM map of SpuFz1-ωRNA-target DNA complex. FIG. 65C, Structural model of SpuFz1-ωRNA-target DNA complex. REC domain is colored in gray, WED domain is colored in yellow as represented in greyscale, RuvC domain is colored in light blue as represented in greyscale, NUC domain is colored in pink as represented in greyscale, ωRNA is colored in purple as represented in greyscale, DNA target strand (TS) is colored in red, and DNA non-target strand (NTS) is colored in blue as represented in greyscale. FIG. 65D, (SEQ ID NO: 3863) Diagram of SpuFz1 ωRNA and trimmed variants. FIG. 65E, SpuFz1-v2 activity at B2M with trimmed ωRNA variants. Average indel (%), data are presented as mean values+/−standard deviation (n=3). Statistical analysis was performed using a two-tailed t-test. *, p<0.05; **, p<0.01; ***, p<0.001; ****, p<0.0001. FIG. 65F, (SEQ ID NO: 3864) Minimal SpuFz1 ωRNA design.

[0149] FIG. 66—Schematic of ωRNA and target DNA recognition. The amino acid residues that engage in interactions with nucleic acids are highlighted in colored boxes, with the colors specified by the domains where these residues reside. Hydrogen bonds and salt bridges are shown by dashed lines. Hydrophobic interactions are shown by solid lines.

[0150] FIG. 67—Fanzor, TnpB and Cas12. OMEGA systems are the ancestors of CRISPR-Cas systems. The ancestral ωProtein TnpB became associated with CRISPR arrays and evolved into Cas12 in prokaryotes and into Fz in eukaryotes. Cas12 works as a CRISPR effector protein for adaptive immunity. TnpB helps propagate insertion sequences in which it is encoded. The biological roles of Fzs remain unknown. ωProteins Fz and TnpB are relatively compact proteins (400-700 and 400-500 aa, respectively) compared to Cas12 proteins (1000-1500 aa).

[0151] FIG. 68—Phylogenetic tree of Fanzor and TnpB. Phylogenetic tree built from the RuvC region of hits detected from structural and profile mining of Fanzor. Blue, black and yellow leaves indicate the domain annotation of the contig where the hit is found respectively eukaryotes, viruses and prokaryotes. Fanzor1 and Fanzor2 clades are shown respectively in blue and pink. Fanzors and TnpB of interest are indicated by arrows. The bars forming the blue inner ring are proportional to the size of the Fanzors in aa as annotated in the database. The middle ring indicates the domains of life from which the Fanzor/TnpB is found (light gray: bacteria, dark gray: archaea, yellow: viruses, blue: eukaryotes). The outer ring displays the taxonomy of the organism in which the Fanzor/TnpB is found (red: bacteria, dark red: archaea, brown: phage and archaeal viruses, pink: eukaryotic viruses, beige: giant viruses, dark green to yellow gradient: fungi, light green gradient: protists, dark blue: opisthokonta (choanoflagellata), crimson: arthropoda, purple: mollusks, and light blue to dark blue gradient: plants with Chlorophyta, Streptophyta, and Cryptophyceae. The green triangles in the outer ring indicate clusters of hits from contigs annotated to be eukaryotes and represent putative eukaryotic radiations. Black trapezoid shapes indicate the two branches containing giant viruses and bacterial hosts.

[0152] FIG. 69—Structural overview and comparative analysis of representative Fanzor proteins. Structural comparison of ISDra2 TnpB (PDB: 8H1J), NlovFz2 (AlphaFold model, AF), MmeFz2 (AF), SpuFz1 (AF), GtFz1 (AF) and AsCas12a (PDB: 5B43). Color coding represents common structural regions. Arrows highlight the hypothesized evolutionary progression from TnpB to Fanzors and Cas12a. Fanzor1, Fanzor2 and Cas12a likely emerged independently from TnpBs and acquired various extensions in the N-terminal region (N-term), REC domain, RuvC domain and NUC domain. The extensions in Fanzor1 (represented by SpuFz1 and GtFz1) involve the REC and RuvC domains, which form a channel that is similar to the one found in Cas12a.

[0153] FIG. 70A-70D—Fanzor and standalone ghost loci architecture. FIG. 70A, Top: Comparison of loci architecture for Fz gene and ghost in S. punctatus and comparison of their Weblogo inverted repeat sequences (IR). IRs are shown as blue triangles, TAM regions as orange rectangles, Fz gene as a light blue arrow, ωRNA regions as medium blue rectangles with a downstream light blue rectangle showing the guide (spacer region). Fanzor and ghost loci share similar but distinct IRs. Bottom: Comparison of loci architecture for Fz gene and ghost in G. theta, N. lovaniensis, and M. mercenaria. FIG. 70B, Sequences alignments of ghost loci from IR to IR. Schematic of the architecture is shown on top of the alignment. Conservation is shown as bits on the top row. In the alignment, grey color indicates identity, black color indicates differences and lines indicate gaps. The sequences are sorted according to a phylogenetic tree made from the full nucleotide sequences in FastTree. IRs and ωRNA regions are strongly conserved across all ghost loci. FIG. 70C, (SEQ ID NO: 3865-3866) Sequence alignment of the ωRNA region or IR of a Fanzor locus and a ghost locus. Nucleotide background colors highlight differences between ωRNAs. FIG. 70D, (SEQ ID NO: 3867-3870) Small RNA-seq of Fanzor loci from S. punctatus shows expression of associated ωRNAs.

[0154] FIG. 71—Small RNA-seq of RNPs of Fz orthologs expressed in Saccharomyces cerevisiae. Small RNA-seq of RNPs of Fz orthologs expressed in S. cerevisiae mapped to the Fz loci. RE, transposon right end.

[0155] FIG. 72A-72D—Human genome targeting activity of Fanzor, TnpB and Cas12. FIG. 72A, (SEQ ID NO: 3871-3897) Indels generated by Fzs at the B2M locus ordered by abundance, with indel size at left. Left: SpuFz1. Middle: NlovFz2. Right: MmeFz2. FIG. 72B, Indel rates and average indel length generated by ISDra2 TnpB, AsCas12a and AsCas12f1 at 8 genomic loci in HEK293FT cells. Left: The average indel (%) generated is shown with an error bar showing standard deviation (n=3). Right: Indel pattern from −50 to +20 bp with inset showing the indel pattern spanning 10-bp deletion to 5-bp insertion. FIG. 72C, Targeting SpuFz1, NlovFz2 and MmeFz2 to a representative B2M locus in HEK293FT cells with ωRNAs containing guides of various lengths. The average indel (%) generated is shown with an error bar showing standard deviation (n=3). Left: SpuFz1. Middle: NlovFz2. Right: MmeFz2. FIG. 72D, Indel activity (relative to WT) of 111 single point mutants measured in HEK293T cells at a representative B2M locus. Red arrows indicate the five mutations tested further in a combinatorial manner. The average indel (%) generated is shown with an error bar showing standard deviation (n=3). Statistical analysis was performed using a two-tailed t-test. Significant increase compared to WT is indicated by (*). *, p<0.05; ****, p<0.0001.

[0156] FIG. 73A-73F—Cryo-EM data processing for the SpuFz1-ωRNA-target DNA complex. FIG. 73A, Flow chart of cryo-EM data analysis. FIG. 73B, Representative cryo-EM image from 8,727 movies. FIG. 73C, Representative and 2D averages. FIG. 73D, Angular distribution of the SpuFz1-ωRNA-target DNA particles in the final round of 3D refinement. FIG. 73E, Sharpened EM density maps colored by local resolution as calculated by CryoSPARC. FIG. 73F, The ‘gold-standard’ FSC curves of the SpuFz1-ωRNA-target DNA complex.

[0157] FIG. 74A-74G—Structure of the ωRNA and target DNA recognition. FIG. 74A, The overall structure of the SpuFz1-ωRNA-target DNA complex. Domain structure shown in surface and by colors. FIG. 74B, Electrostatic surface potential of SpuFz1. FIG. 74C, (SEQ ID NO: 3898-3900) Schematic of the ωRNA and target DNA. Disordered regions are enclosed in a dashed box. FIG. 74D, Structural model of the ωRNA and target DNA, FIG. 74E-74G, The structural details of the interaction between stem loop 1 and SpuFz1.

[0158] FIG. 75A-75C—TAM recognition by SpuFz1. FIG. 75A-75B, Interactions between the TAM and SpuFz1. FIG. 75C, Interactions between the end of the TAM and the WED domain loop of SpuFz1.

[0159] FIG. 76A-76D—The structure of RuvC and NUC domains and the active site of SpuFz1. FIG. 76A, Structure of a DNA target strand segment bound to the RuvC and NUC domains of SpuFz1. FIG. 76B, Electrostatic surface potential of the RuvC and NUC domains. FIG. 76C, Structural details of the active site. FIG. 76D, Structure of the zinc finger motif in the NUC domain of SpuFz1.

[0160] FIG. 77A-77I—Structure comparison of SpuFz1 with ISDra2 TnpB. FIG. 77A, Domain architecture of SpuFz1. FIG. 77B, Overall structure of the SpuFz1-ωRNA-target DNA complex. FIG. 77C, Domain architecture of ISDra2 TnpB. FIG. 77D, Overall structure of the ISDra2 TnpB-ωRNA-target DNA complex (PDB code: 8H1J). Corresponding domains across structures are color-coded. FIG. 77E, Nucleic acid structure comparison. SpuFz1's ωRNA lacks the pseudoknot structure inherent to ISDra2 TnpB. FIG. 77F, WED domain structure comparison. In contrast to the WED domain of ISDra2 TnpB, SpuFz1 exhibits three inserted small alpha helical structures, which provides interactions with TAM motifs of target DNA. FIG. 77G, REC domain structure comparison. An additional sequence of 136 aa is inserted within the REC domain of SpuFz1 relative to ISDra2 TnpB. FIG. 77H, RuvC domain structure comparison. The helices of SpuFz1's RuvC domain are extended and interact with the additional part of the REC domain, providing enhanced structural protection for the RNA/DNA heteroduplex compared to ISDra2 TnpB. FIG. 77I, NUC domain structure comparison. Both SpuFz1 and ISDra2 TnpB share a conserved CCCC zinc finger motif in the NUC domain. The additional NUC structure in SpuFz1 aids in stabilizing the 5′ end of its ωRNA, which forms interactions with the RNA/DNA heteroduplex.

[0161] FIG. 78A-78B—Uncropped gel images used in Example 15 FIG. 78A, Agarose gels. FIG. 78B, TBE-Urea gels.

[0162] FIG. 79A-79C—Structural overview of Fanzor1 complexes. Schematic locus and cryo-EM structure of the Fz1-ωRNA-target DNA complex from Spizellomyces punctatus (SpuFz1) (FIG. 79A), Guillardia theta (GtFz1) (FIG. 79B), and Parasitella parasitica (PpFz1) (FIG. 79C). REC domain is colored gray, WED domain is colored yellow as represented in greyscale, RuvC domain is colored cyan as represented in greyscale, TNB domain is colored pink as represented in greyscale, Fanzor RuvC Insertion (FRI) domain is colored light cyan as represented in greyscale; Saccharomyces cerevisiae Cyclophilin1 (ScCyp1) is colored green as represented in greyscale, ωRNA is colored purple, DNA target strand (TS) is colored red as represented in greyscale, and DNA non-target strand (NTS) is colored blue as represented in greyscale.

[0163] FIG. 80A-80C—Structural Diversity of Fanzor1. (FIG. 80A) Structural comparison of the RuvC and TNB domains across GtFz1 (left), SpuFz1 (middle), and PpFz1 (right). The dashed box indicates the FRI domain of PpFz1. (FIG. 80B) Comparative analysis of ωRNA structures between GtFz1, SpuFz1, and PpFz1. EM density is shown transparently. The ωRNA scaffold is colored purple as represented in greyscale, and the guide is green as represented in greyscale. (FIG. 80C) Schematic of the ωRNA in GtFz1, SpuFz1, and PpFz1 (SEQ ID NO: 3901-3904).

[0164] FIG. 81A-81C—Comparative analysis of DNA recognition by Fanzor1. (FIG. 81A) Recognition of the TAM duplex by GtFz1 (left), SpuFz1 (middle), and PpFz1 (right). The TAM sequence is highlighted in pink as represented in greyscale. (FIG. 81B) Interactions involved in TAM recognition, showing a conserved structural feature among GtFz1, SpuFz1, and PpFz1. Specifically, an arginine (R) residue from a loop in the REC domain inserts into the groove of the TAM duplex. The N-terminal end of the alpha-4 helix from the REC domain, along with a short helix from the WED domain, recognizes the TAM base groups in a similar orientation. Different Fz1 proteins utilize non-conserved residues to recognize unique TAM sequences. (FIG. 81C) Initiation of the R-loop by the loop from the WED domain. Protein domains and ωRNA are colored as in FIG. 79A-79C and FIG. 80A-80C, the DNA target strand (TS) is colored red as represented in greyscale, and the DNA non-target strand (NTS) is colored blue as represented in greyscale.

[0165] FIG. 82A-82D—Catalytic triad of Fanzor1 and other RuvC nucleases. (FIG. 82A) Conserved catalytic motifs in the RuvC domain are shared among TnpB, Fz2, Fz1, and Cas12a. (FIG. 82B) Secondary structure of a canonical RuvC nuclease. (FIG. 82C) Structural details of the catalytic sites in SpuFz1, GtFz1 (which contains a non-canonical N in place of the canonical D in the third position), and PpFz1. (FIG. 82D) In vitro cleavage activity of SpuFz1 wild-type, D606A, D606N.

[0166] FIG. 83A-83E—Structural features of GtFz1. (FIG. 83A) Structures of the GtFz1-ωRNA binary complex and the GtFz1-ωRNA-target DNA ternary complex. Protein domains, ωRNA, and target DNA are colored as in FIG. 79A-79C, FIG. 80A-80C, and FIG. 81A-81C. (FIG. 83B) Comparison of the GtFz1 binary (white) and ternary (green, as represented in greyscale) complexes. (FIG. 83C) The EM map of the GtFz1 ternary complex displays the NTS loading into the RuvC domain. GtFz1 is colored gray, ωRNA is colored purple as represented in greyscale, and DNA is colored red as represented in greyscale. (FIG. 83D) Electrostatic potential mapping in GtFz1 illustrates the DNA binding channel. The green dashed circle, as represented in greyscale, indicates the channel for the DNA NTS binding. The white dashed circle indicates the channel for guide/TS heteroduplex binding. (FIG. 83E) 3D Variability Analysis (3DVA) reveals the conformational dynamics of SL1 and the RuvC/TNB domains. EM maps of the first frame (left) and the last frame (middle) are shown from the same viewpoint to highlight the conformational change. The right panel displays a structural alignment of the models from the first frame and the last frame.

[0167] FIG. 84A-84K—RuvC dsDNA loading and the lid regulation in SpuFz1. (FIG. 84A) Structure of SpuFz1 State III. dsDNA is bound to the large cleft formed by REC/RuvC/TNB domains. The dsDNA is bent by about 1370 and the tip contacts the catalytic site of RuvC. SpuFz1 is colored white, ωRNA is colored purple as represented in greyscale, TS is colored red as represented in greyscale, NTS is colored blue as represented in greyscale. The dsDNA bound to RuvC is shown in surface and colored in gold as represented in greyscale and tan as represented in greyscale for each strand. The catalytic site in the RuvC domain is circled with a dashed line. A schematic diagram of the ternary complex formation is shown below. Substrate ds2, in which the TS is partially modified and NTS is unmodified, was used. (FIG. 84B) Structure of SpuFz1 State IV. dsDNA is bound to the large cleft formed by REC/RuvC/TNB domains in a distinct conformation from State III. SpuFz1 is colored white, ωRNA is colored purple as represented in greyscale, TS is colored red as represented in greyscale, NTS is colored blue as represented in greyscale. The dsDNA bound to RuvC is shown in surface and colored in gold as represented in greyscale and tan as represented in greyscale for each strand. The catalytic site in the RuvC domain is circled with a dashed red line. A schematic diagram of the ternary complex formation is shown below. Substrate ds3, where TS is unmodified and NTS is partially modified. (FIG. 84C) Close-up of charge interactions in the structure of SpuFz1 State III between residues of the TNB domain and dsDNA loaded onto the RuvC domain. (FIG. 84D) In the structure of SpuFz1 State III, residue R631 in the C-terminus loop of the RuvC domain, together with Y541, occupy the groove in the dsDNA that is bound to the RuvC domain. The catalytic site in the RuvC domain is circled with a dashed line. (FIG. 84E) In the structure of SpuFz1 State IV, interactions formed by Q152, N159, and R514 stabilize the unwound DNA strand, which was not observed in State III. The catalytic site in the RuvC domain is circled with a dashed line. (FIG. 84F) Structural alignment of SpuFz1 State III (green as represented in greyscale) and State IV (pink as represented in greyscale) showing that the dsDNA bound to the RuvC domain of these two states displays distinct conformations. The α5 of the REC domain is shifted by 2 Å. (FIG. 84G) The EM maps of SpuFz1 State I, State V, and State VI illustrate the conformational changes of the lid. In State I, an 8-bp guide/DNA duplex is formed. The lid is in an upward orientation, and no DNA is loaded onto the RuvC domain, representing an inactive state. In State V, a 15-bp guide/DNA duplex is formed. The lid is in a downward orientation, and the DNA TS is loaded onto the RuvC domain, representing an active state. In State VI, a 15-bp guide/DNA duplex is formed. The lid density is weak due to its structural flexibility. The DNA density is observed around the RuvC domain. Schematic diagrams of ternary complex formation are shown below (substrate ds2, TS is partially modified and NTS is unmodified; substrate ds5, TS is fully modified and NTS is unmodified; substrate ds6, TS is unmodified and NTS is fully modified). (FIG. 84H) Structural alignment of the lid of SpuFz1 in the inactive state (I) (white) with the active state (V) (cyan as represented in greyscale). The short helix of the lid in the active state is released. (FIG. 84I) Electrostatic potential mapping in SpuFz1 illustrates the structural changes from the inactive state (I) to the active state (V). The catalytic site is circled with a dashed line. The downward conformation of the lid forms a small cleft on the RuvC and TNB domain, allowing the DNA substrate to load onto the RuvC domain and approach the catalytic site. (FIG. 84J) Interactions of the lid in SpuFz1 State V. The lid is sandwiched by the guide/TS heteroduplex and the DNA segment loaded onto the RuvC domain. Hydrogen bonds are shown with dashed lines. (FIG. 84K) Structural alignment of SpuFz1 in the inactive state (I) with the active state (V). The entire complex in the inactive state is colored white. For the active state, the RuvC domain is colored cyan as represented in greyscale, ωRNA is colored purple as represented in greyscale, and the DNA TS is colored red as represented in greyscale. The inset shows the detailed conformational change at the 5′ end of the ωRNA, along with the TNB domain. This change is driven by the formation of the 15-bp guide/DNA heteroduplex.

[0168] FIG. 85A-85J—PpFz1 DNA loading and cleavage mechanisms. (FIG. 85A-85D) Structures illustrating the activation stages of PpFz1, detailing the conformational changes, DNA loading, and cleavage processes. Protein domains, ωRNA, and target DNA are colored as in FIG. 84A-84K. (FIG. 84E) Structural alignment of the lid of PpFz1 comparing the inactive state (I) (white) with the intermediate state (II) (cyan as represented in greyscale). (FIG. 85F) Structural alignment of the REC domain comparing the inactive state (I), intermediate state (II), and active state (III). (FIG. 85G) Structural alignment at the 5′ end of the ωRNA and the TNB domain comparing the inactive state (I), intermediate state (II), and active state (III). (FIG. 85H) Predicted Local Distance Difference Test (pLDDT) scores for the lid on the RuvC domain of Cas12s, Fzs, and TnpBs. (FIG. 85I) Length ranges of the lid in Cas12s, Fzs, and TnpBs. (FIG. 85J) Structural alignment of the REC domain comparing the active states of GtFz1 (red as represented in greyscale), SpuFz1 (gray), and PpFz1 (white).

[0169] The figures herein are for illustrative purposes only and are not necessarily drawn to scale.

### DETAILED DESCRIPTION OF THE EXAMPLE EMBODIMENTS

### General Definitions

[0170] Unless defined otherwise, technical and scientific terms used herein have the same meaning as commonly understood by one of ordinary skill in the art to which this disclosure pertains. Definitions of common terms and techniques in molecular biology may be found in Molecular Cloning: A Laboratory Manual, 2^{nd} edition (1989) (Sambrook, Fritsch, and Maniatis); Molecular Cloning: A Laboratory Manual, 4^{th} edition (2012) (Green and Sambrook); Current Protocols in Molecular Biology (1987) (F. M. Ausubel et al. eds.); the series Methods in Enzymology (Academic Press, Inc.): PCR 2: A Practical Approach (1995) (M. J. MacPherson, B. D. Hames, and G. R. Taylor eds.): Antibodies, A Laboratory Manual (1988) (Harlow and Lane, eds.): Antibodies A Laboratory Manual, 2^{nd} edition 2013 (E. A. Greenfield ed.); Animal Cell Culture (1987) (R. I. Freshney, ed.); Benjamin Lewin, Genes IX, published by Jones and Bartlett, 2008 (ISBN 0763752223); Kendrew et al. (eds.), The Encyclopedia of Molecular Biology, published by Blackwell Science Ltd., 1994 (ISBN 0632021829); Robert A. Meyers (ed.), Molecular Biology and Biotechnology: a Comprehensive Desk Reference, published by VCH Publishers, Inc., 1995 (ISBN 9780471185710); Singleton et al., Dictionary of Microbiology and Molecular Biology 2nd ed., J. Wiley & Sons (New York, N.Y. 1994), March, Advanced Organic Chemistry Reactions, Mechanisms and Structure 4th ed., John Wiley & Sons (New York, N.Y. 1992); and Marten H. Hofker and Jan van Deursen, Transgenic Mouse Methods and Protocols, 2^{nd} edition (2011).

[0171] As used herein, the singular forms “a”, “an”, and “the” include both singular and plural referents unless the context clearly dictates otherwise.

[0172] The term “optional” or “optionally” means that the subsequent described event, circumstance or substituent may or may not occur, and that the description includes instances where the event or circumstance occurs and instances where it does not.

[0173] The recitation of numerical ranges by endpoints includes all numbers and fractions subsumed within the respective ranges, as well as the recited endpoints.

[0174] The terms “about” or “approximately” as used herein when referring to a measurable value such as a parameter, an amount, a temporal duration, and the like, are meant to encompass variations of and from the specified value, such as variations of +/−10% or less, +1-5% or less, +/−1% or less, and +/−0.1% or less of and from the specified value, insofar such variations are appropriate to perform in the disclosed invention. It is to be understood that the value to which the modifier “about” or “approximately” refers is itself also specifically, and preferably, disclosed.

[0175] As used herein, a “biological sample” may contain whole cells and/or live cells and/or cell debris. The biological sample may contain (or be derived from) a “bodily fluid”. The present invention encompasses embodiments wherein the bodily fluid is selected from amniotic fluid, aqueous humour, vitreous humour, bile, blood serum, breast milk, cerebrospinal fluid, cerumen (earwax), chyle, chyme, endolymph, perilymph, exudates, feces, female ejaculate, gastric acid, gastric juice, lymph, mucus (including nasal drainage and phlegm), pericardial fluid, peritoneal fluid, pleural fluid, pus, rheum, saliva, sebum (skin oil), semen, sputum, synovial fluid, sweat, tears, urine, vaginal secretion, vomit and mixtures of one or more thereof. Biological samples include cell cultures, bodily fluids, cell cultures from bodily fluids. Bodily fluids may be obtained from a mammal organism, for example by puncture, or other collecting or sampling procedures. The biological sample can be obtained from an environment (e.g., water source, soil, air, and the like). The biological sample can be obtained from a plant or algae. The biological sample can contain prokaryotic organisms. Biological samples can be obtained via any suitable collection or harvesting technique including active and passive collection/harvesting methods, including but not limited to, puncture, cutting, digging, filtering, bagging, draining, and/or the like.

[0176] The terms “subject,” “individual,” and “patient” are used interchangeably herein to refer to a vertebrate, preferably a mammal, more preferably a human. Mammals include, but are not limited to, murines, simians, humans, farm animals, sport animals, and pets. Tissues, cells and their progeny of a biological entity obtained in vivo or cultured in vitro are also encompassed.

[0177] Various embodiments are described hereinafter. It should be noted that the specific embodiments are not intended as an exhaustive description or as a limitation to the broader aspects discussed herein. One aspect described in conjunction with a particular embodiment is not necessarily limited to that embodiment and can be practiced with any other embodiment(s). Reference throughout this specification to “one embodiment”, “an embodiment,” “an example embodiment,” means that a particular feature, structure or characteristic described in connection with the embodiment is included in at least one embodiment of the present invention. Thus, appearances of the phrases “in one embodiment,” “in an embodiment,” or “an example embodiment” in various places throughout this specification are not necessarily all referring to the same embodiment but may. Furthermore, the particular features, structures or characteristics may be combined in any suitable manner, as would be apparent to a person skilled in the art from this disclosure, in one or more embodiments. Furthermore, while some embodiments described herein include some, but not other features included in other embodiments, combinations of features of different embodiments are meant to be within the scope of the invention. For example, in the appended claims, any of the claimed embodiments can be used in any combination.

[0178] All publications, published patent documents, and patent applications cited herein are hereby incorporated by reference to the same extent as though each individual publication, published patent document, or patent application was specifically and individually indicated as being incorporated by reference.

### Overview

[0179] Fanzor (Fz) was reported in 2013 to be a eukaryotic TnpB-IS200/IS605-like protein encoded by transposable elements (TEs), and it was initially suggested that Fzs (and prokaryotic TnpBs) regulate TE activity possibly via methyltransferase activity⁷. More recently, TnpB was reported to be part of a new class of RNA-guided system termed OMEGA (Obligate Mobile Element-guided Activity)^{4,6}. OMEGA systems encompass an RNA-guided endonuclease protein (i.e., TnpB, IscB, IsrB) and anon-coding RNA (ncRNA) transcribed from the transposon end region (called ωRNA)⁴. OMEGA systems are the ancestors of CRISPR-Cas systems, and TnpB evolved into the single RNA-guided endonuclease, Cas12. TnpB also shares remote homology with Fz⁴. These findings raise the possibility that Fz may be a eukaryotic type of CRISPR-Cas/OMEGA system. By combining phylogenomic, biochemical and structural studies, applicants sought to determine the enzymatic activity and mechanism of Fz and reprogram it for human genome editing.

[0180] Embodiments disclosed herein provide engineered Fanzor systems that function as re-programmable nucleases. The Fanzor system comprises a Fanzor polypeptide and a nucleic acid component capable of forming a complex with the Fanzor polypeptide and directing the complex to a target polynucleotide. The Fanzor systems and Fanzor/nucleic acid component complexes may also be referred to herein as OMEGA (Obligate Mobile Element Guided Activity) systems or complexes, or Q systems or complexes for short. Fanzor systems are a distinct type of Q system, which further include IscB, IsrB, IshB, and TpnB systems. The nucleic acid component of Q systems is structurally distinct from other RNA-guided nucleases, such as CRISPR-Cas systems, and may also be referred to as a ωRNA. In certain example embodiments, the Fanzor systems are RNA-predominate, that is the nucleic acid component makes a larger contribution to the overall size of the Fanzor complex relative to other RNA-guided nuclease systems such as CRISPR-Cas.

[0181] While Fanzor proteins were known to exist within certain eukaryotic species, See e.g., Bao & Jurka, Mobile DNA, 412, (2013), Applicants characterize for the first time that Fanzor systems function as polynucleotide-guided nucleases, provide a characterization of the polynucleotide component, and demonstrate that such systems can be engineered and reprogrammed for a wide variety of gene editing and diagnostic purposes. The present disclosure provides compositions and methods of use thereof. In general, the compositions may comprise engineered and reprogrammable Fanzor systems that allow more flexible and effective strategies to manipulate and modify target polynucleotides. In certain example embodiments, the engineered Fanzor systems disclosed herein may cleave or nick the target polynucleotide. Other modifications which enable further modification and/or editing of target polynucleotides are disclosed in further detail below. The nucleic acid component may be an RNA. The nucleic acid component is also referred to herein as an ωRNA.

[0182] In one embodiment, the Fanzor systems and related compositions may specifically target single-strand or double-strand DNA. In one embodiment, the Fanzor system may bind and cleave double-strand DNA. In one embodiment, the Fanzor system may bind to double-stranded DNA without introducing a break to either of the strands. In one embodiment, the Fanzor polypeptides or nuclease/nucleic acid component complexes may open, disrupting the continuity of one of the two DNA strands, thereby introducing a nick of the double stranded DNA.

[0183] In another aspect, embodiments disclosed herein include applications of the compositions herein, including diagnostics, therapeutics, and methods of detection. Delivery of the proteins and systems disclosed is also provided, including to a variety of cells and via a variety of particles and vectors.

### Fanzor Compositions

[0184] In one aspect, embodiments disclosed herein are directed to compositions comprising an engineered Fanzor and/or ωRNA capable of forming a complex with the Fanzor and directing site-specific binding of the Fanzor to a target sequence on a target polypeptide. In some embodiments, the Fanzor and/or ωRNA is capable of complexing with an ion, such as calcium, magnesium, manganese, or any combination thereof.

### Fanzor Polypeptides

[0185] Fanzor polypeptides (also referred to herein as Fanzor proteins) of the present invention may comprise a Ruv-C-like or RuvC domain and one or more other domains such as a WED domain, REC domain, Bridge-Helix domain, NUC domain, or any combination thereof. Exemplary Fanzor sequences are shown or encoded by those in Table 1, Table 6, Table 7, Table 8, Table 9, Table 10, Table 11, Table 12, Table 13, Table 14, Table 15, Table 18, Table 20, Table 21, Table 22, Example 16, Example 17, Example 18, FIG. 18A-18B, FIG. 19A-19B, FIG. 20, FIG. 33, FIG. 35, FIG. 53A-53G, FIG. 56A-56D, FIG. 66, FIG. 72D, FIG. 74E-74G, FIG. 75A-75C, FIG. 77A-77C, or any combination thereof. In some embodiments, the Fanzor polypeptide is a homolog, ortholog, or variant of a polypeptide in, or is encoded by a polypeptide as in Table 1, Table 6, Table 7, Table 8, Table 9, Table 10, Table 11, Table 12, Table 13, Table 14, Table 15, Table 18, Table 20, Table 21, Table 22, Example 16, Example 17, Example 18, FIG. 18A-18B, FIG. 19A-19B, FIG. 20, FIG. 33, FIG. 35, FIG. 53A-53G, FIG. 56A-56D, FIG. 66, FIG. 72D, FIG. 74E-74G, FIG. 75A-75C, FIG. 77A-77C, or any combination thereof. In some embodiments, the Fanzor polypeptide is or comprises a polypeptide that is 80-100 percent identical to a polypeptide sequence set forth in or that is encoded by a polynucleotide sequence set forth in Table 1, Table 6, Table 7, Table 8, Table 9, Table 10, Table 11, Table 12, Table 13, Table 14, Table 15, Table 18, Table 20, Table 21, Table 22, Example 16, Example 17, Example 18, FIG. 18A-18B, FIG. 19A-19B, FIG. 20, FIG. 33, FIG. 35, FIG. 53A-53G, FIG. 56A-56D, FIG. 66, FIG. 72D, FIG. 74E-74G, FIG. 75A-75C, FIG. 77A-77C, or any combination thereof. In some embodiments, the Fanzor polypeptide is or comprises a polypeptide that is 80%, to/or 80.5%, 81%, 81.5%, 82%, 82.5%, 83%, 83.5%, 84%, 84.5%, 85%, 85.5%, 86%, 86.5%, 87%, 87.5%, 88%, 88.5%, 89%, 89.5%, 90%, 90.5%, 91%, 91.5%, 92%, 92.5%, 93%, 93.5%, 94%, 94.5%, 95%, 95.5%, 96%, 96.5%, 97%, 97.5%, 98%, 98.5%, 99%, 99.5%, 100% percent identical to a polypeptide sequence set forth in or that is encoded by a polynucleotide sequence set forth in Table 1, Table 6, Table 7, Table 8, Table 9, Table 10, Table 11, Table 12, Table 13, Table 14, Table 15, Table 18, Table 20, Table 21, Table 22, Example 16, Example 17, Example 18, FIG. 18A-18B, FIG. 19A-19B, FIG. 20, FIG. 33, FIG. 35, FIG. 53A-53G, FIG. 56A-56D, FIG. 66, FIG. 72D, FIG. 74E-74G, FIG. 75A-75C, FIG. 77A-77C, or any combination thereof. In some embodiments, the Fanzor polypeptide is a polypeptide as shown and described in relation with FIG. 10C-10E, FIG. 35, and/or FIG. 56A-56D. The RuvC domain may be a split RuvC domain comprising a RuvC-I, RuvC-II, and RuvC-III subdomains. The Fanzor may further comprise one or more of a HTH domain, a bridge helix domain, a REC domain, a zinc finger domain, or any combination thereof. Fanzor polypeptides do not comprise an HNH domain. In one example embodiment, Fanzor proteins comprise, starting at the N-terminus a HTH domain, a RuvC-I sub-domain, a bridge helix domain, a RuvC-II sub-domain, a zinger finger domain, and a RuvC-III sub-domain. In one example embodiment, the RuvC-III sub-domain forms the C-terminus of the Fanzor polypeptide.

[0186] In some embodiments, the Fanzor polypeptide comprises one or more mutations in the WED, REC, NUC, Bridge Helix domain, RuvC domain, or any combination thereof. In some embodiments, the Fanzor polypeptide comprises a mutation at one or more amino acid residues selected from 310, 35, 36, 308, 319, 320, 323, 323, 405, 406, 408, 409, 484, 486, 487 or any combination thereof relative to Fanzor ID16 or in position(s) analogous there to in analogous, heterologous, or orthologous to Fanzor ID16. In some embodiments, the Fanzor polypeptide comprises a mutation at one or more amino acid residues selected from 289, 290, 291, 292, 293, 294, 295, 296, 297, 298, 299, 300, 301, 302, 303, 304, 305, 306, 307, 308, 309, 310, 311, 312, 313, 314, 315, 316, 317, 318, 319, 320, 321, 322, 323, 324, 325, 326, 327, 328, 329, 330, 331, 332, 333, 334, 335, 336, 337, 338, 339, 340, 341, 342, 343, 344, 345, 346, 347, 348, 349, 350, 351, 352, 353, 354, 355, 356, 357, 358, 359, 360, 361, 362, 363, 364, 365, 366, 367, 368, 369, 370, 371, 372, 373, 374, 375, 376, 377, 378, 379, 380, 381, 382, 383, 384, 385, 386, 387, 388, 389, 390, 391, 392, 393, 394, 395, 396, 397, 398, 399, 400, 401, 402, 403, 404, 405, 406, 407, 408, 409, 410, 411, 412, 413, 414, 415, 416, 417, 418, 419, 420, 421, 422, 423, 424, 425, 426, 427, 428, 429, 430, 431, 432, 433, 434, 435, 436, 437, 438, 439, 440, 441, 442, 443, 444, 445, 446, 447, 448, 449, 450, 451, 452, 453, 454, 455, 456, 457, 458, 459, 460, 461, 462, 463, 464, 465, 466, 467, 468, 469, 470, 471, 472, 473, 474, 475, 476, 477, 478, 479, 480, 481, 482, 483, 484, 485, 486, 487, 488, 489, 490, 491, 492, 493, 494, 495, 496, 497, 498, or any combination thereof relative to Fanzor ID16 or in position(s) analogous there to in analogous, heterologous, or orthologous to Fanzor ID16. In some embodiments, the Fanzor polypeptide comprises a mutation at one or more amino acid residues selected from 469, 485, 490, 491, 508, 513, 524, 527, 528, 398, 400, 392, 192, 604, 607, 614, 615, 609, 613, 522, 538, 503, or any combination thereof relative to Fanzor ID16 or in position(s) analogous there to in analogous, heterologous, or orthologous to Fanzor ID16. In some embodiments, the Fanzor polypeptide comprises a mutation at one or more amino acids selected from 310, 487, 300, 498, 513, or any combination thereof relative to Fanzor ID16 or in position(s) analogous there to in analogous, heterologous, or orthologous to Fanzor ID16. In some embodiments, the amino acids(s) are independently mutated to R, K, H, A, V, P, D, E, I, or W.

[0187] In one example embodiment, the Fanzor polypeptides are or range between 125 and 1800 amino acids in size, such are or range between 125 and 30, 140, 150, 160, 170, 180, 190, 200, 210, 220, 230, 240, 250, 260, 270, 280, 290, 300, 310, 320, 330, 340, 350, 360, 370, 380, 390, 400, 410, 420, 430, 440, 450, 460, 470, 480, 490, 500, 510, 520, 530, 540, 550, 560, 570, 580, 590, 600, 610, 620, 630, 640, 650, 660, 670, 680, 690, 700, 710, 720, 730, 740, 750, 760, 770, 780, 790, 800, 810, 820, 830, 840, 850, 860, 870, 880, 890, 900, 910, 920, 930, 940, 950, 960, 970, 980, 990, 1000, 1010, 1020, 1030, 1040, 1050, 1060, 1070, 1080, 1090, 1100, 1110, 1120, 1130, 1140, 1150, 1160, 1170, 1180, 1190, 1200, 1210, 1220, 1230, 1240, 1250, 1260, 1270, 1280, 1290, 1300, 1310, 1320, 1330, 1340, 1350, 1360, 1370, 1380, 1390, 1400, 1410, 1420, 1430, 1440, 1450, 1460, 1470, 1480, 1490, 1500, 1510, 1520, 1530, 1540, 1550, 1560, 1570, 1580, 1590, 1600, 1610, 1620, 1630, 1640, 1650, 1660, 1670, 1680, 1690, 1700, 1710, 1720, 1730, 1740, 1750, 1760, 1770, 1780, 1790, or/to 1800 amino acids in size or any value or range of values therein. In one example embodiment, the Fanzor polypeptides are or range between about 400 and about 700 amino acids in size. In some embodiments, the Fanzor polypeptides are or range between about 400, to/or about 410, 420, 430, 440, 450, 460, 470, 480, 490, 500, 510, 520, 530, 540, 550, 560, 570, 580, 590, 600, 610, 620, 630, 640, 650, 660, 670, 680, 690, 700 amino acids in size or any value or range of values therein.

[0188] In certain example embodiments, the Fanzor polypeptides are or range between 125 and 850 amino acids in size. In certain example embodiments, the Fanzor polypeptides are between 175 and 800 amino acids in size, between 200 and 790 amino acids in size, between 200 and 780 amino acids in size, between 200 and 770 amino acids in size, between 200 and 760 amino acids in size, between 200 and 750 amino acids in size, between 200 and 740 amino acids in size, between 200 and 730 amino acids in size, between 200 and 720 amino acids in size, between 200 and 720 amino acids in size, between 200 and 710 amino acids in size, between 200 and 700 amino acids in size, between 200 and 690 amino acids in size, between 200 and 680 amino acids in size, between 200 and 670 amino acids in size, between 200 and 660 amino acids in size, between 200 and 650 amino acids in size, between 200 and 640 amino acids in size, between 200 and 630 amino acids in size, between 200 and 620 amino acids in size, between 200 and 610 amino acids in size, between 200 and 600 amino acids in size, between 200 and 590 amino acids in size, between 200 and 580 amino acids in size, between 200 and 570 amino acids in size, between 200 and 560 amino acid, between 200 between 550 amino acids, between 200 and 540 amino acids, between 200 and 530 amino acids, between 200 and 520 amino acids, between 200 and 510 amino acids, between 200 and 500 amino acids, between 200 and 490 amino acids, between 200 and 480 amino acids, between 200 and 470 amino acids, between 200 and 460 amino acids, between 200 and 450 amino acids, between 200 and 440 amino acids, between 200 and 430 amino acids, between 200 and 420 amino acids, between 200 and 410 amino acids, between 210 and 500 amino acids, between 220 and 500 amino acids. between 230 and 500 amino acids, between 240 and 500 amino acids, between 250 and 500 amino acids, between 260 and 500 amino acids, between 270 and 500 amino acids, between 280 and 500 amino acids, between 290 and 500 amino acids, between 300 and 500 amino acids, between 250 and 490 amino acids, between 250 and 480 amino acids, between 250 and 490 amino acids, or between 250 and 600 amino acids. In one embodiment, the Fanzor polypeptide is between 300 and 500 amino acids, or between 350 and 450 amino acids. Fanzor polypeptides may be classified as Type 1 Fanzor polypeptides, which are typically between the size of a TnpB polypeptide and Cas12a, or Type 2 Fanzor polypeptides, which are typically smaller in size than a TnpB polypeptide.

[0189] In some embodiments, the Fanzor polypeptide is a Fanzor polypeptide from a metazoan, fungi, protist, or a dsDNA virus capable of infecting a eukaryote. See e.g., Bao et al. 2013. Mob DNA. 2013; 4:12 doi: 10.1186/1759-8753-4-12, particularly at Table 1, Supplementary material additional files 1 and 3. In some embodiments, is a Fanzor protein or functional domain thereof as set forth in Bao et al. 2013. Mob DNA. 2013; 4:12 doi: 10.1186/1759-8753-4-12.

[0190] In one example embodiment, the Fanzor polypeptide may be derived from (a) a yeast Fanzor; (b) an amoeba Fanzor; (c) a protist Fanzor; (d) a metazoan Fanzor; (e) an algae Fanzor; (f) a fungi Fanzor; (g) a eukaryotic Fanzor; (h) a Mollusca Fanzor; (i) from an organism of the genus Eremothecium, Ashbya, Spizellomyces, Torulaspora, Naegleria, Rhizopus, Guillardia, Batillaria, Dreissena, Mercenaria, Batrachochytrium, or Parasitella; (j) a virus Fanzor, optionally a Bodo saltans virus, a Harvforvirus, Homavirus, Dishui Lake Large Algae virus 1, or Yasminevirus Fanzor; (k) a Fanzor selected from a polypeptide, or comprises a polypeptide, or is encoded by a polynucleotide set forth in any one or more of Table 1, Table 6, Table 7, Table 8, Table 9, Table 10, Table 11, Table 12, Table 13, Table 14, Table 15, Table 18, Table 20, Table 21, Table 22, Example 16, Example 17, Example 18, FIG. 18A-18B, FIG. 19A-19B, FIG. 20, FIG. 33, FIG. 35, FIG. 53A-53G, FIG. 56A-56D, FIG. 66, FIG. 72D, FIG. 74E-74G, FIG. 75A-75C, FIG. 77A-77C, or any combination thereof, or is a homolog, ortholog, or variant thereof, and/or is or comprises a polypeptide that is 80-100 percent identical to a polypeptide sequence set forth in or that is encoded by a polynucleotide sequence set forth in Table 1, Table 6, Table 7, Table 8, Table 9, Table 10, Table 11, Table 12, Table 13, Table 14, Table 15, Table 15, Table 18, Table 20, Table 21, Table 22, Example 16, Example 17, Example 18, FIG. 18A-18B, FIG. 19A-19B, FIG. 20, FIG. 33, FIG. 35, FIG. 53A-53G, FIG. 56A-56D, FIG. 66, FIG. 72D, FIG. 74E-74G, FIG. 75A-75C, FIG. 77A-77C, or any combination thereof; or (1) any combination of (a)-(k).

[0191] In some embodiments, the Fanzor polypeptide is from an organism of the genus Eremothecium, Ashbya, Spizellomyces, Torulaspora, Naegleria, Rhizopus, Guillardia, Batillaria, Dreissena, Mercenaria, Batrachochytrium, or Parasitella. In some embodiments, the Fanzor polypeptide is from an organism of the genus Eremothecium, Ashbya, Spizellomyces, Torulaspora, Naegleria, Rhizopus, Guillardia, Batrachochytrium, or Parasitella. In some embodiments, the Fanzor polypeptide is from Eremothecium cymbalaria, Ashbya gossypii, Spizellomyces punctatus, Torulaspora delbrueckii, Naegleria lovaniensis, or Rhizopus microspores. In some embodiments, the Fanzor polypeptide is from Spizellomyces punctatus. In some embodiments, the Fanzor polypeptide is from Bodo saltans virus, a Harvforvirus, Homavirus, Dishui Lake Large Algae virus 1.

[0192] In some embodiments, the Fanzor polypeptide is a eukaryotic Fanzor polypeptide. In some embodiments, the Fanzor polypeptide is from an organism of the genus Batillaria, Dreissena, Mercenaria, or Naegieria. In some embodiments, the Fanzor polypeptide is from Batillaria attramentaria, Dreissena polymorpha, Mercenaria mercenaria, or Naegleria lovaniensis.

[0193] In one embodiment, the Fanzor polypeptides may comprise a modified naturally occurring protein, functional fragment or truncated version thereof, or a non-naturally occurring protein. In one embodiment, the Fanzor polypeptide comprises one or more domains originating from other Fanzor polypeptides, more particularly originating from different organisms. In one embodiment, the Fanzor polypeptides may be designed by in silico approaches. Examples of in silico protein design have been described in the art and are therefore known to a skilled person.

[0194] In one embodiment, the Fanzor polypeptide is a homologue or ortholog to a TnpB polypeptide from Epsilonproteobacteria bacterium, or Actinoplanes lobatus strain DSM 43150, Actinomadura celluolosilytica strain DSM 45823, Actinomadura namibiensis strain DSM 44197, Alicyclobacillus macrosprangiidus strain DSM 17980, Lipingzhangella halophila strain DSM 102030, or Ktedonobacter recemifer. In one embodiment, the Fanzor polypeptide is a homologue or ortholog from Ktedonobacter racemifer or comprises a conserved RNA region with similarity to the 5′ ITR of K. racemifer Fanzor loci. See e.g., Table 5, FIG. 2 of U.S. Provisional Application 63/282,352. In an aspect, the Fanzor polypeptide encodes 5′ ITR/RNA (with RNA on the 3′ strand), Fanzor (3′ strand), and lastly 3′ ITR. In one example embodiment, the Fanzor may comprise a Fanzor protein or a Fanzor homolog, found in eukaryotic genomes.

[0195] The Fanzor polypeptides also encompass homologs or orthologs of Fanzor polypeptides whose sequences are specifically described herein. The terms “ortholog” and “homolog” are well known in the art. By means of further guidance, a “homolog” of a protein as used herein is a protein of the same species which performs the same or a similar function as the protein it is a homolog of Homologous proteins may be, but need not be, structurally related, or are only partially structurally related. An “ortholog” of a protein as used herein is a protein of a different species which performs the same or a similar function as the protein it is an orthologue of. Orthologous proteins may but need not be structurally related or are only partially structurally related. In particular embodiments, the homolog or ortholog of a Fanzor polypeptide such as those referred to herein has a sequence homology or identity of at least 80%, at least 85%, at least 90%, or at least 95% with a Fanzor polypeptide. In further embodiments, the homolog or ortholog of a Fanzor polypeptide has a sequence identity of at least 80%, at least 85%, at least 90%, or at least 95% with a wildtype Fanzor polypeptide, in particular embodiment a Fanzor sequence identified in Table 1 or a polypeptide, or a polypeptide encoded by a sequence or portion thereof identified in Table 6, Table 7, Table 8, Table 9, Table 10, Table 11, Table 12, Table 13, Table 14, Table 15, Table 18, Table 20, Table 21, Table 22, Example 16, Example 17, Example 18, FIG. 18A-18B, FIG. 19A-19B, FIG. 20, FIG. 33, FIG. 35, FIG. 53A-53G, FIG. 56A-56D, FIG. 66, FIG. 72D, FIG. 74E-74G, FIG. 75A-75C, FIG. 77A-77C, or any combination thereof. In particular embodiments, the homolog or ortholog of a Fanzor polypeptide such as those referred to herein has a sequence homology or identity of 80%, to/or 80.5%, 81%, 81.5%, 82%, 82.5%, 83%, 83.5%, 84%, 84.5%, 85%, 85.5%, 86%, 86.5%, 87%, 87.5%, 88%, 88.5%, 89%, 89.5%, 90%, 90.5%, 91%, 91.5%, 92%, 92.5%, 93%, 93.5%, 94%, 94.5%, 95%, 95.5%, 96%, 96.5%, 97%, 97.5%, 98%, 98.5%, 99%, 99.5%, or about 100% to a wildtype Fanzor polypeptide or a polypeptide encoded by a sequence or portion thereof identified in Table 6, Table 7, Table 8, Table 9, Table 10, Table 11, Table 12, Table 13, Table 14, Table 15, Table 18, Table 20, Table 21, Table 22, Example 16, Example 17, Example 18, FIG. 18A-18B, FIG. 19A-19B, FIG. 20, FIG. 33, FIG. 35, FIG. 53A-53G, FIG. 56A-56D, FIG. 66, FIG. 72D, FIG. 74E-74G, FIG. 75A-75C, FIG. 77A-77C, or any combination thereof.

[0196] In particular embodiments, a homolog or ortholog is identified according to its domain structure and/or function. In embodiments, the homolog or ortholog comprises catalytic residues and/or domains as defined herein, including any as identified in Table 1, Table 6, Table 7, Table 8, Table 9, Table 10, Table 11, Table 12, Table 13, Table 14, Table 15, Table 18, Table 20, Table 21, Table 22, Example 16, Example 17, Example 18, FIG. 18A-18B, FIG. 19A-19B, FIG. 20, FIG. 33, FIG. 35, FIG. 53A-53G, FIG. 56A-56D, FIG. 66, FIG. 72D, FIG. 74E-74G, FIG. 75A-75C, FIG. 77A-77C, or any combination thereof. Sequence alignments conducted as described herein, as well as folding studies and domain predictions as taught herein can aid in the identification of a homolog or ortholog with the structural and functional characteristics identifying Fanzor polypeptides, particularly those with conserved residues, including catalytic residues, and domains of Fanzor polypeptides, such as any of those identified or encoded by a sequence in Table 1, Table 6, Table 7, Table 8, Table 9, Table 10, Table 11, Table 12, Table 13, Table 14, Table 15, Table 18, Table 20, Table 21, Table 22, Example 16, Example 17, Example 18, FIG. 18A-18B, FIG. 19A-19B, FIG. 20, FIG. 33, FIG. 35, FIG. 53A-53G, FIG. 56A-56D, FIG. 66, FIG. 72D, FIG. 74E-74G, FIG. 75A-75C, FIG. 77A-77C, or any combination thereof.

[0197] In one embodiment, the Fanzor loci comprises inverted terminal repeats (ITRs). An inverted terminal repeat may be present on the 5′ or 3′ end of the Fanzor sequence. In an aspect, the inverted terminal repeat may comprise between about 20 to about 40 nucleotides, for example, 20, 21, 22, 23, 24, about 25, 26, 27, 28, 29, 30, 31, 32, 33, 34, 35, 36, 37, 38, 39, or 40 nucleotides. In embodiments, the ITR comprises about 25 to 35 nucleotides, about 28 to 32 nucleotides. In an aspect, the ITR shares similarity with one or more inverted terminal repeats with sequences encoding TnpB polypeptides. In one embodiment, the 5′ ITR or 3′ITR of Fanzor has a sequence homology or identity of at least 80%, at least 85%, at least 90%, at least 95%, at least 96%, at least 97% at least 98% or at least 99% identity with an TnpB 5′ ITR or 3′ ITR. In an embodiment, the 5′ ITR of the Fanzor is homologous to the 5′ ITR of the TnpB.

[0198] In one embodiment, the Fanzor loci comprises a region of high conservation beyond the sequence encoding the polypeptide that indicates the presence of RNA at the 5′ end of the Fanzor loci. In an aspect, the region upstream of the 5′ ITR of Fanzor comprises a region encoding an RNA species that comprises a guide sequence.

[0199] Fanzor Domains. As demonstrated in e.g., the Working Examples herein, the Fanzor polypeptide can have, in addition to the RuvC domain, a WED and/or REC domain, a NUC domain, a Bridge-Helix domain, or any combination thereof. As demonstrated in e.g., the Working Examples, Fanzor polypeptides have a conserved core domain architecture with Cas12 and TnpB that includes a WED region and a RuvC region. In some embodiments, the Fanzor polypeptide consists or comprises the core domain structure. As demonstrated in the Working Examples herein the Fanzor polypeptides adopt a bilobal architecture that includes a recognition (REC) lobe and a nuclease (NUC) lobe. The REC lobe contains a REC domain and a WED domain. The NIC lobe is composed of a RuvC domain and a NUC domain. During activity, the target DNA duplex containing a TAM sequence can be surrounded by the REC and WED domains. The heteroduplex of the ωRNA and target DNA is accommodated by a positively charged channel formed by the REC domain and the RuvC domain.

[0200] In one embodiment, the Fanzor polypeptide comprises at least one RuvC-like or RuvC nuclease domain. The RuvC domain may comprise conserved catalytic amino acids indicative of the RuvC catalytic residue. In an example embodiment, the RuvC catalytic residue may be referenced relative to 186D, 270E or 354D of TnpB polypeptide 488601079; to 172D, 254E, or 337D of TnpB polypeptide 297565028; or to 179D, 268E, or 351D of TnpB polypeptide 257060308. See e.g., Altae-Tran et al. Science. 374:57-65 (2021) and/or U.S. Provisional Application Ser. No. 63/282,352, particularly at Table 1A. The catalytic residue may be referenced relative to 195D, 277E, or 361D of the sequence alignment in FIG. 2. In an aspect, the RuvC domain may comprise multiple subdomains, e.g., RuvC-I, RuvC-II and RuvC-III. The subdomains may be separated by interval sequences on the amino acid sequence of the protein.

[0201] In one embodiment, examples of the RuvC domain include any polypeptides a structural similarity and/or sequence similarity to a RuvC domain described in the art. For example, the RuvC domain may share a structural similarity and/or sequence similarity to a RuvC of Cas9. In some examples, the RuvC domain may have an amino acid sequence that share at least 50%, at least 55%, at least 60%, at least 65%, at least 70%, at least 75%, at least 80%, at least 85%, at least 90%, at least 95%, at least 99%, or 100% sequence identity with RuvC domains known in the art.

[0202] In some examples, the RuvC domain comprise RuvC-I sub-domain, RuvC-II sub-domain, and RuvC-III sub-domain. Examples of the RuvC-I sub-domain also include any polypeptides having structural similarity and/or sequence similarity to a RuvC-I domain described in the art. For example, the RuvC-I domain may share a structural similarity and/or sequence similarity to a RuvC-I found in bacterial or archaeal species, including CRISPR Cas proteins such as Cas9. In some examples, the RuvC domain may have an amino acid sequence that share at least 50%, at least 55%, at least 60%, at least 5%, at least 70%, at least 75%, at least 80%, at least 85%, at least 90%, at least 95%, at least 99%, or 100% sequence identity with RuvC-I domain. The RuvC-II domain also include any polypeptides a structural similarity and/or sequence similarity to a RuvC-II domain described in the art. For example, the RuvC-II domain may share a structural similarity and/or sequence similarity to a RuvC-II of Cas9. In some examples, the RuvC domain may have an amino acid sequence that share at least 50%, at least 55%, at least 60%, at least 5%, at least 70%, at least 75%, at least 80%, at least 85%, at least 90%, at least 95%, at least 99%, or 100% sequence identity with RuvC-II domains. The RuvC-III domain also include any polypeptides a structural similarity and/or sequence similarity to a RuvC-III domain described in the art. For example, the RuvC-III domains may share a structural similarity and/or sequence similarity to a RuvC-III of Cas9. In some examples, the RuvC domain may have an amino acid sequence that share at least 50%, at least 55%, at least 60%, at least 5%, at least 70%, at least 75%, at least 80%, at least 85%, at least 90%, at least 95%, at least 99%, or 100% sequence identity with RuvC-III domains.

[0203] For example, and as described in the art (e.g., Crystal structure of Cas9 in complex with nucleic acid component molecule and target DNA, Nishimasu et al. Cell, 2014) the RuvC domain of Cas9 consists of a six-stranded mixed β-sheet (β1, β2, β5, β11, β14 and β17) flanked by α-helices (α33, α34 and α39-α45) and two additional two-stranded antiparallel β-sheets (β3/β4 and β15/β16). It has been described that the RuvC domain of Cas9 shares structural similarity with the retroviral integrase superfamily members characterized by an RNase H fold, such as Escherichia coli RuvC (PDB code 1HJR, 14% identity, root-mean-square deviation (rmsd) of 3.6 Å for 126 equivalent Cα atoms) and Thermus thermophilus RuvC (PDB code 4LD0, 12% identity, rmsd of 3.4 Å for 131 equivalent Ca atoms). E. coli RuvC is a 3-layer alpha-beta sandwich containing a 5-stranded beta-sheet sandwiched between 5 alpha-helices. RuvC nucleases have four catalytic residues (e.g., Asp7, Glu70, His143 and Asp146 in T. thermophilus RuvC), and cleave Holliday junctions (or structurally analogous cruciform junctions) through a two-metal mechanism. Asp10 (Ala), Glu762, His983 and Asp986 of the Cas9 RuvC domain are located at positions similar to those of the catalytic residues of T. thermophilus RuvC. The RuvC-like domain of the Fanzor polypeptides may comprise 1, 2, 3 or 4 of the catalytic residues similar to the Cas9 protein.

[0204] In embodiments, the Fanzor polypeptide is a nuclease. In one embodiment, the Fanzor and nucleic acid component can direct sequence-specific nuclease activity. The cleavage may result in a 5′ overhang, 3′ overhang, or blunt ends. The cleavage may occur distal to a target-adjacent motif (TAM) and may occur at the site of the spacer (guide) annealing site or 3′ of the target sequence. In an embodiment, the Fanzor cleaves at multiple positions within and beyond the nucleic acid component annealing site. In an embodiment, DNA cleavage occurs 15, 16, 17, 18, 19, 20, 21, 22, 23, 24, 25 or more base pairs distal to the TAM and results in a 5′ overhang, 3′overhang, or blunt ends. In some embodiments, DNA cleavage occurs about 20-22 base pairs distal to the TAM.

[0205] In an embodiment, the Fanzor polypeptide is active, i.e., possesses nuclease activity, over a temperature range of from about 4° C. to about 80° C. In an embodiment, the Fanzor polypeptide is active, i.e., possesses nuclease activity, over a temperature range of about 4° C. to about 70° C. In an embodiment, the Fanzor polypeptide is active, i.e., possesses nuclease activity, over a temperature range of about 37° C. to about 80° C. In an embodiment, the Fanzor polypeptide is active, i.e., possesses nuclease activity, over a temperature range of about 37° C. to about 70° C. In some embodiments, the Fanzor polypeptide is active at a temperature of about 4° C., to/or 5° C., 6° C., 7° C., 8° C., 9° C., 10° C., 11° C., 12° C., 13° C., 14° C., 15° C., 16° C., 17° C., 18° C., 19° C., 20° C., 21° C., 22° C., 23° C., 24° C., 25° C., 26° C., 27° C., 28° C., 29° C., 30° C., 31° C., 32° C., 33° C., 34° C., 35° C., 36° C., 37° C., 38° C., 39° C., 40° C., 41° C., 42° C., 43° C., 44° C., 45° C., 46° C., 47° C., 48° C., 49° C., 50° C., 51° C., 52° C., 53° C., 54° C., 55° C., 56° C., 57° C., 58° C., 59° C., 60° C., 61° C., 62° C., 63° C., 64° C., 65° C., 66° C., 67° C., 68° C., 69° C., 70° C., 71° C., 72° C., 73° C., 74° C., 75° C., 76° C., 77° C., 78° C., 79° C., 80° C. In some embodiments, the Fanzor polypeptide is active at a temperature of about 4° C., to/or 5° C., 6° C., 7° C., 8° C., 9° C., 10° C., 11° C., 12° C., 13° C., 14° C., 15° C., 16° C., 17° C., 18° C., 19° C., 20° C., 21° C., 22° C., 23° C., 24° C., 25° C., 26° C., 27° C., 28° C., 29° C., 30° C., 31° C., 32° C., 33° C., 34° C., 35° C., 36° C., 37° C., 38° C., 39° C., 40° C., 41° C., 42° C., 43° C., 44° C., 45° C., 46° C., 47° C., 48° C., 49° C., 50° C., 51° C., 52° C., 53° C., 54° C., 55° C., 56° C., 57° C., 58° C., 59° C., 60° C., 61° C., 62° C., 63° C., 64° C., 65° C., 66° C., 67° C., 68° C., 69° C., 70° C. In some embodiments, the Fanzor polypeptide is active at a temperature of about 37° C. to/or 38° C., 39° C., 40° C., 41° C., 42° C., 43° C., 44° C., 45° C., 46° C., 47° C., 48° C., 49° C., 50° C., 51° C., 52° C., 53° C., 54° C., 55° C., 56° C., 57° C., 58° C., 59° C., 60° C., 61° C., 62° C., 63° C., 64° C., 65° C., 66° C., 67° C., 68° C., 69° C., 70° C., 71° C., 72° C., 73° C., 74° C., 75° C., 76° C., 77° C., 78° C., 79° C., 80° C. In some embodiments, the Fanzor polypeptide is active at a temperature of about 37° C. to/or 38° C., 39° C., 40° C., 41° C., 42° C., 43° C., 44° C., 45° C., 46° C., 47° C., 48° C., 49° C., 50° C., 51° C., 52° C., 53° C., 54° C., 55° C., 56° C., 57° C., 58° C., 59° C., 60° C., 61° C., 62° C., 63° C., 64° C., 65° C., 66° C., 67° C., 68° C., 69° C., 70° C. In an embodiment, the Fanzor polypeptide is active from about 37° C. to about 75° C., from about 37° C. to about 70° C., from about 37° C. to about 65° C., from about 37° C. to about 60° C., from about 37° C. to about 55° C., from about 37° C. to about 50° C., from about 37° C. to about 45° C. In an example embodiment, the Fanzor polypeptide is active in the range of 37° C. to 65° C. In an example embodiment, the Fanzor polypeptide is active in the range of 45° C. to 65° C. In an example embodiment, the Fanzor polypeptide is active in the range of 45° C. to 60° C.

[0206] In embodiments, the Fanzor polypeptides also encompasses homologs or orthologs of Fanzor polypeptides whose sequences are specifically described herein. The terms “ortholog” and “homolog” are well known in the art. By means of further guidance, a “homolog” of a protein as used herein is a protein of the same species which performs the same or a similar function as the protein it is a homolog of Homologous proteins may but need not be structurally related, or are only partially structurally related. An “ortholog” of a protein as used herein is a protein of a different species which performs the same or a similar function as the protein it is an orthologue of Orthologous nucleases may but need not be structurally related, or are only partially structurally related. In particular embodiments, the homolog or ortholog of a Fanzor polypeptides such as referred to herein has a sequence homology or identity of at least 80%, at least 85%, at least 90%, at least 95% with a Fanzor polypeptide. In further embodiments, the homolog or ortholog of a Fanzor polypeptide has a sequence identity of at least 80%, at least 85%, at least 90%, or at least 95% with a wildtype Fanzor polypeptide, in particular embodiment the Fanzor sequence identified in Table 1. In one embodiment, the Fanzor polypeptide displays collateral activity. In one embodiment, the Fanzor polypeptide does not display collateral activity. In an aspect, the Fanzor polypeptide possesses collateral activity once triggered by target recognition. In an aspect, upon binding to the target sequence, the Fanzor polypeptide will non-specifically cleave polynucleotide sequences, e.g., DNA. The target-activated nonspecific nuclease activity of Fanzor is also referred to herein as collateral activity.

[0207] In some embodiments, the Fanzor protein displays nuclease activity towards a double stranded DNA target. In an embodiment, the Fanzor protein displays nuclease activity towards both ssDNA and dsDNA target sequences. In an embodiment, the Fanzor protein displays nuclease activity towards both ssDNA and dsDNA wherein a TAM may not be necessary to cut a ssDNA target.

[0208] In embodiments, the Fanzor polypeptide is a nuclease. In one embodiment, the Fanzor and nucleic acid component molecule can direct sequence-specific nuclease activity. The Fanzor polypeptides provided herein may also exhibit RNA-guided recombinase activity. The homology to the RuvC domain and relatedness to the DDE family of recombinases indicate potential recombinase activity. In an embodiment the Fanzor polypeptides detailed herein exhibit a lack of nuclease activity, or reduced nuclease activity, and are provided with a transposable element, e.g. transposase, integrase, recombinase, allowing for RNA-guided target specific modifications.

### Exemplary Fanzor Polypeptides

[0209] In certain example embodiments, the Fanzor protein is, comprises or is encoded by a polynucleotide set forth in any one or more of Table 1, Table 6, Table 7, Table 8, Table 9, Table 10, Table 11, Table 12, Table 13, Table 14, Table 15, Table 18, Table 20, Table 21, Table 22, Example 16, Example 17, Example 18, FIG. 18A-18B, FIG. 19A-19B, FIG. 20, FIG. 33, FIG. 35, FIG. 53A-53G, FIG. 56A-56D, FIG. 66, FIG. 72D, FIG. 74E-74G, FIG. 75A-75C, FIG. 77A-77C, or any combination thereof, or is or comprises a portion thereof, such as a functional domain or thereof. Exemplary functional domains include a RuvC domain, WED domain, REC domain, Bridge-Helix domain, NUC domain or any combination thereof. In certain example embodiments, the Fanzor polypeptide is encoded by a sequence or portion thereof set forth in Table 8, Table 9, Table 13, Table 14, Table 15, Table 18, Table 20, Table 21, Table 22, Example 16, Example 17, Example 18, FIG. 18A-18B, FIG. 19A-19B, FIG. 20, FIG. 33, FIG. 35, FIG. 53A-53G, FIG. 56A-56D, FIG. 66, FIG. 72D), FIG. 74E-74G, FIG. 75A-75C, FIG. 77A-77C, or any combination thereof.

[0210] Table 1 provides a list of example Fanzor systems and the location of their loci in example source organisms.

TABLE 1
(SEQ ID NO: 1-312)

| | | |
|---|---|---|
| 1 | GCA_000708835.1_ASM70883v1_{—} | Klebsormidium nitens DNA, scaffold: kfl00709, whole |
| | genomic_\|_DF237658 | genome shotgunsequence. |
| 2 | GCA_000708835.1_ASM70883v1_{—} | Klebsormidium nitens DNA, scaffold: kfl01217, whole |
| | genomic_\|_DF238166 | genome shotgunsequence. |
| 3 | GCA_000708835.1_ASM70883v1_{—} | GCA_000708835.1_ASM70883v1_genomic_\|_<unknown_name>. |
| | genomic_\|_<unknown_name> | |
| 4 | GCA_002925995.2_T_m_triunguis- | GCA_002925995.2_T_m_triunguis- |
| | 2.0_genomic_\|_<unknown_name> | 2.0_genomic_\|_<unknown_name>. |
| 5 | GCA_009430475.1_Amar_v1_{—} | GCA_009430475.1_Amar_v1_genomic_\|_<unknown_name>. |
| | genomic_\|_<unknown_name> | |
| 6 | GCA_009025955.1_ASM902595v1_{—} | GCA_009025955.1_ASM902595v1_genomic_\|_<unknown_name>. |
| | genomic_\|_<unknown_name> | |
| 7 | GCA_009026005.1_ASM902600v1_{—} | GCA_009026005.1_ASM902600v1_genomic_\|_<unknown_name>. |
| | genomic_\|_<unknown_name> | |
| 8 | GCA_009602685.1_ASM960268v1_{—} | GCA_009602685.1_ASM960268v1_genomic_\|_<unknown_name>. |
| | genomic_\|_<unknown_name> | |
| 9 | GCA_009829735.1_ASM982973v1_{—} | Pyropia yezoensis cultivar RZ chromosome 2, whole |
| | genomic_\|_CM020619 | genome shotgunsequence. |
| 10 | GCA_009829735.1_ASM982973v1_{—} | GCA_009829735.1_ASM982973v1_genomic_\|_<unknown_name>. |
| | genomic_\|_<unknown_name> | |
| 11 | GCA_003956735.1_Pr102_V2_{—} | GCA_003956735.1_Pr102_V2_genomic_\|_<unknown_name>. |
| | genomic_\|_<unknown_name> | |
| 12 | GCA_001278165.1_SOD158v2_{—} | GCA_001278165.1_SOD158v2_genomic_\|_<unknown_name>. |
| | genomic_\|_<unknown_name> | |
| 13 | GCA_001933325.1_CC14654_v1_{—} | GCA_001933325.1_CC14654_v1_genomic_\|_<unknown_name>. |
| | genomic_\|_<unknown_name> | |
| 14 | GCA_001933455.1_CC2176_v1_{—} | GCA_001933455.1_CC2176_v1_genomic_\|_<unknown_name>. |
| | genomic_\|_<unknown_name> | |
| 15 | GCA_001955675.1_CC1011_v1_{—} | GCA_001955675.1_CC1011_v1_genomic_\|_<unknown_name>. |
| | genomic_\|_<unknown_name> | |
| 16 | GCA_001933345.1_CC1008_v1_{—} | GCA_001933345.1_CC1008_v1_genomic_\|_<unknown_name>. |
| | genomic_\|_<unknown_name> | |
| 17 | GCA_001933465.1_CC2186_v1_{—} | GCA_001933465.1_CC2186_v1_genomic_\|_<unknown_name>. |
| | genomic_\|_<unknown_name> | |
| 18 | GCA_001278145.1_SOD69v2_{—} | GCA_001278145.1_SOD69v2_genomic_\|_<unknown_name>. |
| | genomic_\|_<unknown_name> | |
| 19 | GCA_009720205.1_ASM972020v1_{—} | Chlorella vulgaris strain NJ-7 NJ-7_scaffold00028, whole |
| | genomic_\|_VATV01000028 | genomeshotgun sequence. |
| 20 | GCA_009720215.1_ASM972021v1_{—} | Chlorella vulgaris strain UTEX259 |
| | genomic_\|_VATW01000042 | UTEX259_scaffold00042, wholegenome shotgun sequence. |
| 21 | GCA_004335795.1_ASM433579v1_{—} | GCA_004335795.1_ASM433579v1_genomic_\|_<unknown_name>. |
| | genomic_\|_<unknown_name> | |
| 22 | GCA_004335865.1_ASM433586v1_{—} | GCA_004335865.1_ASM433586v1_genomic_\|_<unknown_name>. |
| | genomic_\|_<unknown_name> | |
| 23 | GCA_009848525.1_Psojae2019.1_{—} | GCA_009848525.1_Psojae2019.1_genomic_\|_<unknown_name>. |
| | genomic_\|_<unknown_name> | |
| 24 | GCA_000149755.2_P. sojae_V3.0_{—} | Phytophthora sojae unplaced genomic scaffold |
| | genomic_\|_JH159153 | PHYSOscaffold_3, wholegenome shotgun sequence. |
| 25 | GCA_004335715.1_ASM433571v1_{—} | Chlamydomonas sp. WS7, whole genome shotgun |
| | genomic_\|_QAXL01002383 | sequence. |
| 26 | GCA_004335755.1_ASM433575v1_{—} | Chlamydomonas sp. WS3, whole genome shotgun |
| | genomic_\|_QAXM01002383 | sequence. |
| 27 | GCA_010203745.1_Muccir1_3_{—} | Mucor lusitanicus strain MU402 FB192scaffold_3, whole |
| | genomic_\|_JAAECE010000003 | genomeshotgun sequence. |
| 28 | GCA_001638945.1_Mucci2_{—} | GCA_001638945.1_Mucci2_genomic_\|_<unknown_name>. |
| | genomic_\|_<unknown_name> | |
| 29 | GCA_010014875.1_ASM1001487v1_{—} | Psitteuteles goldiei isolate Piper_X7F3MAPY5K, whole |
| | genomic_\|_JAAAKH010039255 | genome shotgunsequence. |
| 30 | GCA_004798425.1_ASM479842v1_{—} | Digenea simplex isolate OPJ- |
| | genomic_\|_RXNZ01001972 | A18NODE_contig_02773+_length_42877_cov_1, whole |
| | | genome shotgunsequence. |
| 31 | GCA_011763775.1_ASM1176377v1_{—} | GCA_011763775.1_ASM1176377v1_genomic_\|_<unknown_name>. |
| | genomic_\|_<unknown_name> | |
| 32 | GCA_011763815.1_ASM1176381v1_{—} | GCA_011763815.1_ASM1176381v1_genomic_\|_<unknown_name>. |
| | genomic_\|_<unknown_name> | |
| 33 | GCA_000587855.1_B50_{—} | GCA_000587855.1_B50_genomic_\|_<unknown_name>. |
| | genomic_\|_<unknown_name> | |
| 34 | GCA_000697435.1_RhiVarB7584- | GCA_000697435.1_RhiVarB7584- |
| | 1.0_genomic_\|_<unknown_name> | 1.0_genomic_\|_<unknown_name>. |
| 35 | GCA_000812005.1_ASM81200v1_{—} | GCA_000812005.1_ASM81200v1_genomic_\|_<unknown_name>. |
| | genomic_\|_<unknown_name> | |
| 36 | GCA_000812005.1_ASM81200v1_{—} | GCA_000812005.1_ASM81200v1_genomic_\|_<unknown_name>. |
| | genomic_\|_<unknown_name> | |
| 37 | GCA_902505575.1_Diploid_assembly_{—} | GCA_902505575.1_Diploid_assembly_genomic_\|_<unknown_name>. |
| | genomic_\|_<unknown_name> | |
| 38 | GCA_000330985.1_DBM_FJ_V1.1_{—} | GCA_000330985.1_DBM_FJ_V1.1_genomic_\|_<unknown_name>. |
| | genomic_\|_<unknown_name> | |
| 39 | GCA_000333055.2_SMSTG_v2.0_{—} | GCA_000333055.2_SMSTG_v2.0_genomic_\|_<unknown_name>. |
| | genomic_\|_<unknown_name> | |
| 40 | GCA_000338815.2_SMST21v2.0_{—} | Phytophthora lateralis SMST21 unplaced genomic |
| | genomic_\|_KQ479608 | scaffoldscf_4885_1206, whole genome shotgun sequence. |
| 41 | GCA_002891735.1_TetSoc1_{—} | GCA_002891735.1_TetSoc1_genomic_\|_<unknown_name>. |
| | genomic_\|_<unknown_name> | |
| 42 | GCA_002891735.1_TetSoc1_{—} | GCA_002891735.1_TetSoc1_genomic_\|_<unknown_name>. |
| | genomic_\|_<unknown_name> | |
| 43 | GCA_002891735.1_TetSoc1_{—} | GCA_002891735.1_TetSoc1_genomic_\|_<unknown_name>. |
| | genomic_\|_<unknown_name> | |
| 44 | GCA_012979215.1_ASM1297921v1_{—} | Spodoptera frugiperda isolate AFR2017 ctg4, whole |
| | genomic_\|_WUTJ01000333 | genome shotgunsequence. |
| 45 | GCA_012979215.1_ASM1297921v1_{—} | Spodoptera frugiperda isolate AFR2017 ctg30, whole |
| | genomic_\|_WUTJ01000224 | genome shotgunsequence. |
| 46 | GCA_011064685.1_ZJU_Sfru_1.0_{—} | Spodoptera frugiperda isolate Faw-zju chromosome 32, |
| | genomic_\|_CM021696 | whole genomeshotgun sequence. |
| 47 | GCA_011064685.1_ZJU_Sfru_1.0_{—} | Spodoptera frugiperda isolate Faw-zju chromosome 7, |
| | genomic_\|_CM021671 | whole genomeshotgun sequence. |
| 48 | GCA_009829735.1_ASM982973v1_{—} | Pyropia yezoensis cultivar RZ chromosome 3, whole |
| | genomic_\|_CM020620 | genome shotgunsequence. |
| 49 | GCA_009829735.1_ASM982973v1_{—} | Pyropia yezoensis cultivar RZ chromosome 1, whole |
| | genomic_\|_CM020618 | genome shotgunsequence. |
| 50 | GCA_000931965.1_ASM93196v1_{—} | GCA_000931965.1_ASM93196v1_genomic_\|_<unknown_name>. |
| | genomic_\|_<unknown_name> | |
| 51 | GCA_002806785.1_ASM280678v1_{—} | GCA_002806785.1_ASM280678v1_genomic_\|_<unknown_name>. |
| | genomic_\|_<unknown_name> | |
| 52 | GCA_012922725.1_ASM1292272v1_{—} | GCA_012922725.1_ASM1292272v1_genomic_\|_<unknown_name>. |
| | genomic_\|_<unknown_name> | |
| 53 | GCA_012922805.1_ASM1292280v1_{—} | GCA_012922805.1_ASM1292280v1_genomic_\|_<unknown_name>. |
| | genomic_\|_<unknown_name> | |
| 54 | GCA_013036735.1_ASM1303673v1_{—} | GCA_013036735.1_ASM1303673v1_genomic_\|_<unknown_name>. |
| | genomic_\|_<unknown_name> | |
| 55 | GCA_003055205.1_ASM305520v1_{—} | Rhodotorula mucilaginosa strain JGTA-S1 Scaffold_5, |
| | genomic_\|_PEFX01000029 | whole genomeshotgun sequence. |
| 56 | GCA_004143675.1_ASM414367v1_{—} | Rhodotorula mucilaginosa strain CYJ03000007F_{—} |
| | genomic_\|_RZHN01000008 | arrow_pilon, wholegenome shotgun sequence. |
| 57 | GCA_012922695.1_ASM1292269v1_{—} | Rhodotorula mucilaginosa strain IIF5SW- |
| | genomic_\|_JABBMU010000021 | F2NODE_21_length_302823_cov_114.905287, whole |
| | | genome shotgunsequence. |
| 58 | GCA_012922825.1_ASM1292282v1_{—} | GCA_012922825.1_ASM1292282v1_genomic_\|_<unknown_name>. |
| | genomic_\|_<unknown_name> | |
| 59 | GCA_012922835.1_ASM1292283v1_{—} | Rhodotorula mucilaginosa strain IF6SW- |
| | genomic_\|_JABBYN010000100 | B2NODE_100_length_46004_cov_97.333703, whole |
| | | genome shotgun sequence. |
| 60 | GCA_013030385.1_ASM1303038v1_{—} | Rhodotorula mucilaginosa strain IF2SG- |
| | genomic_\|_JABENE010000097 | B1NODE_97_length_46011_cov_114.621740, whole |
| | | genome shotgun sequence. |
| 61 | GCA_013030405.1_ASM1303040v1_{—} | Rhodotorula mucilaginosa strain IF6SG- |
| | genomic_\|_JABENF010000049 | B1NODE_49_length_139707_cov_99.078472, whole |
| | | genome shotgun sequence. |
| 62 | GCA_013030415.1_ASM1303041v1_{—} | Rhodotorula mucilaginosa strain IF8SG- |
| | genomic_\|_JABENH010000098 | B1NODE_98_length_46004_cov_100.932654, whole |
| | | genome shotgun sequence. |
| 63 | GCA_013036305.1_ASM1303630v1_{—} | Rhodotorula mucilaginosa strain IF3SG- |
| | genomic_\|_JABBHW010000095 | B1NODE_95_length_46022_cov_116.600109, whole |
| | | genome shotgun sequence. |
| 64 | GCA_013036385.1_ASM1303638v1_{—} | Rhodotorula mucilaginosa strain IFCSG- |
| | genomic_\|_JABBHY010000096 | B1NODE_96_length_46033_cov_83.106254, whole |
| | | genome shotgun sequence. |
| 65 | GCA_013036445.1_ASM1303644v1_{—} | Rhodotorula mucilaginosa strain IIF2*SW- |
| | genomic_\|_JABBIA010000102 | F1NODE_102_length_46028_cov_72.672085, whole |
| | | genome shotgun sequence. |
| 66 | GCA_013036475.1_ASM1303647v1_{—} | Rhodotorula mucilaginosa strain IIF8SW- |
| | genomic_\|_JABBIB010000097 | F1NODE_97_length_47253_cov_95.890177, whole |
| | | genome shotgun sequence. |
| 67 | GCA_013036505.1_ASM1303650v1_{—} | GCA_013036505.1_ASM1303650v1_genomic_\|_<unknown_name>. |
| | genomic_\|_<unknown_name> | |
| 68 | GCA_013036515.1_ASM1303651v1_{—} | Rhodotorula mucilaginosa strain IIF1SW- |
| | genomic_\|_JABBIC010000018 | F1NODE_18_length_302847_cov_68.964399, whole |
| | | genome shotgun sequence. |
| 69 | GCA_013036595.1_ASM1303659v1_{—} | Rhodotorula mucilaginosa strain IF4SW- |
| | genomic_\|_JABBIF010000012 | F2NODE_12_length_398650_cov_66.964822, whole |
| | | genome shotgun sequence. |
| 70 | GCA_013036615.1_ASM1303661v1_{—} | Rhodotorula mucilaginosa strain IF3SW- |
| | genomic_\|_JABBIG010000021 | F2NODE_21_length_302850_cov_72.478738, whole |
| | | genome shotgun sequence. |
| 71 | GCA_013036665.1_ASM1303666v1_{—} | Rhodotorula mucilaginosa strain IIF2*SW- |
| | genomic_\|_JABBII010000100 | B1NODE_100_length_46004_cov_89.506325, whole |
| | | genome shotgun sequence. |
| 72 | GCA_013036715.1_ASM1303671v1_{—} | Rhodotorula mucilaginosa strain IIF8SW- |
| | genomic_\|_JABBIJ010000101 | B3NODE_101_length_46013_cov_80.269244, whole |
| | | genome shotgun sequence. |
| 73 | GCA_013036755.1_ASM1303675v1_{—} | Rhodotorula mucilaginosa strain IIF6SW- |
| | genomic_\|_JABBIL010000099 | B2NODE_99_length_46002_cov_97.487055, whole |
| | | genome shotgun sequence. |
| 74 | GCA_013036805.1_ASM1303680v1_{—} | Rhodotorula mucilaginosa strain IF8SW- |
| | genomic_\|_JABBIM010000021 | P2NODE_21_length_302849_cov_99.676420, whole |
| | | genome shotgun sequence. |
| 75 | GCA_013036825.1_ASM1303682v1_{—} | Rhodotorula mucilaginosa strain IF8SW- |
| | genomic_\|_JABBIN010000091 | B2NODE_91_length_46003_cov_108.885816, whole |
| | | genome shotgun sequence. |
| 76 | GCA_013036835.1_ASM1303683v1_{—} | Rhodotorula mucilaginosa strain IF7SW- |
| | genomic_\|_JABBIO010000100 | B3NODE_100_length_46122_cov_90.899514, whole |
| | | genome shotgun sequence. |
| 77 | GCA_013036895.1_ASM1303689v1_{—} | GCA_013036895.1_ASM1303689v1_genomic_\|_<unknown_name>. |
| | genomic_\|_<unknown_name> | |
| 78 | GCA_013036955.1_ASM1303695v1_{—} | Rhodotorula mucilaginosa strain IF1SW- |
| | genomic_\|_JABBIR010000094 | B1NODE_94_length_46021_cov_96.461431, whole |
| | | genome shotgun sequence. |
| 79 | GCA_001600475.1_JCM_30513_assembly_{—} | Pilasporangium apinafurcum DNA, scaffold: scaffold_107, |
| | v001_genomic_\|_BCKD01000108 | strain: JCM30513, whole genome shotgun sequence. |
| 80 | GCA_001600475.1_JCM_30513_assembly_{—} | Pilasporangium apinafurcum DNA, scaffold: scaffold_189, |
| | v001_genomic_\|_BCKD01000190 | strain: JCM30513, whole genome shotgun sequence. |
| 81 | GCA_004764695.1_ASM476469v1_{—} | GCA_004764695.1_ASM476469v1_genomic_\|_<unknown_name>. |
| | genomic_\|_<unknown_name> | |
| 82 | GCA_004764695.1_ASM476469v1_{—} | GCA_004764695.1_ASM476469v1_genomic_\|_<unknown_name>. |
| | genomic_\|_<unknown_name> | |
| 83 | GCA_004764695.1_ASM476469v1_{—} | GCA_004764695.1_ASM476469v1_genomic_\|_<unknown_name>. |
| | genomic_\|_<unknown_name> | |
| 84 | GCA_004764695.1_ASM476469v1_{—} | GCA_004764695.1_ASM476469v1_genomic_\|_<unknown_name>. |
| | genomic_\|_<unknown_name> | |
| 85 | GCA_000333075.3_PhyKer238_432v3_{—} | GCA_000333075.3_PhyKer238_432v3_genomic_\|_<unknown_name>. |
| | genomic_\|_<unknown_name> | |
| 86 | GCA_000333095.2_PhyKer629_1v2_{—} | GCA_000333095.2_PhyKer629_1v2_genomic_\|_<unknown_name>. |
| | genomic_\|_<unknown_name> | |
| 87 | GCA_000333115.2_PhyKer844_4v2_{—} | GCA_000333115.2_PhyKer844_4v2_genomic_\|_<unknown_name>. |
| | genomic_\|_<unknown_name> | |
| 88 | GCA_001021125.1_ASM102112v1_{—} | GCA_001021125.1_ASM102112v1_genomic_\|_<unknown_name>. |
| | genomic_\|_<unknown_name> | |
| 89 | GCA_009720215.1_ASM972021v1_{—} | Chlorella vulgaris strain UTEX259 |
| | genomic_\|_VATW01000042 | UTEX259_scaffold00042, wholegenome shotgun sequence. |
| 90 | GCA_001712635.2_PfChile5v2.0_{—} | GCA_001712635.2_PfChile5v2.0_genomic_\|_<unknown_name>. |
| | genomic_\|_<unknown_name> | |
| 91 | GCA_001712635.2_PfChile5v2.0_{—} | Nothophytophthora sp. Chile5 scaffold_10711, whole |
| | genomic_\|_MBAC02010711 | genome shotgunsequence. |
| 92 | GCA_000708835.1_ASM70883v1_{—} | Klebsormidium nitens DNA, scaffold: kfl01583, whole |
| | genomic_\|_DF238532 | genome shotgunsequence. |
| 93 | GCA_000708835.1_ASM70883v1_{—} | Klebsormidium nitens DNA, scaffold: kfl01013, whole |
| | genomic_\|_DF237962 | genome shotgunsequence. |
| 94 | GCA_000812005.1_ASM81200v1_{—} | Coccomyxa sp. LA000219 unplaced genomic scaffold |
| | genomic_\|_KN714628 | scaffold40, wholegenome shotgun sequence. |
| 95 | GCA_000812005.1_ASM81200v1_{—} | GCA_000812005.1_ASM81200v1_genomic_\|_<unknown_name>. |
| | genomic_\|_<unknown_name> | |
| 96 | GCA_001586965.3_ASM158696v3_{—} | GCA_001586965.3_ASM158696v3_genomic_\|_<unknown_name>. |
| | genomic_\|_<unknown_name> | |
| 97 | GCA_001586965.3_ASM158696v3_{—} | GCA_001586965.3_ASM158696v3_genomic_\|_<unknown_name>. |
| | genomic_\|_<unknown_name> | |
| 98 | GCA_002192655.2_ASM219265v2_{—} | GCA_002192655.2_ASM219265v2_genomic_\|_<unknown_name>. |
| | genomic_\|_<unknown_name> | |
| 99 | GCA_002192655.2_ASM219265v2_{—} | GCA_002192655.2_ASM219265v2_genomic_\|_<unknown_name>. |
| | genomic_\|_<unknown_name> | |
| 100 | GCA_006384855.1_TSEL_PacBio_{—} | Tetraselmis striata strain LANL1001 Tetraselmis_3046, |
| | SMRT_genomic_\|_VCJN01003028 | whole genomeshotgun sequence. |
| 101 | GCA_006384855.1_TSEL_PacBio_{—} | Tetraselmis striata strain LANL1001 Tetraselmis_3046, |
| | SMRT_genomic_\|_VCJN01003028 | whole genomeshotgun sequence. |
| 102 | GCA_009720205.1_ASM972020v1_{—} | GCA_009720205.1_ASM972020v1_genomic_\|_<unknown_name>. |
| | genomic_\|_<unknown_name> | |
| 103 | GCA_001021125.1_ASM102112v1_{—} | GCA_001021125.1_ASM102112v1_genomic_\|_<unknown_name>. |
| | genomic_\|_<unknown_name> | |
| 104 | GCA_012845835.1_ASM1284583v1_{—} | GCA_012845835.1_ASM1284583v1_genomic_\|_<unknown_name>. |
| | genomic_\|_<unknown_name> | |
| 105 | GCA_001742925.1_Okinawa_mozuku_{—} | Cladosiphon okamuranus DNA, scaffold: oki- |
| | S_1.0_genomic_\|_DF977970 | s_mms_scaffold_286, wholegenome shotgun sequence. |
| 106 | GCA_012845835.1_ASM1284583v1_{—} | Undaria pinnatifida isolate A029 HiC_scaffold_23, whole |
| | genomic_\|_JABAKD010000023 | genomeshotgun sequence. |
| 107 | GCA_012845835.1_ASM1284583v1_{—} | Undaria pinnatifida isolate A029 HiC_scaffold_23, whole |
| | genomic_\|_JABAKD010000023 | genomeshotgun sequence. |
| 108 | GCA_013435995.1_ASM1343599v1_{—} | Rhipicephalus microplus strain Deutsch |
| | genomic_\|_WOVZ01023221 | ScK7wFR_23227; HRSCAF = 77848, whole genome |
| | | shotgun sequence. |
| 109 | GCA_013339745.1_ASM1333974v1_{—} | GCA_013339745.1_ASM1333974v1_genomic_\|_<unknown_name>. |
| | genomic_\|_<unknown_name> | |
| 110 | GCA_000004825.1_PolPal_Dec2009_{—} | Polysphondylium pallidum PN500 unplaced genomic |
| | genomic_GL290995 | scaffoldPPL_scaffold13, whole genome shotgun sequence. |
| 111 | GCA_000004825.1_PolPal_Dec2009_{—} | GCA_000004825.1_PolPal_Dec2009_genomic_\|_<unknown_name>. |
| | genomic_\|_<unknown_name> | |
| 112 | GCA_000149755.2_P. sojae_V3.0_{—} | Phytophthora sojae unplaced genomic scaffold |
| | genomic_\|_JH159159 | PHYSOscaffold_9, wholegenome shotgun sequence. |
| 113 | GCA_009848525.1_Psojae2019.1_{—} | Phytophthora sojae strain |
| | genomic_\|_WWEI01000003 | P6497P6497_smrtdenovo_ONT10kb_corrected_contig_3, |
| | | whole genome shotgunsequence. |
| 114 | GCA_002891735.1_TetSoc1_{—} | GCA_002891735.1_TetSoc1_genomic_\|_<unknown_name>. |
| | genomic_\|_<unknown_name> | |
| 115 | GCA_002891735.1_TetSoc1_{—} | GCA_002891735.1_TetSoc1_genomic_\|_<unknown_name>. |
| | genomic_\|_<unknown_name> | |
| 116 | GCA_004764695.1_ASM476469v1_{—} | GCA_004764695.1_ASM476469v1_genomic_\|_<unknown_name>. |
| | genomic_\|_<unknown_name> | |
| 117 | GCA_004764695.1_ASM476469v1_{—} | GCA_004764695.1_ASM476469v1_genomic_\|_<unknown_name>. |
| | genomic_\|_<unknown_name> | |
| 118 | GCA_004764695.1_ASM476469v1_{—} | GCA_004764695.1_ASM476469v1_genomic_\|_<unknown_name>. |
| | genomic_\|_<unknown_name> | |
| 119 | GCA_004764695.1_ASM476469v1_{—} | Schizochytrium sp. TIO01 scaffold6_size4854460, whole |
| | genomic_\|_SMSO01000034 | genomeshotgun sequence. |
| 120 | GCA_004764695.1_ASM476469v1_{—} | Schizochytrium sp. TIO01 scaffold4_size9043229, whole |
| | genomic_\|_SMSO01000032 | genomeshotgun sequence. |
| 121 | GCA_004764695.1_ASM476469v1_{—} | Schizochytrium sp. TIO01 scaffold9_size5018410, whole |
| | genomic_\|_SMSO01000037 | genomeshotgun sequence. |
| 122 | GCA_006384855.1_TSEL_PacBio_{—} | Tetraselmis striata strain LANL1001 Tetraselmis_2972, |
| | SMRT_genomic_\|_VCJN01002955 | whole genomeshotgun sequence. |
| 123 | GCA_006384855.1_TSEL_PacBio_{—} | Tetraselmis striata strain LANL1001 Tetraselmis_2972, |
| | SMRT_genomic_\|_VCJN01002955 | whole genomeshotgun sequence. |
| 124 | GCA_006384855.1_TSEL_PacBio_{—} | Tetraselmis striata strain LANL1001 Tetraselmis_2972, |
| | SMRT_genomic_\|_VCJN01002955 | whole genomeshotgun sequence. |
| 125 | GCA_006384855.1_TSEL_PacBio_{—} | Tetraselmis striata strain LANL1001 Tetraselmis_2972, |
| | SMRT_genomic_\|_VCJN01002955 | whole genomeshotgun sequence. |
| 126 | GCA_013167095.1_ASM1316709v1_{—} | Daphnia carinata strain WSL Contig00030, whole genome |
| | genomic_\|_WJBH01000312 | shotgunsequence. |
| 127 | GCA_013167095.1_ASM1316709v1_{—} | Daphnia carinata strain WSL Contig00030, whole genome |
| | genomic_\|_WJBH01000312 | shotgunsequence. |
| 128 | GCA_000193105.1_Acas_2.0_{—} | GCA_000193105.1_Acas_2.0_genomic_\|_<unknown_name>. |
| | genomic_\|_<unknown_name> | |
| 129 | GCA_000313135.1_Acastellanii.strNEFF_{—} | Acanthamoeba castellanii str. Neff unplaced genomic |
| | v1_genomic_\|_KB007908 | scaffoldscf7180000084776, whole genome shotgun |
| | | sequence. |
| 130 | GCA_013030395.1_ASM1303039v1_{—} | GCA_013030395.1_ASM1303039v1_genomic_\|_<unknown_name>. |
| | genomic_\|_<unknown_name> | |
| 131 | GCA_013036355.1_ASM1303635v1_{—} | GCA_013036355.1_ASM1303635v1_genomic_\|_<unknown_name>. |
| | genomic_\|_<unknown_name> | |
| 132 | GCA_013036525.1_ASM1303652v1_{—} | GCA_013036525.1_ASM1303652v1_genomic_\|_<unknown_name>. |
| | genomic_\|_<unknown_name> | |
| 133 | GCA_012922765.1_ASM1292276v1_{—} | GCA_012922765.1_ASM1292276v1_genomic_\|_<unknown_name>. |
| | genomic_\|_<unknown_name> | |
| 134 | GCA_013036365.1_ASM1303636v1_{—} | GCA_013036365.1_ASM1303636v1_genomic_\|_<unknown_name>. |
| | genomic_\|_<unknown_name> | |
| 135 | GCA_013036655.1_ASM1303665v1_{—} | GCA_013036655.1_ASM1303665v1_genomic_\|_<unknown_name>. |
| | genomic_\|_<unknown_name> | |
| 136 | GCA_013435795.1_ASM1343579v1_{—} | GCA_013435795.1_ASM1343579v1_genomic_\|_<unknown_name>. |
| | genomic_\|_<unknown_name> | |
| 137 | GCA_013435795.1_ASM1343579v1_{—} | GCA_013435795.1_ASM1343579v1_genomic_\|_<unknown_name>. |
| | genomic_\|_<unknown_name> | |
| 138 | GCA_009663345.1_TniFNL_draft_{—} | GCA_009663345.1_TniFNL_draft_assembly_genomic_\|_<unknown_name>. |
| | assembly_genomic_\|_<unknown_name> | |
| 139 | GCA_003590095.1_tn1_{—} | GCA_003590095.1_tn1_genomic_\|_<unknown_name>. |
| | genomic_\|_<unknown_name> | |
| 140 | GCA_902809745.2_Scenedesmus- | Tetradesmus acuminatus strain SAG 38.81 genome |
| | acuminatus-SAG- | assembly, contig: scf7180000027569, whole genome |
| | 38.81_genomic_\|_CADDIJ020000232 | shotgun sequence. |
| 141 | GCA_902809745.2_Scenedesmus- | Tetradesmus acuminatus strain SAG 38.81 genome |
| | acuminatus-SAG- | assembly, contig: scf7180000030319, whole genome |
| | 38.81_genomic_\|_CADDIJ020002999 | shotgun sequence. |
| 142 | GCA_902809745.2_Scenedesmus- | Tetradesmus acuminatus strain SAG 38.81 genome |
| | acuminatus-SAG- | assembly, contig: scf7180000028938, whole genome |
| | 38.81_genomic_\|_CADDIJ020002356 | shotgun sequence. |
| 143 | GCA_902809745.2_Scenedesmus- | Tetradesmus acuminatus strain SAG 38.81 genome |
| | acuminatus-SAG- | assembly, contig: scf7180000027504, whole genome |
| | 38.81_genomic_\|_CADDIJ020002159 | shotgun sequence. |
| 144 | GCA_902809745.2_Scenedesmus- | Tetradesmus acuminatus strain SAG 38.81 genome |
| | acuminatus-SAG- | assembly, contig: scf7180000028326, whole genome |
| | 38.81_genomic_\|_CADDIJ020003124 | shotgun sequence. |
| 145 | GCA_002192655.2_ASM219265v2_{—} | GCA_002192655.2_ASM219265v2_genomic_\|_<unknown_name>. |
| | genomic_\|_<unknown_name> | |
| 146 | GCA_002192655.2_ASM219265v2_{—} | Mamestra configurata isolate AAFC colony scaffold565, |
| | genomic_\|_NDFZ01005234 | whole genomeshotgun sequence. |
| 147 | GCA_002192655.2_ASM219265v2_{—} | Mamestra configurata isolate AAFC colony scaffold10821, |
| | genomic_\|_NDFZ01003509 | wholegenome shotgun sequence. |
| 148 | GCA_002192655.2_ASM219265v2_{—} | GCA_002192655.2_ASM219265v2_genomic_\|_<unknown_name>. |
| | genomic_\|_<unknown_name> | |
| 149 | GCA_013283005.1_ASM1328300v1_{—} | GCA_013283005.1_ASM1328300v1_genomic_\|_<unknown_name>. |
| | genomic_\|_<unknown_name> | |
| 150 | GCA_013283005.1_ASM1328300v1_{—} | Paralithodes platypus isolate Beidaihe-2018 chromosome |
| | genomic_\|_CM023285 | 33, wholegenome shotgun sequence. |
| 151 | GCA_013283005.1_ASM1328300v1_{—} | GCA_013283005.1_ASM1328300v1_genomic_\|_<unknown_name>. |
| | genomic_\|_<unknown_name> | |
| 152 | GCA_013283005.1_ASM1328300v1_{—} | Paralithodes platypus isolate Beidaihe-2018 chromosome |
| | genomic_\|_CM023342 | 85, wholegenome shotgun sequence. |
| 153 | GCA_000143045.1_pug_{—} | GCA_000143045.1_pug_genomic_\|_<unknown_name>. |
| | genomic_\|_<unknown_name> | |
| 154 | GCA_000143045.1_pug_{—} | Pythium ultimum DAOM BR144 unplaced genomic |
| | genomic_\|_GL376622 | scaffoldscf_1117875582025, whole genome shotgun |
| | | sequence. |
| 155 | GCA_001638945.1_Mucci2_{—} | GCA_001638945.1_Mucci2_genomic_\|_<unknown_name>. |
| | genomic_\|_<unknown_name> | |
| 156 | GCA_010203745.1_Muccir1_3_{—} | GCA_010203745.1_Muccir1_3_genomic_\|_<unknown_name>. |
| | genomic_\|_<unknown_name> | |
| 157 | GCA_013435795.1_ASM1343579v1_{—} | GCA_013435795.1_ASM1343579v1_genomic_\|_<unknown_name>. |
| | genomic_\|_<unknown_name> | |
| 158 | GCA_013435795.1_ASM1343579v1_{—} | GCA_013435795.1_ASM1343579v1_genomic_\|_<unknown_name>. |
| | genomic_\|_<unknown_name> | |
| 159 | GCA_013435795.1_ASM1343579v1_{—} | Chlamydomonas sp. ICE-L scaffold_745, whole genome |
| | genomic_\|_JACBWV010000810 | shotgunsequence. |
| 160 | GCA_013435795.1_ASM1343579v1_{—} | Chlamydomonas sp. ICE-L scaffold_79, whole genome |
| | genomic_\|_JACBWV010000681 | shotgun sequence. |
| 161 | GCA_001278225.1_SODL51v2_{—} | GCA_001278225.1_SODL51v2_genomic_\|_<unknown_name>. |
| | genomic_\|_<unknown_name> | |
| 162 | GCA_001933405.1_CC1048_v1_{—} | GCA_001933405.1_CC1048_v1_genomic_\|_<unknown_name>. |
| | genomic_\|_<unknown_name> | |
| 163 | GCA_001933315.1_CC2184_v1_{—} | GCA_001933315.1_CC2184_v1_genomic_\|_<unknown_name>. |
| | genomic_\|_<unknown_name> | |
| 164 | GCA_001933485.1_CC2187_v1_{—} | Phytophthora ramorum strain EU1 isolate |
| | genomic_\|_MLJG01001351 | CC2187scf_11801_1022.contig_1, whole genome shotgun |
| | | sequence. |
| 165 | GCA_001933395.1_CC1033_v1_{—} | Phytophthora ramorum strain EU1 isolate |
| | genomic_\|_MLJB01001374 | CC1033scf_65018_1045.contig_1, whole genome shotgun |
| | | sequence. |
| 166 | GCA_001278135.1_SOD58v2_{—} | Phytophthora ramorum strain EU2 isolate |
| | genomic_\|_LHTS01000796 | SOD58/12scf_18997_724.contig_1, whole genome |
| | | shotgun sequence. |
| 167 | GCA_001278215.1_SOD136v2_{—} | Phytophthora ramorum strain EU2 isolate SOD136/11 |
| | genomic_\|_KQ439796 | unplaced genomicscaffold scf_18210_1167, whole |
| | | genome shotgun sequence. |
| 168 | GCA_002892825.2_ISE6_asm2.2_deduplicated_{—} | Ixodes scapularis tig00386297, whole genome shotgun |
| | genomic_\|_PKSA02002535 | sequence. |
| 169 | GCA_002892825.2_ISE6_asm2.2_deduplicated_{—} | Ixodes scapularis tig02189122, whole genome shotgun |
| | genomic_\|_PKSA02004961 | sequence. |
| 170 | GCA_002892825.2_ISE6_asm2.2_deduplicated_{—} | Ixodes scapularis tig02189161, whole genome shotgun |
| | genomic_\|_PKSA02003809 | sequence. |
| 171 | GCA_002892825.2_ISE6_asm2.2_deduplicated_{—} | Ixodes scapularis tig00387840, whole genome shotgun |
| | genomic_\|_PKSA02001876 | sequence. |
| 172 | GCA_002892825.2_ISE6_asm2.2_deduplicated_{—} | Ixodes scapularis tig00021533, whole genome shotgun |
| | genomic_\|_PKSA02012815 | sequence. |
| 173 | GCA_006384855.1_TSEL_PacBio_{—} | GCA_006384855.1_TSEL_PacBio_SMRT_genomic_\|_<unknown_name>. |
| | SMRT_genomic_\|_<unknown_name> | |
| 174 | GCA_006384855.1_TSEL_PacBio_{—} | GCA_006384855.1_TSEL_PacBio_SMRT_genomic_\|_<unknown_name>. |
| | SMRT_genomic_\|_<unknown_name> | |
| 175 | GCA_006384855.1_TSEL_PacBio_{—} | GCA_006384855.1_TSEL_PacBio_SMRT_genomic_\|_<unknown_name>. |
| | SMRT_genomic_\|_<unknown_name> | |
| 176 | GCA_013435795.1_ASM1343579v1_{—} | GCA_013435795.1_ASM1343579v1_genomic_\|_<unknown_name>. |
| | genomic_\|_<unknown_name> | |
| 177 | GCA_013435795.1_ASM1343579v1_{—} | GCA_013435795.1_ASM1343579v1_genomic_\|_<unknown_name>. |
| | genomic_\|_<unknown_name> | |
| 178 | GCA_013435795.1_ASM1343579v1_{—} | GCA_013435795.1_ASM1343579v1_genomic_\|_<unknown_name>. |
| | genomic_\|_<unknown_name> | |
| 179 | GCA_013435795.1_ASM1343579v1_{—} | GCA_013435795.1_ASM1343579v1_genomic_\|_<unknown_name>. |
| | genomic_\|_<unknown_name> | |
| 180 | GCA_013435795.1_ASM1343579v1_{—} | GCA_013435795.1_ASM1343579v1_genomic_\|_<unknown_name>. |
| | genomic_\|_<unknown_name> | |
| 181 | GCA_013435795.1_ASM1343579v1_{—} | GCA_013435795.1_ASM1343579v1_genomic_\|_<unknown_name>. |
| | genomic_\|_<unknown_name> | |
| 182 | GCA_013435795.1_ASM1343579v1_{—} | GCA_013435795.1_ASM1343579v1_genomic_\|_<unknown_name>. |
| | genomic_\|_<unknown_name> | |
| 183 | GCA_013435795.1_ASM1343579v1_{—} | GCA_013435795.1_ASM1343579v1_genomic_\|_<unknown_name>. |
| | genomic_\|_<unknown_name> | |
| 184 | GCA_013435795.1_ASM1343579v1_{—} | GCA_013435795.1_ASM1343579v1_genomic_\|_<unknown_name>. |
| | genomic_\|_<unknown_name> | |
| 185 | GCA_013435795.1_ASM1343579v1_{—} | GCA_013435795.1_ASM1343579v1_genomic_\|_<unknown_name>. |
| | genomic_\|_<unknown_name> | |
| 186 | GCA_013435795.1_ASM1343579v1_{—} | GCA_013435795.1_ASM1343579v1_genomic_\|_<unknown_name>. |
| | genomic_\|_<unknown_name> | |
| 187 | GCA_013435795.1_ASM1343579v1_{—} | GCA_013435795.1_ASM1343579v1_genomic_\|_<unknown_name>. |
| | genomic_\|_<unknown_name> | |
| 188 | GCA_013435795.1_ASM1343579v1_{—} | GCA_013435795.1_ASM1343579v1_genomic_\|_<unknown_name>. |
| | genomic_\|_<unknown_name> | |
| 189 | GCA_013435795.1_ASM1343579v1_{—} | GCA_013435795.1_ASM1343579v1_genomic_\|_<unknown_name>. |
| | genomic_\|_<unknown_name> | |
| 190 | GCA_013435795.1_ASM1343579v1_{—} | GCA_013435795.1_ASM1343579v1_genomic_\|_<unknown_name>. |
| | genomic_\|_<unknown_name> | |
| 191 | GCA_013435795.1_ASM1343579v1_{—} | GCA_013435795.1_ASM1343579v1_genomic_\|_<unknown_name>. |
| | genomic_\|_<unknown_name> | |
| 192 | GCA_013435795.1_ASM1343579v1_{—} | GCA_013435795.1_ASM1343579v1_genomic_\|_<unknown_name>. |
| | genomic_\|_<unknown_name> | |
| 193 | GCA_013435795.1_ASM1343579v1_{—} | GCA_013435795.1_ASM1343579v1_genomic_\|_<unknown_name>. |
| | genomic_\|_<unknown_name> | |
| 194 | GCA_013435795.1_ASM1343579v1_{—} | GCA_013435795.1_ASM1343579v1_genomic_\|_<unknown_name>. |
| | genomic_\|_<unknown_name> | |
| 195 | GCA_013435795.1_ASM1343579v1_{—} | GCA_013435795.1_ASM1343579v1_genomic_\|_<unknown_name>. |
| | genomic_\|_<unknown_name> | |
| 196 | GCA_013435795.1_ASM1343579v1_{—} | GCA_013435795.1_ASM1343579v1_genomic_\|_<unknown_name>. |
| | genomic_\|_<unknown_name> | |
| 197 | GCA_013435795.1_ASM1343579v1_{—} | GCA_013435795.1_ASM1343579v1_genomic_\|_<unknown_name>. |
| | genomic_\|_<unknown_name> | |
| 198 | GCA_013435795.1_ASM1343579v1_{—} | GCA_013435795.1_ASM1343579v1_genomic_\|_<unknown_name>. |
| | genomic_\|_<unknown_name> | |
| 199 | GCA_013435795.1_ASM1343579v1_{—} | GCA_013435795.1_ASM1343579v1_genomic_\|_<unknown_name>. |
| | genomic_\|_<unknown_name> | |
| 200 | GCA_013435795.1_ASM1343579v1_{—} | GCA_013435795.1_ASM1343579v1_genomic_\|_<unknown_name>. |
| | genomic_\|_<unknown_name> | |
| 201 | GCA_013435795.1_ASM1343579v1_{—} | GCA_013435795.1_ASM1343579v1_genomic_\|_<unknown_name>. |
| | genomic_\|_<unknown_name> | |
| 202 | GCA_013435795.1_ASM1343579v1_{—} | GCA_013435795.1_ASM1343579v1_genomic_\|_<unknown_name>. |
| | genomic_\|_<unknown_name> | |
| 203 | GCA_013435795.1_ASM1343579v1_{—} | GCA_013435795.1_ASM1343579v1_genomic_\|_<unknown_name>. |
| | genomic_\|_<unknown_name> | |
| 204 | GCA_013435795.1_ASM1343579v1_{—} | GCA_013435795.1_ASM1343579v1_genomic_\|_<unknown_name>. |
| | genomic_\|_<unknown_name> | |
| 205 | GCA_013435795.1_ASM1343579v1_{—} | GCA_013435795.1_ASM1343579v1_genomic_\|_<unknown_name>. |
| | genomic_\|_<unknown_name> | |
| 206 | GCA_013435795.1_ASM1343579v1_{—} | GCA_013435795.1_ASM1343579v1_genomic_\|_<unknown_name>. |
| | genomic_\|_<unknown_name> | |
| 207 | GCA_013435795.1_ASM1343579v1_{—} | GCA_013435795.1_ASM1343579v1_genomic_\|_<unknown_name>. |
| | genomic_\|_<unknown_name> | |
| 208 | GCA_013435795.1_ASM1343579v1_{—} | GCA_013435795.1_ASM1343579v1_genomic_\|_<unknown_name>. |
| | genomic_\|_<unknown_name> | |
| 209 | GCA_013435795.1_ASM1343579v1_{—} | GCA_013435795.1_ASM1343579v1_genomic_\|_<unknown_name>. |
| | genomic_\|_<unknown_name> | |
| 210 | GCA_902602495.3_Esub_Assebmy2_{—} | Ectocarpus sp. CCAP 1310/34 strain Bft15b genome |
| | genomic_\|_CACKRE030000866 | assembly, contig: ESUB_scaffold1789, whole genome |
| | | shotgun sequence. |
| 211 | GCA_902705575.1_Esub_Assebmy_{—} | GCA_902705575.1_Esub_Assebmy_complete_genomic_\|_<unknown_name>. |
| | complete_genomic_\|_<unknown_name> | |
| 212 | GCA_004335615.1_ASM433561v1_{—} | Chloroidium sp. JM, whole genome shotgun sequence. |
| | genomic_\|_QAXI01000449 | |
| 213 | GCA_004335625.1_ASM433562v1_{—} | Chloroidium sp. CF, whole genome shotgun sequence. |
| | genomic_\|_QAXJ01000001 | |
| 214 | GCA_009848525.1_Psojae2019.1_{—} | GCA_009848525.1_Psojae2019.1_genomic_\|_<unknown_name>. |
| | genomic_\|_<unknown_name> | |
| 215 | GCA_000149755.2_P. sojae_V3.0_{—} | Phytophthora sojae unplaced genomic scaffold |
| | genomic_\|_JH159151 | PHYSOscaffold_1, wholegenome shotgun sequence. |
| 216 | GCA_000149755.2_P. sojae_V3.0_{—} | Phytophthora sojae unplaced genomic scaffold |
| | genomic_\|_JH159153 | PHYSOscaffold_3, wholegenome shotgun sequence. |
| 217 | GCA_000697135.1_RhiOry99-133- | Rhizopus oryzae 99-133 ctg7180000127893_1, whole |
| | 1.0_genomic_\|_JNDX01002515 | genome shotgunsequence. |
| 218 | GCA_000697195.1_MucRam97-1192- | GCA_000697195.1_MucRam97-1192- |
| | 1.0_genomic_\|_<unknown_name> | 1.0 genomic_\|_<unknown_name>. |
| 219 | GCA_011800955.1_ASM1180095v1_{—} | Rhizopus oryzae strain GL40 |
| | genomic_\|_JAANRM010000850 | NODE_851_length_14818_cov_42.072, wholegenome |
| | | shotgun sequence. |
| 220 | GCA_011800985.1_ASM1180098v1_{—} | Rhizopus oryzae strain GL53 |
| | genomic_\|_JAANRL010000814 | NODE_815_length_14818_cov_40.9535, whole genome |
| | | shotgun sequence. |
| 221 | GCA_011801035.1_ASM1180103v1_{—} | Rhizopus oryzae strain GL38 |
| | genomic_\|_JAANRN010000837 | NODE_838_length_14818_cov_43.3954, whole genome |
| | | shotgun sequence. |
| 222 | GCA_011801055.1_ASM1180105v1_{—} | Rhizopus oryzae strain GL31 |
| | genomic_\|_JAANRO010000807 | NODE_808_length_14835_cov_30.4701, whole genome |
| | | shotgun sequence. |
| 223 | GCA_011801645.1_ASM1180164v1_{—} | Rhizopus oryzae strain GL49 |
| | genomic_\|_JAANRB010002740 | NODE_2740_length_3061_cov_55.1477, whole genome |
| | | shotgun sequence. |
| 224 | GCA_011950945.1_ASM1195094v1_{—} | Rhizopus oryzae strain GL41 |
| | genomic_\|_JAANRD010000833 | NODE_833_length_14711_cov_37.6819, whole genome |
| | | shotgun sequence. |
| 225 | GCA_011952145.1_ASM1195214v1_{—} | Rhizopus oryzae strain GL37 |
| | genomic_\|_JAANRJ010000815 | NODE_815_length_14869_cov_40.4539, whole genome |
| | | shotgun sequence. |
| 226 | GCA_011952175.1_ASM1195217v1_{—} | Rhizopus oryzae strain GL32 |
| | genomic_\|_JAANRK010000790 | NODE_791_length_15684_cov_35.334, wholegenome |
| | | shotgun sequence. |
| 227 | GCA_011764265.1_ASM1176426v1_{—} | GCA_011764265.1_ASM1176426v1_genomic_\|_<unknown_name>. |
| | genomic_\|_<unknown_name> | |
| 228 | GCA_011801385.1_ASM1180138v1_{—} | GCA_011801385.1_ASM1180138v1_genomic_\|_<unknown_name>. |
| | genomic_\|_<unknown_name> | |
| 229 | GCA_011764225.1_ASM1176422v1_{—} | GCA_011764225.1_ASM1176422v1_genomic_\|_<unknown_name>. |
| | genomic_\|_<unknown_name> | |
| 230 | GCA_011801305.1_ASM1180130v1_{—} | Rhizopus oryzae strain GL46 |
| | genomic_\|_JAANRS010000865 | NODE_866_length_13693_cov_40.8166, whole genome |
| | | shotgun sequence. |
| 231 | GCA_011801335.1_ASM1180133v1_{—} | Rhizopus oryzae strain GL22 |
| | genomic_\|_JAANRP010000857 | NODE_971_length_13318_cov_41.8099, whole genome |
| | | shotgun sequence. |
| 232 | GCA_011801505.1_ASM1180150v1_{—} | Rhizopus oryzae strain GL44 |
| | genomic_\|_JAANRU010001014 | NODE_1015_length_12499_cov_36.2515, whole genome |
| | | shotgun sequence. |
| 233 | GCA_011801555.1_ASM1180155v1_{—} | Rhizopus oryzae strain GL52 |
| | genomic_\|_JAANRX010000993 | NODE_993_length_12636_cov_42.0685, whole genome |
| | | shotgun sequence. |
| 234 | GCA_011801575.1_ASM1180157v1_{—} | Rhizopus oryzae strain GL34 |
| | genomic_\|_JAANRW010000980 | NODE_980_length_12936_cov_43.8233, whole genome |
| | | shotgun sequence. |
| 235 | GCA_011801605.1_ASM1180160v1_{—} | Rhizopus oryzae strain GL56 |
| | genomic_\|_JAANRT010000988 | NODE_989_length_12605_cov_56.0753, whole genome |
| | | shotgun sequence. |
| 236 | GCA_011950985.1_ASM1195098v1_{—} | Rhizopus oryzae strain GL43 |
| | genomic_\|_JAANRF010000987 | NODE_987_length_12605_cov_19.5725, whole genome |
| | | shotgun sequence. |
| 237 | GCA_011951285.1_ASM1195128v1_{—} | Rhizopus oryzae strain GL42 |
| | genomic_\|_JAANRG010001004 | NODE_1004_length_12767_cov_22.8081, whole genome |
| | | shotgun sequence. |
| 238 | GCA_011952115.1_ASM1195211v1_{—} | Rhizopus oryzae strain GL7 |
| | genomic_\|_JAANRI010000863 | NODE_863_length_12471_cov_25.2721, wholegenome |
| | | shotgun sequence. |
| 239 | GCA_013435795.1_ASM1343579v1_{—} | GCA_013435795.1_ASM1343579v1_genomic_\|_<unknown_name>. |
| | genomic_\|_<unknown_name> | |
| 240 | GCA_013435795.1_ASM1343579v1_{—} | GCA_013435795.1_ASM1343579v1_genomic_\|_<unknown_name>. |
| | genomic_\|_<unknown_name> | |
| 241 | GCA_013435795.1_ASM1343579v1_{—} | GCA_013435795.1_ASM1343579v1_genomic_\|_<unknown_name>. |
| | genomic_\|_<unknown_name> | |
| 242 | GCA_013435795.1_ASM1343579v1_{—} | GCA_013435795.1_ASM1343579v1_genomic_\|_<unknown_name>. |
| | genomic_\|_<unknown_name> | |
| 243 | GCA_001483015.1_ASM148301v1_{—} | GCA_001483015.1_ASM148301v1_genomic_\|_<unknown_name>. |
| | genomic_\|_<unknown_name> | |
| 244 | GCA_001482985.1_ASM148298v1_{—} | Phytophthora nicotianae strain race 1 scaffold991, whole |
| | genomic_\|_LNFP01001009 | genomeshotgun sequence. |
| 245 | GCA_003328465.1_ASM332846v1_{—} | Phytophthora nicotianae strain JM01 scaffold_166, whole |
| | genomic_\|_NIOD01000166 | genomeshotgun sequence. |
| 246 | GCA_000365545.1_Phyt_para_CJ01A1_{—} | GCA_000365545.1_Phyt_para_CJ01A1_V1_genomic_\|_<unknown_name>. |
| | V1_genomic_\|_<unknown_name> | |
| 247 | GCA_012658955.1_USDA_Pnic_BL162_{—} | Phytophthora nicotianae strain BL162 |
| | 1.0_genomic_\|_JAAKBE010002713 | Contig_2713: Phytophthora, whole genome shotgun |
| | | sequence. |
| 248 | GCA_003730235.1_ASM373023v1_{—} | GCA_003730235.1_ASM373023v1_genomic_\|_<unknown_name>. |
| | genomic_\|_<unknown_name> | |
| 249 | GCA_004335795.1_ASM433579v1_{—} | GCA_004335795.1_ASM433579v1_genomic_\|_<unknown_name>. |
| | genomic_\|_<unknown_name> | |
| 250 | GCA_004335865.1_ASM433586v1_{—} | GCA_004335865.1_ASM433586v1_genomic_\|_<unknown_name>. |
| | genomic_\|_<unknown_name> | |
| 251 | GCA_013435795.1_ASM1343579v1_{—} | GCA_013435795.1_ASM1343579v1_genomic_\|_<unknown_name>. |
| | genomic_\|_<unknown_name> | |
| 252 | GCA_013435795.1_ASM1343579v1_{—} | GCA_013435795.1_ASM1343579v1_genomic_\|_<unknown_name>. |
| | genomic_\|_<unknown_name> | |
| 253 | GCA_013435795.1_ASM1343579v1_{—} | GCA_013435795.1_ASM1343579v1_genomic_\|_<unknown_name>. |
| | genomic_\|_<unknown_name> | |
| 254 | GCA_013435795.1_ASM1343579v1_{—} | GCA_013435795.1_ASM1343579v1_genomic_\|_<unknown_name>. |
| | genomic_\|_<unknown_name> | |
| 255 | GCA_013435795.1_ASM1343579v1_{—} | GCA_013435795.1_ASM1343579v1_genomic_\|_<unknown_name>. |
| | genomic_\|_<unknown_name> | |
| 256 | GCA_013435795.1_ASM1343579v1_{—} | GCA_013435795.1_ASM1343579v1_genomic_\|_<unknown_name>. |
| | genomic_\|_<unknown_name> | |
| 257 | GCA_013435795.1_ASM1343579v1_{—} | GCA_013435795.1_ASM1343579v1_genomic_\|_<unknown_name>. |
| | genomic_\|_<unknown_name> | |
| 258 | GCA_000193105.1_Acas_2.0_{—} | GCA_000193105.1_Acas_2.0_genomic_\|_<unknown_name>. |
| | genomic_\|_<unknown_name> | |
| 259 | GCA_000826445.1_Acanthamoeba_quina_{—} | GCA_000826445.1_Acanthamoeba_quina_genomic_\|_<unknown_name>. |
| | genomic_\|_<unknown_name> | |
| 260 | GCA_002284615.2_Dunsal1_v._2_{—} | GCA_002284615.2_Dunsal1_v._2_genomic_\|_<unknown_name>. |
| | genomic_\|_<unknown_name> | |
| 261 | GCA_002284615.2_Dunsal1_v._2_{—} | GCA_002284615.2_Dunsal1_v._2_genomic_\|_<unknown_name>. |
| | genomic_\|_<unknown_name> | |
| 262 | GCA_004335715.1_ASM433571v1_{—} | GCA_004335715.1_ASM433571v1_genomic_\|_<unknown_name>. |
| | genomic_\|_<unknown_name> | |
| 263 | GCA_004335755.1_ASM433575v1_{—} | GCA_004335755.1_ASM433575v1_genomic_\|_<unknown_name>. |
| | genomic_\|_<unknown_name> | |
| 264 | GCA_006384855.1_TSEL_PacBio_{—} | GCA_006384855.1_TSEL_PacBio_SMRT_genomic_\|_<unknown_name>. |
| | SMRT_genomic_\|_<unknown_name> | |
| 265 | GCA_006384855.1_TSEL_PacBio_{—} | GCA_006384855.1_TSEL_PacBio_SMRT_genomic_\|_<unknown_name>. |
| | SMRT_genomic_\|_<unknown_name> | |
| 266 | GCA_001185145.1_ASM118514v1_{—} | Balamuthia mandrillaris strain CDC-V039 unitig_3077, |
| | genomic_LFUI01000036 | whole genomeshotgun sequence. |
| 267 | GCA_001185145.1_ASM118514v1_{—} | Balamuthia mandrillaris strain CDC-V039 unitig_577, |
| | genomic_\|_LFUI01000239 | whole genomeshotgun sequence. |
| 268 | GCA_008828725.1_ASM882872v1_{—} | GCA_008828725.1_ASM882872v1_genomic_\|_<unknown_name>. |
| | genomic_\|_<unknown_name> | |
| 269 | GCA_000978595.1_SJ6.1_{—} | Saccharina japonica cultivar Ja scaffold156, whole genome |
| | genomic_\|_XRI01000156 | shotgunsequence. |
| 270 | GCA_902705575.1_Esub_Assebmy_complete_{—} | GCA_902705575.1_Esub_Assebmy_complete_genomic_\|_<unknown_name>. |
| | genomic_\|_<unknown_name> | |
| 271 | GCA_902602495.3_Esub_Assebmy2_{—} | Ectocarpus sp. CCAP 1310/34 strain Bft15b genome |
| | genomic_\|_CACKRE030002068 | assembly, contig: ESUB_scaffold2929, whole genome |
| | | shotgun sequence. |
| 272 | GCA_902602495.3_Esub_Assebmy2_{—} | GCA_902602495.3_Esub_Assebmy2_genomic_\|_<unknown_name>. |
| | genomic_\|_<unknown_name> | |
| 273 | GCA_004764655.1_pasteur_ecto_instagraal_{—} | Ectocarpus sp. Ec32 chromosome 6, whole genome |
| | genomic_\|_CM015678 | shotgun sequence. |
| 274 | GCA_000310025.1_ASM31002v1_{—} | GCA_000310025.1_ASM31002v1_genomic_\|_<unknown_name>. |
| | genomic_\|_<unknown_name> | |
| 275 | GCA_902602495.3_Esub_Assebmy2_{—} | GCA_902602495.3_Esub_Assebmy2_genomic_\|_<unknown_name>. |
| | genomic_\|_<unknown_name> | |
| 276 | GCA_011763795.1_ASM1176379v1_{—} | GCA_011763795.1_ASM1176379v1_genomic_\|_<unknown_name>. |
| | genomic_\|_<unknown_name> | |
| 277 | GCA_011763585.1_ASM1176358v1_{—} | GCA_011763585.1_ASM1176358v1_genomic_\|_<unknown_name>. |
| | genomic_\|_<unknown_name> | |
| 278 | GCA_011763855.1_ASM1176385v1_{—} | GCA_011763855.1_ASM1176385v1_genomic_\|_<unknown_name>. |
| | genomic_\|_<unknown_name> | |
| 279 | GCA_011763895.1_ASM1176389v1_{—} | GCA_011763895.1_ASM1176389v1_genomic_\|_<unknown_name>. |
| | genomic_\|_<unknown_name> | |
| 280 | GCA_013435795.1_ASM1343579v1_{—} | GCA_013435795.1_ASM1343579v1_genomic_\|_<unknown_name>. |
| | genomic_\|_<unknown_name> | |
| 281 | GCA_013435795.1_ASM1343579v1_{—} | GCA_013435795.1_ASM1343579v1_genomic_\|_<unknown_name>. |
| | genomic_\|_<unknown_name> | |
| 282 | GCA_013435795.1_ASM1343579v1_{—} | GCA_013435795.1_ASM1343579v1_genomic_\|_<unknown_name>. |
| | genomic_\|_<unknown_name> | |
| 283 | GCA_013435795.1_ASM1343579v1_{—} | GCA_013435795.1_ASM1343579v1_genomic_\|_<unknown_name>. |
| | genomic_\|_<unknown_name> | |
| 284 | GCA_013435795.1_ASM1343579v1_{—} | GCA_013435795.1_ASM1343579v1_genomic_\|_<unknown_name>. |
| | genomic_\|_<unknown_name> | |
| 285 | GCA_013435795.1_ASM1343579v1_{—} | GCA_013435795.1_ASM1343579v1_genomic_\|_<unknown_name>. |
| | genomic_\|_<unknown_name> | |
| 286 | GCA_902705575.1_Esub_Assebmy_complete_{—} | GCA_902705575.1_Esub_Assebmy_complete_genomic_\|_<unknown_name>. |
| | genomic_\|_<unknown_name> | |
| 287 | GCA_902602495.3_Esub_Assebmy2_{—} | GCA_902602495.3_Esub_Assebmy2_genomic_\|_<unknown_name>. |
| | genomic_\|_<unknown_name> | |
| 288 | GCA_902602495.3_Esub_Assebmy2_{—} | Ectocarpus sp. CCAP 1310/34 strain Bft15b genome |
| | genomic_\|_CACKRE030002068 | assembly, contig: ESUB_scaffold2929, whole genome |
| | | shotgun sequence. |
| 289 | GCA_000338815.2_SMST21v2.0_{—} | GCA_000338815.2_SMST21v2.0_genomic_\|_<unknown_name>. |
| | genomic_\|_<unknown_name> | |
| 290 | GCA_000149735.1_ASM14973v1_{—} | GCA_000149735.1_ASM14973v1_genomic_\|_<unknown_name>. |
| | genomic_\|_<unknown_name> | |
| 291 | GCA_000340395.2_CC2275_v2_{—} | GCA_000340395.2_CC2275_v2_genomic_\|_<unknown_name>. |
| | genomic_\|_<unknown_name> | |
| 292 | GCA_001278155.1_SOD22v2_{—} | GCA_001278155.1_SOD22v2_genomic_\|_<unknown_name>. |
| | genomic_\|_<unknown_name> | |
| 293 | GCA_001278235.1_SOD169v2_{—} | GCA_001278235.1_SOD169v2_genomic_\|_<unknown_name>. |
| | genomic_\|_<unknown_name> | |
| 294 | GCA_001933335.1_CC12475v1_{—} | GCA_001933335.1_CC12475v1_genomic_\|_<unknown_name>. |
| | genomic_\|_<unknown_name> | |
| 295 | GCA_001933415.1_CC2168_v1_{—} | GCA_001933415.1_CC2168_v1_genomic_\|_<unknown_name>. |
| | genomic_\|_<unknown_name> | |
| 296 | GCA_000336535.2 EU2_996_3_v2_{—} | GCA_000336535.2_EU2_996_3_v2_genomic_\|_<unknown_name>. |
| | genomic_\|_<unknown_name> | |
| 297 | GCA_013435795.1_ASM1343579v1_{—} | Chlamydomonas sp. ICE-L scaffold_633, whole genome |
| | genomic_\|_JACBWV010000423 | shotgunsequence. |
| 298 | GCA_013435795.1_ASM1343579v1_{—} | GCA_013435795.1_ASM1343579v1_genomic_\|_<unknown_name>. |
| | genomic_\|_<unknown_name> | |
| 299 | GCA_013435795.1_ASM1343579v1_{—} | GCA_013435795.1_ASM1343579v1_genomic_\|_<unknown_name>. |
| | genomic_\|_<unknown_name> | |
| 300 | GCA_013435795.1_ASM1343579v1_{—} | GCA_013435795.1_ASM1343579v1_genomic_\|_<unknown_name>. |
| | genomic_\|_<unknown_name> | |
| 301 | GCA_013435795.1_ASM1343579v1_{—} | GCA_013435795.1_ASM1343579v1_genomic_\|_<unknown_name>. |
| | genomic_\|_<unknown_name> | |
| 302 | GCA_013435795.1_ASM1343579v1_{—} | Chlamydomonas sp. ICE-L scaffold_288, whole genome |
| | genomic_\|_JACBWV010000660 | shotgunsequence. |
| 303 | GCA_013435795.1_ASM1343579v1_{—} | Chlamydomonas sp. ICE-L scaffold_151, whole genome |
| | genomic_\|_JACBWV010000673 | shotgunsequence. |
| 304 | GCA_013435795.1_ASM1343579v1_{—} | Chlamydomonas sp. ICE-L scaffold_865, whole genome |
| | genomic_\|_JACBWV010000099 | shotgunsequence. |
| 305 | GCA_013435795.1_ASM1343579v1_{—} | Chlamydomonas sp. ICE-L scaffold_354, whole genome |
| | genomic_\|_JACBWV010000587 | shotgunsequence. |
| 306 | GCA_013435795.1_ASM1343579v1_{—} | Chlamydomonas sp. ICE-L scaffold_216, whole genome |
| | genomic_\|_JACBWV010000592 | shotgunsequence. |
| 307 | GCA_013435795.1_ASM1343579v1_{—} | Chlamydomonas sp. ICE-L scaffold_511, whole genome |
| | genomic_\|_JACBWV010000626 | shotgunsequence. |
| 308 | GCA_013435795.1_ASM1343579v1_{—} | GCA_013435795.1_ASM1343579v1_genomic_\|_<unknown_name>. |
| | genomic_\|_<unknown_name> | |
| 309 | GCA_013435795.1_ASM1343579v1_{—} | Chlamydomonas sp. ICE-L scaffold_920, whole genome |
| | genomic_\|_JACBWV010000392 | shotgunsequence. |
| 310 | GCA_013435795.1_ASM1343579v1_{—} | Chlamydomonas sp. ICE-L scaffold_358, whole genome |
| | genomic_\|_JACBWV010000579 | shotgunsequence. |
| 311 | GCA_013435795.1_ASM1343579v1_{—} | GCA_013435795.1_ASM1343579v1_genomic_\|_<unknown_name>. |
| | genomic_\|_<unknown_name> | |
| 312 | GCA_013435795.1_ASM1343579v1_{—} | Chlamydomonas sp. ICE-L scaffold_511, whole genome |
| | genomic_\|_JACBWV010000626 | shotgunsequence. |

### Protein Modifications

[0211] The Fanzor polypeptide may comprise one or more modifications. As used herein, the term “modified” with regard to a Fanzor polypeptide generally refers to a Fanzor polypeptide having one or more modifications or mutations (including point mutations, truncations, insertions, deletions, chimeras, fusion proteins, etc.) compared to the wild-type counterpart from which it is derived. By derived is meant that the derived enzyme is largely based, in the sense of having a high degree of sequence homology with, a wildtype enzyme, but that it has been mutated (modified) in some way as known in the art or as described herein.

[0212] The modified proteins, e.g., modified Fanzor polypeptide may be catalytically inactive (also referred as dead). As used herein, a catalytically inactive or dead nuclease may have reduced, or no nuclease activity compared to a wildtype counterpart nuclease. In some cases, a catalytically inactive or dead nuclease may have nickase activity. In some cases, a catalytically inactive or dead nuclease may not have nickase. Such a catalytically inactive or dead nuclease may not make either double-strand or single-strand break on a target polynucleotide but may still bind or otherwise form complex with the target polynucleotide.

[0213] In an embodiment, eukaryotic homologues of bacterial Fanzor may be utilized in the present invention. These TnpB-like proteins, Fanzor 1 and Fanzor 2 while having a shared amino acid motif in their C-terminal half regions, are variable in their N terminal regions. See, Bao et al., Homologues of bacterial TnpB_IS605 are widespread in diverse eukaryotic transposable elements. Mobile DNA 4, 12 (2013). Doi:10.1186/1759-8753-4-12. In an aspect, the conserved sequence between TnpB and Fanzor comprise D-X(125, 275)-[TS]-[TS]-X-X-[C4 zinc finger]-X(5,50)-RD. Fanzor proteins, in addition to varying in their N-terminal region from TnpB have higher diversity, with Fanzor proteins associated with different transposons and compositions. With Applicant's discovery of the nucleic acid component and mechanism for reprogramming TnpB polypeptide activity, the similarity of the Fanzor systems may allow for similar use and applications.

[0214] In one embodiment, the modifications of the Fanzor polypeptide may or may not cause an altered functionality. By means of example, modifications which do not result in an altered functionality include for instance codon optimization for expression into a particular host, or providing the nuclease with a particular marker (e.g., for visualization). Modifications with may result in altered functionality may also include mutations, including point mutations, insertions, deletions, truncations (including split nucleases), etc., as well as chimeric nucleases (e.g., comprising domains from different orthologues or homologues) or fusion proteins. Fusion proteins may without limitation include, for instance, fusions with heterologous domains or functional domains (e.g., localization signals, catalytic domains, etc.). In one embodiment, various different modifications may be combined (e.g., a mutated nuclease which is catalytically inactive and which further is fused to a functional domain, such as for instance to induce DNA methylation or another nucleic acid modification, such as including without limitation, a break (e.g. by a different nuclease (domain)), a mutation, a deletion, an insertion, a replacement, a ligation, a digestion, a break or a recombination). As used herein, “altered functionality” includes without limitation an altered specificity (e.g., altered target recognition, increased (e.g., “enhanced” Fanzor polypeptide) or decreased specificity, or altered TAM recognition), altered activity (e.g. increased or decreased catalytic activity, including catalytically inactive nucleases or nickases), and/or altered stability (e.g. fusions with destabilization domains). Examples of all these modifications are known in the art. It will be understood that a “modified” nuclease as referred to herein, and in particular a “modified” Fanzor polypeptide or system or complex preferably still has the capacity to interact with or bind to the polynucleic acid (e.g., in complex with the nucleic acid component molecule). Such modified Fanzor polypeptide can be combined with the deaminase protein or active domain thereof as described herein.

[0215] In one embodiment, an unmodified Fanzor polypeptides may have cleavage activity. In one embodiment, the Fanzor polypeptides may direct cleavage of one or both nucleic acid (DNA or RNA) strands at the location of or near a target sequence, such as within the target sequence and/or within the complement of the target sequence or at sequences associated with the target sequence. In one embodiment, the Fanzor polypeptides may direct cleavage of one or both DNA or RNA strands within about 1, 2, 3, 4, 5, 6, 7, 8, 9, 10, 15, 20, 25, 50, 100, 200, 500, or more base pairs or nucleotides from the first or last nucleotide of a target sequence. In one embodiment, the cleavage may be staggered, i.e., generating sticky ends. In one embodiment, the cleavage is a staggered cut with a 5′ overhang. In one embodiment, the cleavage is a staggered cut with a 5′ overhang of 1 to 5 nucleotides, preferably of 4 or 5 nucleotides. In particular embodiments, the Fanzor polypeptides cleave DNA strands.

[0216] In one embodiment, a Fanzor polypeptide may be mutated with respect to a corresponding wild-type enzyme such that the mutated Fanzor lacks the ability to cleave one or both strands of a target polynucleotide containing a target sequence. As a further example, two or more catalytic domains of a Fanzor polypeptide (e.g., RuvC) may be mutated to produce a mutated Fanzor polypeptide substantially lacking all DNA cleavage activity. In one embodiment, a Fanzor polypeptide may be considered to substantially lack all polynucleotide cleavage activity when the polynucleotide cleavage activity of the mutated enzyme is no more than 25%, no more than 10%, no more than 5%, no more than 1%, no more than 0.1%, no more than 0.01% of the nucleic acid cleavage activity of the non-mutated form of the enzyme; an example can be when the nucleic acid cleavage activity of the mutated form is nil or negligible as compared with the non-mutated form.

[0217] In one embodiment, the Fanzor polypeptide may comprise one or more modifications resulting in enhanced activity and/or specificity, such as including mutating residues that stabilize the targeted or non-targeted strand. In one embodiment, the altered or modified activity of the engineered Fanzor polypeptide comprises increased targeting efficiency or decreased off-target binding. In one embodiment, the altered activity of the engineered Fanzor polypeptide comprises modified cleavage activity. In one embodiment, the altered activity comprises increased cleavage activity as to the target polynucleotide loci. In one embodiment, the altered activity comprises decreased cleavage activity as to the target polynucleotide loci. In one embodiment, the altered activity comprises decreased cleavage activity as to off-target polynucleotide loci. In one embodiment, the modified nuclease comprises a modification that alters association of the protein with the nucleic acid molecule comprising RNA, or a strand of the target polynucleotide loci, or a strand of off-target polynucleotide loci. In an aspect of the invention, the engineered Fanzor polypeptide comprises a modification that alters formation of the Fanzor polypeptide and related complex. In one embodiment, the altered activity comprises increased cleavage activity as to off-target polynucleotide loci. Accordingly, in one embodiment, there is increased specificity for target polynucleotide loci as compared to off-target polynucleotide loci. In other embodiments, there is reduced specificity for target polynucleotide loci as compared to off-target polynucleotide loci. In one embodiment, the mutations result in decreased off-target effects (e.g., cleavage or binding properties, activity, or kinetics), such as in case for Fanzor polypeptide for instance resulting in a lower tolerance for mismatches between target and Nucleic acid component. Other mutations may lead to increased off-target effects (e.g., cleavage or binding properties, activity, or kinetics). Other mutations may lead to increased or decreased on-target effects (e.g., cleavage or binding properties, activity, or kinetics). In one embodiment, the mutations result in altered (e.g., increased or decreased) activity, association or formation of the functional nuclease complex. Examples mutations include positively charged residues and/or (evolutionary) conserved residues, such as conserved positively charged residues, in order to enhance specificity. In one embodiment, such residues may be mutated to uncharged residues, such as alanine.

### Nuclear Localization Sequences

[0218] In one embodiment, the Fanzor polypeptide is fused to one or more nuclear localization sequences (NLSs), such as about or more than about 1, 2, 3, 4, 5, 6, 7, 8, 9, 10, or more NLSs. In one embodiment, the Fanzor polypeptide comprises about or more than about 1, 2, 3, 4, 5, 6, 7, 8, 9, 10, or more NLSs at or near the amino-terminus, about or more than about 1, 2, 3, 4, 5, 6, 7, 8, 9, 10, or more NLSs at or near the carboxy-terminus, or a combination of these (e.g., zero or at least one or more NLS at the amino-terminus and zero or at one or more NLS at the carboxy terminus). When more than one NLS is present, each may be selected independently of the others, such that a single NLS may be present in more than one copy and/or in combination with one or more other NLSs present in one or more copies. In a preferred embodiment of the invention, the Fanzor polypeptide comprises at most 6 NLSs. In one embodiment, an NLS is considered near the N- or C-terminus when the nearest amino acid of the NLS is within about 1, 2, 3, 4, 5, 10, 15, 20, 25, 30, 40, 50, or more amino acids along the polypeptide chain from the N- or C-terminus. Non-limiting examples of NLSs include an NLS sequence derived from: the NLS of the SV40 virus large T-antigen, having the amino acid sequence PKKKRKV (SEQ ID NO: 512); the NLS from nucleoplasmin (e.g. the nucleoplasmin bipartite NLS with the sequence KRPAATKKAGQAKKKK (SEQ ID NO: 513); the c-myc NLS having the amino acid sequence PAAKRVKLD (SEQ ID NO: 514) or RQRRNELKRSP (SEQ ID NO: 515); the hRNPA1 M9 NLS having the sequence NQSSNFGPMKGGNFGGRSSGPYGGGGQYFAKPRNQGGY (SEQ ID NO: 516); the sequence RMRIZFKNKGKDTAELRRRRVEVSVELRKAKKDEQILKRRN (SEQ ID NO: 517) of the IBB domain from importin-alpha; the sequences VSRKRPRP (SEQ ID NO: 518) and PPKKARED (SEQ ID NO: 519) of the myoma T protein; the sequence PQPKKKPL (SEQ ID NO: 425) of human p53; the sequence SALIKKKKKMAP (SEQ ID NO: 520) of mouse c-abl IV; the sequences DRLRR (SEQ ID NO: 521) and PKQKKRK (SEQ ID NO: 522) of the influenza virus NS1; the sequence RKLKKKIKKL (SEQ ID NO: 523) of the Hepatitis virus delta antigen; the sequence REKKKFLKRR (SEQ ID NO: 524) of the mouse Mx1 protein; the sequence KRKGDEVDGVDEVAKKKSKK (SEQ ID NO: 525) of the human poly(ADP-ribose) polymerase; and the sequence RKCLQAGMNLEARKTKK (SEQ ID NO: 526) of the steroid hormone receptors (human) glucocorticoid. In general, the one or more NLSs are of sufficient strength to drive accumulation of the Fanzor polypeptide in a detectable amount in the nucleus of a eukaryotic cell. In general, strength of nuclear localization activity may derive from the number of NLSs in the Fanzor polypeptide, the particular NLS(s) used, or a combination of these factors. Detection of accumulation in the nucleus may be performed by any suitable technique. For example, a detectable marker may be fused to the Fanzor polypeptide, such that location within a cell may be visualized, such as in combination with a means for detecting the location of the nucleus (e.g., a stain specific for the nucleus such as DAPI). Cell nuclei may also be isolated from cells, the contents of which may then be analyzed by any suitable process for detecting protein, such as immunohistochemistry, Western blot, or enzyme activity assay. Accumulation in the nucleus may also be determined indirectly, such as by an assay for the effect of complex formation (e.g., assay for DNA cleavage or mutation at the target sequence, or assay for altered gene expression activity affected by complex formation and/or Fanzor polypeptide activity), as compared to a control no exposed to the Fanzor polypeptide or complex, or exposed to a Fanzor polypeptide lacking the one or more NLSs. In one embodiment of the herein described Fanzor polypeptide protein complexes and systems the codon optimized Fanzor polypeptides comprise an NLS attached to the C-terminal of the protein. In one embodiment, other localization tags may be fused to the Fanzor polypeptide, such as without limitation for localizing the Fanzor polypeptide to particular sites in a cell, such as organelles, such as mitochondria, plastids, chloroplast, vesicles, Golgi, (nuclear or cellular) membranes, ribosomes, nucleolus, ER, cytoskeleton, vacuoles, centrosome, nucleosome, granules, centrioles, etc.

[0219] In one embodiment of the invention, at least one nuclear localization signal (NLS) is attached to the nucleic acid sequences encoding the Fanzor polypeptide. In preferred embodiments at least one or more C-terminal or N-terminal NLSs are attached (and hence nucleic acid molecule(s) coding for the Fanzor polypeptide can include coding for NLS(s) so that the expressed product has the NLS(s) attached or connected). In a preferred embodiment a C-terminal NLS is attached for optimal expression and nuclear targeting in eukaryotic cells, preferably human cells. The invention also encompasses methods for delivering multiple nucleic acid components, wherein each nucleic acid component is specific for a different target locus of interest thereby modifying multiple target loci of interest. The nucleic acid component of the complex may comprise one or more protein-binding RNA aptamers. The one or more aptamers may be capable of binding a bacteriophage coat protein.

### Linkers

[0220] In some preferred embodiments, the functional domain is linked to a Fanzor polypeptide (e.g., an active or a dead Fanzor polypeptide) to target and activate epigenomic sequences such as promoters or enhancers. One or more Nucleic acid components directed to such promoters or enhancers may also be provided to direct the binding of the Fanzor polypeptide to such promoters or enhancers.

[0221] The term “associated with” is used here in relation to the association of the functional domain to the Fanzor polypeptide protein or the adaptor protein. It is used in respect of how one molecule ‘associates’ with respect to another, for example between an adaptor protein and a functional domain, or between the Fanzor polypeptide protein and a functional domain. In the case of such protein-protein interactions, this association may be viewed in terms of recognition in the way an antibody recognizes an epitope. Alternatively, one protein may be associated with another protein via a fusion of the two, for instance one subunit being fused to another subunit. Fusion typically occurs by addition of the amino acid sequence of one to that of the other, for instance via splicing together of the nucleotide sequences that encode each protein or subunit. Alternatively, this may essentially be viewed as binding between two molecules or direct linkage, such as a fusion protein. In any event, the fusion protein may include a linker between the two subunits of interest (i.e., between the enzyme and the functional domain or between the adaptor protein and the functional domain). Thus, in one embodiment, the Fanzor polypeptide protein or adaptor protein is associated with a functional domain by binding thereto. In other embodiments, the Fanzor polypeptide or adaptor protein is associated with a functional domain because the two are fused together, optionally via an intermediate linker.

[0222] The term “linker” as used in reference to a fusion protein refers to a molecule which joins the proteins to form a fusion protein. Generally, such molecules have no specific biological activity other than to join or to preserve some minimum distance or other spatial relationship between the proteins. However, in one embodiment, the linker may be selected to influence some property of the linker and/or the fusion protein such as the folding, net charge, or hydrophobicity of the linker.

[0223] Suitable linkers for use in the methods of the present invention are well known to those of skill in the art and include, but are not limited to, straight or branched-chain carbon linkers, heterocyclic carbon linkers, or peptide linkers. However, as used herein the linker may also be a covalent bond (carbon-carbon bond or carbon-heteroatom bond). In particular embodiments, the linker is used to separate the Fanzor polypeptide and the nucleotide deaminase by a distance sufficient to ensure that each protein retains its required functional property. Preferred peptide linker sequences adopt a flexible extended conformation and do not exhibit a propensity for developing an ordered secondary structure. In one embodiment, the linker can be a chemical moiety which can be monomeric, dimeric, multimeric or polymeric. Preferably, the linker comprises amino acids. Typical amino acids in flexible linkers include Gly, Asn and Ser. Accordingly, in particular embodiments, the linker comprises a combination of one or more of Gly, Asn and Ser amino acids. Other near neutral amino acids, such as Thr and Ala, also may be used in the linker sequence. Exemplary linkers are disclosed in Maratea et al. (1985), Gene 40: 39-46; Murphy et al. (1986) Proc. Nat'l. Acad. Sci. USA 83: 8258-62; U.S. Pat. Nos. 4,935,233; and 4,751,180. For example, GlySer linkers GGS, GGGS (SEQ ID NO: 527) or GSG can be used. GGS, GSG, GGGS (SEQ ID NO: 527) or GGGGS (SEQ ID NO: 528) linkers can be used in repeats of 3 (such as (GGS)₃ (SEQ ID NO: 529), (GGGGS)₃ (SEQ ID NO: 530) or 5, 6, 7, 9 or even 12 or more, to provide suitable lengths. In some cases, the linker may be (GGGGS)₃₋₁₅ (SEQ ID NO: 530-542), For example, in some cases, the linker may be (GGGGS)₃₋₁₁ (SEQ ID NO: 530-538), e.g., GGGGS (SEQ ID NO: 528), (GGGGS)₂ (SEQ ID NO: 543), (GGGGS)₃ (SEQ ID NO: 530), (GGGGS)₄ (SEQ ID NO: 531), (GGGGS)₅ (SEQ ID NO: 532), (GGGGS)₆ (SEQ ID NO: 533), (GGGGS)₇ (SEQ ID NO: 534), (GGGGS)₈ (SEQ ID NO: 535), (GGGGS)₉ (SEQ ID NO: 536), (GGGGS)₁₀ (SEQ ID NO: 537), or (GGGGS)₁₁ (SEQ ID NO: 538).

[0224] In particular embodiments, linkers such as (GGGGS)₃ (SEQ ID NO: 530) are preferably used herein. (GGGGS)₆ (SEQ ID NO: 533), (GGGGS)₉ (SEQ ID NO: 536) or (GGGGS)₁₂ (SEQ ID NO: 539) may preferably be used as alternatives. Other preferred alternatives are (GGGGS)₁ (SEQ ID NO: 528), (GGGGS)₄ (SEQ ID NO: 531), (GGGGS)₅ (SEQ ID NO: 532), (GGGGS)₇ (SEQ ID NO: 534), (GGGGS)₈ (SEQ ID NO: 535), (GGGGS)₁₀ (SEQ ID NO: 537), or (GGGGS)₁₁ (SEQ ID NO: 538). In yet a further embodiment, LEPGEKPYKCPECGKSFSQSGALTRHQRTHTR (SEQ ID NO: 544) is used as a linker. In yet an additional embodiment, the linker is an XTEN linker. In particular embodiments, the Fanzor polypeptide is linked to the deaminase protein or its catalytic domain by means of an LEPGEKPYKCPECGKSFSQSGALTRHQRTHTR (SEQ ID NO: 544) (linker. In further particular embodiments, Fanzor polypeptide is linked C-terminally to the N-terminus of a deaminase protein or its catalytic domain by means of an LEPGEKPYKCPECGKSFSQSGALTRHQRTHTR ((SEQ ID NO: 544)) linker. In addition, N- and C-terminal NLSs can also function as linker (e.g., PKKKRKVEASSPKKRKVEAS (SEQ ID NO: 545)).

[0225] Examples of linkers are shown in Table 2 below.

TABLE 2

| | |
|---|---|
| GGS | GGTGGTAGT |
| GGS | GGTGGTAGTGGAGGGAGCGGCGGTTCA (SEQ ID NO: 547) |
| x 3 | |
| (SEQ | |
| ID NO: | |
| 546) | |
| GGS | ggtggaggaggctctggtggaggcggtagcggaggcggagggtcgGGTGGTAGTGGAGGGAGC |
| x7 | G GCGGTTCA (SEQ ID NO: 549) |
| (SEQ | |
| ID NO: | |
| 548) | |
| XTEN | TCGGGATCTGAGACGCCTGGGACCTCGGAATCGGCTACGCCCGAAAGT |
| | (SEQ ID NO: 550) |
| Z- | Gtggataacaaatttaacaaagaaatgtgggcggcgtgggaagaaattcgtaacctgccgaacctgaacggctggc |
| EFGR_ | agatgaccgcgtttattgcgagcctggtggatgatccgagccagagcgcgaacctgctggcggaagcgaaaaaact |
| Short | gaac gatgcgcaggcgccgaaaaccggcggtggttctggt (SEQ ID NO: 551) |
| GSAT | Ggtggttctgccggtggctccggttctggctccagcggtggcagctctggtgcgtccggcacgggtactgcgggtg |
| | gc actggcagcggttccggtactggctctggc (SEQ ID NO: 552) |

[0226] Linkers may be used between the Nucleic acid component molecules and the functional domain (activator or repressor), or between the Fanzor polypeptide and the functional domain. The linkers may be used to engineer appropriate amounts of “mechanical flexibility”.

[0227] In one embodiment, the one or more functional domains are controllable, e.g., inducible.

[0228] Other suitable functional domains can be found, for example, in International Application Publication No. WO 2019/018423, for example, at [0678]-[0692], incorporated herein by reference. Exemplary functional domains are further detailed elsewhere herein.

### Optimized Fanzor Polypeptides

[0229] In some embodiments, the Fanzor polypeptide is optimized to have increased binding and/or interaction with a target DNA and/or an ωRNA component molecule, and/or increase Fanzor activity (such as cleavage or other activity). In some embodiments, the Fanzor polypeptide is optimized by introducing one or more mutations in the Fanzor polypeptide as compared to a wild-type, control, and/or Fanzor polypeptide not having the one or more mutations. In some embodiments, the one or more mutations increase binding and/or interaction with a target DNA and/or an ωRNA component molecule, and/or increase Fanzor activity. In some embodiments Fanzor activity is increased 1 to 50 fold or more, e.g., 1, to/or 2,3,4,5, 6, 7, 8, 9, 10, 11, 12, 13, 14, 15, 16, 17, 18, 19, 20, 21, 22, 23, 24, 25, 26, 27, 28, 29, 30, 31, 32, 33, 34, 35, 36, 37, 38, 39, 40, 41, 42, 43, 44, 45, 46, 47, 48, 49, to/or 50 fold or more. In some embodiments, the one or more mutations comprise one or more mutations of one or more neutral and/or negatively charged amino acids to one or more positively charged amino acids (e.g., Lys, His, or Arg). In some embodiments, 1-50 or more residues are mutated. In some embodiments, the mutations are made in and/or within effective proximity to the catalytic pocket or DNA interaction region of the Fanzor polypeptide. In some embodiments, the mutations are made between a RuvC domain and nuclease domain of the Fanzor polypeptide. In some embodiments, the one or more the Fanzor polypeptide comprises one or more mutations of one or more neutral and/or negatively charged amino acids to one or more positively charged amino acids. In some embodiments, the one or more mutations is in a WED domain, REC domain, RuvC domain, NUC domain or any combination thereof, and optionally wherein one or more of the one or more mutations are in positions that correspond to the positively charged channel formed by the WED, REC, and RuvC domains when active and/or interacts with an RNA-DNA heteroduplex formed by the ωRNA component molecule and a target DNA. In certain example embodiments, the one or more mutations comprise one or more mutations of FIG. 10C-10E, FIG. 35, 56A-56D, 72D, 74E-74G, 75A-75C, 76B-76D, 77A-77C or any combination thereof or are mutations corresponding thereto in a homologue or orthologue Fanzor polypeptide, such as any of those of the present invention described herein. In some embodiments, the one or more mutations are at one or more of the amino acid residues identified in any one or more of FIG. 10C-10E, FIG. 35, 56A-56D, 72D, 74E-74G, 75A-75C, 76B-76D, 77A-77C or any combination thereof or are at a position analogous thereto in a homologue or orthologue Fanzor polypeptides, such as any of those of the present invention described herein. In some embodiments, a reference Fanzor is a SpuFz1, GtFz1, NovlFz2, or MmeFz2. In certain example embodiments, the one or more mutations at sites in the Fanzor polypeptide as shown in FIG. 10D or in positions analogous thereto in other Fanzor polypeptides, e.g., homologues, orthologues, or variants.

[0230] In some embodiments, the Fanzor polypeptide comprises one or more of the following mutations: D300R. C310R, D487K, E498R. T513K relative to SpuFz1 or in corresponding mutations thereto in a homologue, orthologue, or a Fanzor variant. In some embodiments, the Fanzor polypeptide comprises D300R, C310R, D487K, E498R, and T513K mutations relative to SpuFz1 or in corresponding mutations thereto in a homologue, orthologue, or a Fanzor variant. In some embodiments, a Fanzor polypeptide comprising one or more D300R, C310R, D487K, E498R, and/or T513K mutations has increased activity as measured by increase in indel formation as compared to a Fanzor polypeptide not having the same mutations.

[0231] In some embodiments, the Fanzor polypeptide comprises one or more mutations in the WED, NUC and/or RuvC domain, where the one or more mutations are at amino acid positions selected from W596^{NUC}, R601^{NUC}, N604^{NUC}, S598^{NUC}, Y602^{NUC}, R550^{NUC}, C611^{RuvC}, M607^{RuvC}, W603^{NUC}, L583^{NUC}, K562^{NUC}, R564^{NUC}, S567^{NUC}, R572^{NUC}, Q482^{RuvC}, R315^{WED}, R317^{WED}, K312^{WED}, R481^{RuvC}, K25^{WED}, R268^{REC} and R157^{REC}, Q148^{REC}, R407^{RuvC}, R420^{RuvC}, S269^{REC}, R268^{REC}, K440^{RuvC}, R260^{REC}, R96^{REC}, Q129^{REC}, and N133^{REC}, R291^{WED}, Q130^{REC}, and N133^{REC}relative to SpuFz1, or in corresponding positions thereto in a homologue, orthologue, or a Fanzor variant. In some embodiments, the one or more mutations at positions selected from W596^{NUC}, R601^{NUC}, N604^{NUC}, S598^{NUC}, Y602^{NUC}, R550^{NUC}, C611^{RuvC}, M607^{RuvC}, W603^{NUC}, L583^{NUC}, K562^{NUC}, R564^{NUC}, S567^{NUC}, R572^{NUC}, Q482^{RuvC}, R315^{WED}, R317^{WED}, K312^{WED}, R481^{RuvC}, K25^{WED}, R268^{REC} and R157^{REC}, Q148^{REC}, R407^{RuvC}, R420^{RuvC}, S269^{REC}, R268^{REC}, K440^{RuvC}, R260^{REC}, R96^{REC}, Q129^{REC}, and N133^{REC}, R291^{WED}, Q130^{REC}, and N133^{REC}, relative to SpuFz1, or in corresponding positions thereto in a homologue, orthologue, or a Fanzor variant modulate binding, interaction, and/or activity at or with a target nucleic acid (e.g., DNA) and/or an omega RNA In some embodiments, the Fanzor polypeptide comprises one or more mutations at residues E541, D383, N385, D606, or any combination thereof, relative to SpuFz1, or in corresponding positions thereto in a homologue, orthologue, or a Fanzor variant. In some embodiments, mutations at residues E541, D383, N385, D606, or any combination thereof, relative to SpuFz1, or in corresponding positions thereto in a homologue, orthologue, or a Fanzor variant modulate binding or other interaction with an ion(s), such as magnesium.

### Chimeric Fanzors Having a Non-Native REC Domain

[0232] In some embodiments, the Fanzor is a chimeric Fanzor and contains one or more non-native REC domains. In some embodiments, the one or more non-native REC domains replace one or more native REC domains. In some embodiments, the one or more non-native REC domains are in addition to native REC domain(s) in the Fanzor polypeptide.

[0233] In one example embodiment, the non-native REC domain is a Cas REC domain. In on example embodiment, the REC domain is a Type II Cas REC domain. In one example embodiment, the non-native REC domain is a Type V REC domain. In one example embodiment, the non-native REC domain is a Cas12a REC domain. In one example embodiment, the non-native REC domain is a Cas12b REC domain. In one example embodiment, the non-native REC domain is a Cas12c REC domain. In some embodiments, the non-native REC domain is a Cas12d REC domain. In some embodiments, the non-native REC domain is a Cas12e REC domain. In some embodiments, the non-native REC domain is a Cas12 wREC2 domain. In some embodiments, the non-native REC domain is a Cas12a wREC2 domain. In some embodiments, the non-native REC domain is a Cas12d wREC2 domain. In some embodiments, the non-native REC domain is a Cas12e wREC2 domain.

[0234] In some embodiments, the non-native REC2 domain is 80-100 percent identical to any one of SEQ ID NO: 649-651. In some embodiments, the non-native REC2 domain is 80 to/or 81, 82, 83, 84, 85, 86, 87, 88, 89, 90, 91, 92, 93, 94, 95, 96, 97, 98, 99, 100 percent identical to any one of SEQ ID NO: 649-651.

[0235] In some embodiments, the non-native REC domain(s) are fused or coupled to (e.g., via a linker) to the Fanzor polypeptide. In some embodiments the non-native REC domain(s) are fused or coupled to the N-terminus and/or C-terminus of the Fanzor polypeptide. In some embodiments, the non-native REC domain(s) are inserted between two contiguous amino acids between the N- and C-terminus of the Fanzor polypeptide. In some embodiments, the one or more non-native REC domains are inserted downstream of a native REC1 (e.g., a native wREC1) domain in a Fanzor polypeptide. In some embodiments, a non-native REC domain is inserted in a Fanzor polypeptide at S246 in Fanzor ID83, at N259 in Fanzor ID16, at K165 in Fanzor ID89, at G210 in Fanzor ID36, or in analogous positions in homolog or ortholog Fanzor polypeptides. In some embodiments where the non-native REC domain(s) are linked to the Fanzor polypeptide by one or more linkers, the linker is a flexible or rigid linker. In some embodiments where the non-native REC domain(s) are linked to the Fanzor polypeptide by one or more linkers, the linker is a Gly-Ser linker. Exemplary linkers, including Gly-Ser linkers are generally known in the art described in other contexts herein. It will be appreciated that such linkers can be used in this context to link the non-native REC domain to the Fanzor polypeptide. Without being bound by theory, the non-native REC domains may modify Fanzor polypeptide activity.

### Nucleic Acid Component Molecules

### ωRNA Component Molecules

[0236] The Fanzor systems described herein may further comprise one or more nucleic acid component molecules. Such nucleic acid components may comprise RNA, DNA, or combinations thereof and include modified and non-canonical nucleotides as described further below. At least one of the one or more nucleic acid component molecules in a Fanzor system described herein are ωRNA, which are also referred to herein as ωRNA component molecules. The ωRNA can comprise a reprogrammable spacer sequence, also referred to herein as a guide sequence, and a scaffold that interacts with the Fanzor polypeptide. ωRNA may form a complex (Ω complex) with a Fanzor polypeptide, and direct sequence-specific binding of the complex to a target sequence of a target polynucleotide. In the context of the present invention, the Fanzor polypeptide and ωRNA comprise modifications to the polypeptide or nucleic acid component, or both, such that one or more of the polypeptide, or the nucleic acid component, are the complex have structurally distinct features from naturally occurring systems. In one example embodiment, the ωRNA is a single molecule comprising a scaffold sequence and a spacer sequence. In certain example embodiments, the spacer is 5′ of the scaffold sequence. In one example embodiment, the ωRNA may further comprise a conserved nucleic acid sequence between the scaffold and spacer portions.

[0237] In embodiments, the ωRNA comprises a spacer sequence and a scaffold sequence, e.g., a conserved nucleotide sequence. In embodiments, the ωRNA comprises about 45 to about 250 nucleotides, such as about 45, 46, 47 48, 49, 50, 51, 52, 53, 54, 55, 56, 57, 58, 59, 60, 61, 62, 63, 64, 65, 66, 67, 68, 69, 70, 71, 72, 73, 74, 75, 76, 77, 78, 79, 80, 81, 82, 83, 84, 85, 86, 87, 88, 89, 90, 91, 92, 93, 94, 95, 96, 97, 98, 99, 100, 101, 102, 103, 104, 105, 106, 107, 108, 109, 110, 111, 112, 113, 114, 115, 116, 117, 118, 119, 120, 121, 122, 123, 124, 125, 126, 127, 128, 129, 130, 131, 132, 133, 134, 135, 136, 17, 138, 19, 140, 141, 142, 143, 144, 145, 146, 147, 148, 149, 150, 151, 152, 153, 154, 155, 156, 157, 158, 159, 160, 11, 162, 163, 164, 165, 166, 167, 168, 169, 170, 171, 172, 173, 174, 175, 176, 177, 178, 179, 180. 181, 182, 183, 184, 185, 186, 187, 188, 189, 190, 191, 192, 193, 194, 195, 196, 197, 198, 199, 200, 201, 202, 203, 204, 205, 206, 207, 208, 209, 210, 211, 212, 213, 214, 215, 216, 217, 218, 219, 220, 221, 222, 223, 224, 225, 226, 227, 228, 229, 230, 231, 232, 233, 234, 235, 236, 237, 238, 239, 2340, 241, 242, 243, 244, 245, 246, 247, 248, 249, to/or about 250 nucleotides, or any numerical range therein.

[0238] The scaffold sequence therefore typically comprises conserved regions, with the scaffold comprising about 20 to about 200 nucleotides, about 50 to 180, about 80 to 175 nucleotides, or about 20, 21, 22, 23, 24, 25, 26, 27, 28, 29, 30, 31, 32, 33, 34, 35, 36, 37, 38, 39 40, 41, 42, 43, 44, 45, 46, 47 48, 49, 50, 51, 52, 53, 54, 55, 56, 57, 58, 59, 60, 61, 62, 63, 64, 65, 66, 67, 68, 69, 70, 71, 72, 73, 74, 75, 76, 77, 78, 79, 80, 81, 82, 83, 84, 85, 86, 87, 88, 89, 90, 91, 92, 93, 94, 95, 96, 97, 98, 99, 100, 101, 102, 103, 104, 105, 106, 107, 108, 109, 110, 111, 112, 113, 114, 115, 116, 117, 118, 119, 120, 121, 122, 123, 124, 125, 126, 127, 128, 129, 130, 131, 132, 133, 134, 135, 136, 137, 138, 139, 140, 141, 142, 143, 144, 145, 146, 147, 148, 149, 150, 151, 152, 153, 154, 155, 156, 157, 158, 159, 160, 161, 162, 163, 164, 165, 166, 167, 168, 169, 170, 171, 172, 173, 174, 175, 176, 177, 178, 179, 180, 181, 182, 183, 184, 185, 186, 187, 188, 189, 190, 191, 192, 193, 194, 195, 196, 197, 198, 199, to/or 200 or more nt, or any range of values therein. In an aspect, the nucleic acid component scaffold comprises one conserved nucleotide sequence. In embodiments, the conserved nucleotide sequence is on or near a 5′ end of the scaffold.

[0239] The ωRNA may further comprise a spacer, which can be re-programmed to replace the naturally occurring spacer sequence with an engineered spacer sequence that directssite-specific binding to a target sequence of a target polynucleotide that is different than the naturally occurring target polynucleotide. The spacer may also be referred to herein as part of the ωRNA scaffold or ωRNA and may comprise an engineered heterologous sequence. In some embodiments, the RNA species comprises the RNA conserved region+guide sequence, which is distinct from but generally related to the DR+spacer configuration of CRISPR-Cas systems.

[0240] In one embodiment, the spacer length of the ωRNA is from 10 to 30 or 10 to 50 nt. In one embodiment, the spacer length of the ωRNA is at least 10, 11, 12, 13, 14, or 15 nucleotides. In one embodiment, the spacer length is from 10 to 40 nucleotides, from 15 to 30 nt, 15 to 17 nt, e.g., 15, 16, or 17 nt, from 17 to 20 nt, e.g., 17, 18, 19, or 20 nt, from 20 to 24 nt, e.g., 20, 21, 22, 23, or 24 nt, from 23 to 25 nt, e.g., 23, 24, or 25 nt, from 24 to 27 nt, e.g., 24, 25, 26, or 27 nt, from 27 to 30 nt, e.g., 27, 28, 29, or 30 nt, from 30 to 35 nt, e.g., 30, 31, 32, 33, 34, or 35 nt, or 35 nt or longer. In example embodiments, the spacer sequence is 14, 15, 16, 17, 18, 19, 20, 21, 22, 23, 24, 25, 26, 27, 28, 29, 30, 31, 32, 33, 34, 35, 36, 37, 38, 39 40, 41, 42, 43, 44, 45, 46, 47 48, 49, or 50 nt. In some embodiments, the space length is 10, 11, 12, 13, 14, 15, 16, 17, 18, 19, 20, 21, 22, 23, 24, 25, 26, 27, 28, 29, 30, 31, 32, 33, 34, 35, 36, 37, 38, 39, 40, 41, 42, 43, 44, 45, 46, 47, 48, 49, to/or 50 nt, or any range of values therein. In some embodiments, the space length is 10, 11, 12, 13, 14, 15, 16, 17, 18, 19, 20, 21, 22, 23, 24, 25, 26, 27, 28, 29, 30, 31, 32, 33, 34, 35, 36, 37, 38, 39 to/or 40 nt, or any range of values therein. In some embodiments, the space length is 10, 11, 12, 13, 14, 15, 16, 17, 18, 19, 20, 21, 22, 23, 24, 25, 26, 27, 28, 29 to/or 30 nt, or any range of values therein.

[0241] In one embodiment, the sequence of the ωRNA is selected to reduce the degree secondary structure within the ωRNA. In one embodiment, about or less than about 75%, 50%, 40%, 30%, 25%, 20%, 15%, 10%, 5%, 1%, or fewer of the nucleotides of the nucleic acid-targeting Nucleic acid component participate in self-complementary base pairing when optimally folded. Optimal folding may be determined by any suitable polynucleotide folding algorithm. Some programs are based on calculating the minimal Gibbs free energy. An example of one such algorithm is mFold, as described by Zuker and Stiegler (Nucleic Acids Res. 9 (1981), 133-148). Another example of a folding algorithm is the online webserver RNAfold, developed at Institute for Theoretical Chemistry at the University of Vienna, using the centroid structure prediction algorithm (see e.g., A. R. Gruber et al., 2008, Cell 106(1): 23-24; and PA Carr and GM Church, 2009, Nature Biotechnology 27(12): 1151-62).

[0242] As Applicant demonstrates in the Working Examples herein, in some embodiments, the ωRNA comprises a minimal scaffold (gRNA) that contains a core region that is capable of interacting with Wedge (WED)/Bridge Helix (BH) domains, particularly the wREC domains and a spacer that is binds a target nucleotide sequence. See e.g., FIG. 59A-59B. In some embodiments, the minimal scaffold (gRNA) is a hairpin. WED, BH, and analogous domains are also described in context of TnpB and/or IscBs and Cas12. See e.g., Altae-Tran et al., Science. 2021. 374(6563): 57-65, Karvelis et al. Nature. 2021: 599(7886):692-696, Bao and Jurka et al. Mobile DNA. 2013: 4: Article 12, and Swarts et al. Mol. Cell. 2017. 66(2):221-233 and Zhang et al, Nat Struct Mol Biol. 2020 November; 27(11): 1069-1076.

[0243] Exemplary ωRNAs are described in the Working Examples herein. In some embodiments the ωRNAs comprises all or a portion or region of (e.g., spacer (also referred to herein as the guide), scaffold or other region) an ωRNA of Table 13.

[0244] As used herein, a heterologous ωRNA is an ωRNA that is not derived from the same species as the Fanzor polypeptide, or comprises a portion of the molecule, e.g., spacer, that is not derived from the same species as the Fanzor polypeptide. For example, a heterologous ωRNA of a Fanzor polypeptide derived from species A comprises a polynucleotide derived from a species different from species A, or an artificial polynucleotide.

[0245] In a particular embodiment, the ωRNA comprises a spacer sequence linked to a conserved nucleotide sequence, wherein the conserved nucleotide sequence may comprise one or more stem loops or optimized secondary structures. In particular embodiments, the conserved nucleotide sequence has a minimum length of 16 nts and a single stem loop. In further embodiments the conserved nucleotide sequence has a length longer than 16 nts, preferably more than 17 nts, and has more than one stem loops or optimized secondary structures. In particular embodiments, the spacer sequence may be linked to all or part of the natural conserved nucleotide sequence. In particular embodiments, certain aspects of the ωRNA architecture can be modified, for example by addition, subtraction, or substitution of features, whereas certain other aspects of architecture are maintained. Preferred locations for engineered ωRNA modifications, including but not limited to insertions, deletions, and substitutions include Nucleic acid component termini and regions of the ωRNA that are exposed when complexed with Fanzor polypeptide and/or target.

[0246] In one embodiment, the ωRNA forms a stemloop with a separate non-covalently linked sequence, which can be DNA or RNA. In particular embodiments, the sequences forming the Nucleic acid component molecule are first synthesized using the standard phosphoramidite synthetic protocol (Herdewijn, P., ed., Methods in Molecular Biology Col 288, Oligonucleotide Synthesis: Methods and Applications, Humana Press, New Jersey (2012)). In one embodiment, these sequences can be functionalized to contain an appropriate functional group for ligation using the standard protocol known in the art (Hermanson, G. T., Bioconjugate Techniques, Academic Press (2013)). Examples of functional groups include, but are not limited to, hydroxyl, amine, carboxylic acid, carboxylic acid halide, carboxylic acid active ester, aldehyde, carbonyl, chlorocarbonyl, imidazolylcarbonyl, hydrozide, semicarbazide, thio semicarbazide, thiol, maleimide, haloalkyl, sufonyl, ally, propargyl, diene, alkyne, and azide. Once this sequence is functionalized, a covalent chemical bond or linkage can be formed between this sequence and the conserved nucleotide sequence. Examples of chemical bonds include, but are not limited to, those based on carbamates, ethers, esters, amides, imines, amidines, aminotrizines, hydrozone, disulfides, thioethers, thioesters, phosphorothioates, phosphorodithioates, sulfonamides, sulfonates, fulfones, sulfoxides, ureas, thioureas, hydrazide, oxime, triazole, photolabile linkages, C—C bond forming groups such as Diels-Alder cyclo-addition pairs or ring-closing metathesis pairs, and Michael reaction pairs.

[0247] In one embodiment, these stem-loop forming sequences can be chemically synthesized. In one embodiment, the chemical synthesis uses automated, solid-phase oligonucleotide synthesis machines with 2′-acetoxyethyl orthoester (2′-ACE) (Scaringe et al., J. Am. Chem. Soc. (1998) 120: 11820-11821; Scaringe, Methods Enzymol. (2000) 317: 3-18) or 2′-thionocarbamate (2′-TC) chemistry (Dellinger et al., J. Am. Chem. Soc. (2011) 133: 11540-11546; Hendel et al., Nat. Biotechnol. (2015) 33:985-989).

[0248] The repeat:anti repeat duplex will be apparent from the secondary structure of the nucleic acid component. It may be typically a first complimentary stretch after (in 5′ to 3′ direction) the poly U tract and before the tetraloop; and a second complimentary stretch after (in 5′ to 3′ direction) the tetraloop and before the poly A tract. The first complimentary stretch (the “repeat”) is complimentary to the second complimentary stretch (the “anti-repeat”). As such, they Watson-Crick base pair to form a duplex of dsRNA when folded back on one another. As such, the anti-repeat sequence is the complimentary sequence of the repeat and in terms to A-U or C-G base pairing, but also in terms of the fact that the anti-repeat is in the reverse orientation due to the tetraloop.

[0249] In an embodiment of the invention, modification of nucleic acid component molecule architecture comprises replacing bases in stemloop 2. For example, in one embodiment, “actt” (“acuu” in RNA) and “aagt” (“aagu” in RNA) bases in stemloop2 are replaced with “cgcc” and “gcgg”. In one embodiment, “actt” and “aagt” bases in stemloop2 are replaced with complimentary GC-rich regions of 4 nucleotides. In one embodiment, the complimentary GC-rich regions of 4 nucleotides are “cgcc” and “gcgg” (both in 5′ to 3′ direction). In one embodiment, the complimentary GC-rich regions of 4 nucleotides are “gcgg” and “cgcc” (both in 5′ to 3′ direction). Other combination of C and G in the complimentary GC-rich regions of 4 nucleotides will be apparent including CCCC and GGGG.

[0250] In one aspect, the stemloop 2, e.g., “ACTTgtttAAGT” (SEQ ID NO: 553) can be replaced by any “XXXXgtttYYYY”, e.g., where XXXX and YYYY represent any complementary sets of nucleotides that together will base pair to each other to create a stem.

[0251] As used herein, the term “spacer” may also be referred to as a “guide sequence.” In one embodiment, the degree of complementarity of the spacer sequence to a given target sequence, when optimally aligned using a suitable alignment algorithm, is about or more than 50%, 60%, 75%, 80%, 85%, 90%, 95%, 97.5%, 99%, or more. In certain example embodiments, the Nucleic acid component molecule comprises a spacer sequence that may be designed to have at least one mismatch with the target sequence, such that a RNA duplex formed between the sequence and the target sequence. Accordingly, the degree of complementarity is less than 99%. For instance, where the spacer sequence consists of 24 nucleotides, the degree of complementarity is more particularly about 96% or less. In particular embodiments, the spacer sequence is designed to have a stretch of two or more adjacent mismatching nucleotides, such that the degree of complementarity over the entire sequence is further reduced. For instance, where the spacer sequence consists of 24 nucleotides, the degree of complementarity is more particularly about 96% or less, more particularly, about 92% or less, more particularly about 88% or less, more particularly about 84% or less, more particularly about 80% or less, more particularly about 76% or less, more particularly about 72% or less, depending on whether the stretch of two or more mismatching nucleotides encompasses 2, 3, 4, 5, 6 or 7 nucleotides, etc. In one embodiment, aside from the stretch of one or more mismatching nucleotides, the degree of complementarity, when optimally aligned using a suitable alignment algorithm, is about or more than about 50%, 60%, 75%, 80%, 85%, 90%, 95%, 97.5%, 99%, or more. Optimal alignment may be determined with the use of any suitable algorithm for aligning sequences, non-limiting example of which include the Smith-Waterman algorithm, the Needleman-Wunsch algorithm, algorithms based on the Burrows-Wheeler Transform (e.g., the Burrows Wheeler Aligner), ClustalW, Clustal X, BLAT, Novoalign (Novocraft Technologies; available at www.novocraft.com), ELAND (Illumina, San Diego, CA), SOAP (available at soap.genomics.org.cn), and Maq (available at maq.sourceforge.net). The ability of a sequence (within a nucleic acid-targeting Nucleic acid component molecule) to direct sequence-specific binding of a nucleic acid-targeting complex to a target nucleic acid sequence may be assessed by any suitable assay. For example, the components of a Nucleic acid component system sufficient to form a nucleic acid-targeting complex, including the Nucleic acid component molecule sequence to be tested, may be provided to a host cell having the corresponding target nucleic acid sequence, such as by transfection with vectors encoding the components of the nucleic acid-targeting complex, followed by an assessment of preferential targeting (e.g., cleavage) within the target nucleic acid sequence, such as by Surveyor assay as described herein. Similarly, cleavage of a target nucleic acid sequence (or a sequence in the vicinity thereof) may be evaluated in a test tube by providing the target nucleic acid sequence, components of a nucleic acid-targeting complex, including the sequence to be tested and a control sequence different from the test ωRNA, and comparing binding or rate of cleavage at or in the vicinity of the target sequence between the test and control ωRNA molecule sequence reactions. Other assays are possible, and will occur to those skilled in the art. A spacer sequence, and hence a nucleic acid-targeting ωRNA may be selected to target any target nucleic acid sequence.

[0252] A ωRNA, and hence a nucleic acid-targeting spacer, may be selected to modify the target specific to of the Omega complex to target target nucleic acid sequences other than those sequences naturally targeted by the Omega complex. The target sequence may be DNA. The target sequence may be any RNA sequence. In one embodiment, the target sequence may be a sequence within a RNA molecule selected from the group consisting of messenger RNA (mRNA), pre-mRNA, ribosomal RNA (rRNA), transfer RNA (tRNA), micro-RNA (miRNA), small interfering RNA (siRNA), small nuclear RNA (snRNA), small nucleolar RNA (snoRNA), double stranded RNA (dsRNA), non-coding RNA (ncRNA), long non-coding RNA (lncRNA), and small cytoplasmatic RNA (scRNA). In some preferred embodiments, the target sequence may be a sequence within a RNA molecule selected from the group consisting of mRNA, pre-mRNA, and rRNA. In some preferred embodiments, the target sequence may be a sequence within an RNA molecule selected from the group consisting of ncRNA, and lncRNA. In some more preferred embodiments, the target sequence may be a sequence within an mRNA molecule or a pre-mRNA molecule.

[0253] In one embodiment, the ωRNA forms a stem loop with a separate non-covalently linked sequence, which can be DNA or RNA. In particular embodiments, the sequences forming the Nucleic acid component are first synthesized using the standard phosphoramidite synthetic protocol (Herdewijn, P., ed., Methods in Molecular Biology Col 288, Oligonucleotide Synthesis: Methods and Applications, Humana Press, New Jersey (2012)). In one embodiment, these sequences can be functionalized to contain an appropriate functional group for ligation using the standard protocol known in the art (Hermanson, G. T., Bioconjugate Techniques, Academic Press (2013)). Examples of functional groups include, but are not limited to, hydroxyl, amine, carboxylic acid, carboxylic acid halide, carboxylic acid active ester, aldehyde, carbonyl, chlorocarbonyl, imidazolylcarbonyl, hydrazide, semicarbazide, thio semicarbazide, thiol, maleimide, haloalkyl, sufonyl, ally, propargyl, diene, alkyne, and azide. Once this sequence is functionalized, a covalent chemical bond or linkage can be formed between this sequence and the conserved nucleotide sequence. Examples of chemical bonds include, but are not limited to, those based on carbamates, ethers, esters, amides, imines, amidines, aminotrizines, hydrozone, disulfides, thioethers, thioesters, phosphorothioates, phosphorodithioates, sulfonamides, sulfonates, sulfones, sulfoxides, ureas, thioureas, hydrazide, oxime, triazole, photolabile linkages, C—C bond forming groups such as Diels-Alder cyclo-addition pairs or ring-closing metathesis pairs, and Michael reaction pairs.

### ωRNA Chemical Modifications

[0254] In one embodiment, these stem-loop forming sequences can be chemically synthesized. In one embodiment, the chemical synthesis uses automated, solid-phase oligonucleotide synthesis machines with 2′-acetoxyethyl orthoester (2′-ACE) (Scaringe et al., J. Am. Chem. Soc. (1998) 120: 11820-11821; Scaringe, Methods Enzymol. (2000) 317: 3-18) or 2′-thionocarbamate (2′-TC) chemistry (Dellinger et al., J. Am. Chem. Soc. (2011) 133: 11540-11546; Hendel et al., Nat. Biotechnol. (2015) 33:985-989).

[0255] In one embodiment, the nucleic acid component molecule comprises non-naturally occurring nucleic acids and/or non-naturally occurring nucleotides and/or nucleotide analogs, and/or chemically modifications. Preferably, these non-naturally occurring nucleic acids and non-naturally occurring nucleotides are located outside the Nucleic acid component sequence. Non-naturally occurring nucleic acids can include, for example, mixtures of naturally and non-naturally occurring nucleotides. Non-naturally occurring nucleotides and/or nucleotide analogs may be modified at the ribose, phosphate, and/or base moiety. In an embodiment of the invention, a Nucleic acid component nucleic acid comprises ribonucleotides and non-ribonucleotides. In one such embodiment, a Nucleic acid component comprises one or more ribonucleotides and one or more deoxyribonucleotides. In an embodiment of the invention, the Nucleic acid component comprises one or more non-naturally occurring nucleotide or nucleotide analog such as a nucleotide with phosphorothioate linkage, a locked nucleic acid (LNA) nucleotide comprising a methylene bridge between the 2′ and 4′ carbons of the ribose ring, or bridged nucleic acids (BNA). Other examples of modified nucleotides include 2′-O-methyl analogs, 2′-deoxy analogs, or 2′-fluoro analogs. Further examples of modified bases include, but are not limited to, 2-aminopurine, 5-bromo-uridine, pseudouridine, inosine, 7-methylguanosine. Examples of Nucleic acid component chemical modifications include, without limitation, incorporation of 2′-O-methyl (M), 2′-O-methyl 3′phosphorothioate (MS), S-constrained ethyl(cEt), or 2′-O-methyl 3′thioPACE (MSP) at one or more terminal nucleotides. Such chemically modified Nucleic acid components can comprise increased stability and increased activity as compared to unmodified Nucleic acid components, though on-target vs. off-target specificity is not predictable. (See, Hendel, 2015, Nat Biotechnol. 33(9):985-9, doi: 10.1038/nbt.3290, published online 29 Jun. 2015 Ragdarm et al., 0215, PNAS, E7110-E7111; Allerson et al., J. Med. Chem. 2005, 48:901-904; Bramsen et al., Front. Genet., 2012, 3:154; Deng et al., PNAS, 2015, 112:11870-11875; Sharma et al., MedChemComm., 2014, 5:1454-1471; Hendel et al., Nat. Biotechnol. (2015) 33(9): 985-989; Li et al., Nature Biomedical Engineering, 2017, 1, 0066 DOI:10.1038/s41551-017-0066). In one embodiment, the 5′ and/or 3′ end of a Nucleic acid component is modified by a variety of functional moieties including fluorescent dyes, polyethylene glycol, cholesterol, proteins, or detection tags. (See Kelly et al., 2016, J. Biotech. 233:74-83). In one embodiment, a Nucleic acid component comprises ribonucleotides in a region that binds to a target sequence and one or more deoxyribonucleotides and/or nucleotide analogs in a region that binds to the Fanzor polypeptide. In an embodiment, deoxyribonucleotides and/or nucleotide analogs are incorporated in engineered Nucleic acid component structures. In one embodiment, 3-5 nucleotides at either the 3′ or the 5′ end of a Nucleic acid component is chemically modified. In one embodiment, only minor modifications are introduced in the seed region, such as 2′-F modifications. In one embodiment, 2′-F modification is introduced at the 3′ end of a Nucleic acid component. In one embodiment, three to five nucleotides at the 5′ and/or the 3′ end of the Nucleic acid component are chemically modified with 2′-O-methyl (M), 2′-O-methyl 3′ phosphorothioate (MS), S-constrained ethyl(cEt), or 2′-O-methyl 3′ thioPACE (MSP). Such modification can enhance genome editing efficiency (see Hendel et al., Nat. Biotechnol. (2015) 33(9): 985-989). In one embodiment, all of the phosphodiester bonds of a Nucleic acid component are substituted with phosphorothioates (PS) for enhancing levels of gene disruption. In one embodiment, more than five nucleotides at the 5′ and/or the 3′ end of the Nucleic acid component are chemically modified with 2′-O-Me, 2′-F or S-constrained ethyl(cEt). Such chemically modified Nucleic acid component can mediate enhanced levels of gene disruption (see Ragdarm et al., 0215, PNAS, E7110-E7111). In an embodiment of the invention, a Nucleic acid component is modified to comprise a chemical moiety at its 3′ and/or 5′ end. Such moieties include, but are not limited to amine, azide, alkyne, thio, dibenzocyclooctyne (DBCO), or Rhodamine. In certain embodiment, the chemical moiety is conjugated to the Nucleic acid component by a linker, such as an alkyl chain. In one embodiment, the chemical moiety of the modified Nucleic acid component can be used to attach the Nucleic acid component to another molecule, such as DNA, RNA, protein, or nanoparticles. Such chemically modified Nucleic acid component can be used to identify or enrich cells generically edited by a Fanzor polypeptide and related systems (see e.g., Lee et al., eLife, 2017, 6:e25312, DOI:10.7554).

[0256] In some embodiments, a sequence can be added to the ωRNA to increase stability and/or otherwise influence 2D or 3D structure, and/or interactions with the Fanzor polypeptide. In some embodiments, such a sequence is added to the 5′ end, 3′ end, or both of the ωRNA or nucleic acid component. In some embodiments, such a sequence is added within the scaffold of an ωRNA or nucleic acid component. In some embodiments, the sequence is a hepatitis delta virus sequence. In some embodiments, the sequence is not a hepatitis delta virus sequence.

[0257] In a particular embodiment, the conserved nucleotide sequence may be modified to comprise one or more protein-binding RNA aptamers. In a particular embodiment, one or more aptamers may be included such as part of optimized secondary structure. Such aptamers may be capable of binding a bacteriophage coat protein as detailed further herein.

[0258] In embodiments, the Fanzor polypeptide utilizes the Nucleic acid component scaffold comprising a polynucleotide sequence that facilitates the interaction with the Fanzor protein, allowing for sequence specific binding and/or targeting of the Nucleic acid component molecule with the target polynucleotide. Chemical synthesis of the Nucleic acid component scaffold is contemplated, using covalent linkage using various bioconjugation reactions, loops, bridges, and non-nucleotide links via modifications of sugar, inter-nucleotide phosphodiester bonds, purine and pyrimidine residues. Sletten et al., Angew. Chem. Int. Ed. (2009) 48:6974-6998; Manoharan, M. Curr. Opin. Chem. Biol. (2004) 8: 570-9; Behlke et al., Oligonucleotides (2008) 18: 305-19; Watts, et al., Drug. Discov. Today (2008) 13: 842-55; Shukla, et al., ChemMedChem (2010) 5: 328-49; chemical synthesis using automated, solid-phase oligonucleotide synthesis machines with 2′-acetoxyethyl orthoester (2′-ACE) (Scaringe et al., J. Am. Chem. Soc. (1998) 120: 11820-11821; Scaringe, Methods Enzymol. (2000) 317: 3-18) or 2′-thionocarbamate (2′-TC) chemistry (Dellinger et al., J. Am. Chem. Soc. (2011) 133: 11540-11546; Hendel et al., Nat. Biotechnol. (2015) 33:985-989).

[0259] In certain example embodiments, the scaffold and spacer may be designed as two separate molecules that can hybridize or covalently joined into a single molecule. Covalent linkage can be via a linker (e.g., a non-nucleotide loop) that comprises a moiety such as spacers, attachments, bioconjugates, chromophores, reporter groups, dye labeled RNAs, and non-naturally occurring nucleotide analogues. More specifically, suitable spacers for purposes of this invention include, but are not limited to, polyethers (e.g., polyethylene glycols, polyalcohols, polypropylene glycol or mixtures of ethylene and propylene glycols), polyamines group (e.g., spennine, spermidine and polymeric derivatives thereof), polyesters (e.g., poly(ethyl acrylate)), polyphosphodiesters, alkylenes, and combinations thereof. Suitable attachments include any moiety that can be added to the linker to add additional properties to the linker, such as but not limited to, fluorescent labels. Suitable bioconjugates include, but are not limited to, peptides, glycosides, lipids, cholesterol, phospholipids, diacyl glycerols and dialkyl glycerols, fatty acids, hydrocarbons, enzyme substrates, steroids, biotin, digoxigenin, carbohydrates, polysaccharides. Suitable chromophores, reporter groups, and dye-labeled RNAs include, but are not limited to, fluorescent dyes such as fluorescein and rhodamine, chemiluminescent, electrochemiluminescent, and bioluminescent marker compounds. The design of example linkers conjugating two Nucleic acid components are also described in WO 2004/015075.

[0260] The linker (e.g., a non-nucleotide loop) can be of any length. In one embodiment, the linker has a length equivalent to about 0-16 nucleotides. In one embodiment, the linker has a length equivalent to about 0-8 nucleotides. In one embodiment, the linker has a length equivalent to about 0-4 nucleotides. In one embodiment, the linker has a length equivalent to about 2 nucleotides. Example linker design is also described in International Patent Publication No. WO 2011/008730.

### Escorted Nucleic Acid Components

[0261] In particular embodiments, the compositions or complexes have one or more nucleic acid component molecules with a functional structure designed to improve or otherwise modify a nucleic acid component molecule structure, architecture, stability, genetic expression, delivery, transport or any combination thereof.

[0262] In some embodiments, such a structure can include an aptamer. Aptamers are biomolecules that can be designed or selected to bind tightly to other ligands, for example using a technique called systematic evolution of ligands by exponential enrichment (SELEX; Tuerk C, Gold L: “Systematic evolution of ligands by exponential enrichment: RNA ligands to bacteriophage T4 DNA polymerase.” Science 1990, 249:505-510). Nucleic acid aptamers can for example be selected from pools of random-sequence oligonucleotides, with high binding affinities and specificities for a wide range of biomedically relevant targets, suggesting a wide range of therapeutic utilities for aptamers (Keefe, Anthony D., Supriya Pai, and Andrew Ellington. “Aptamers as therapeutics.” Nature Reviews Drug Discovery 9.7 (2010): 537-550). These characteristics also suggest a wide range of uses for aptamers as drug delivery vehicles (Levy-Nissenbaum, Etgar, et al. “Nanotechnology and aptamers: applications in drug delivery.” Trends in biotechnology 26.8 (2008): 442-449; and Hicke B J, Stephens A W. “Escort aptamers: a delivery service for diagnosis and therapy.” J Clin Invest 2000, 106:923-928.). Aptamers may also be constructed that function as molecular switches, responding to a que by changing properties, such as RNA aptamers that bind fluorophores to mimic the activity of green fluorescent protein (Paige, Jeremy S., Karen Y. Wu, and Samie R. Jaffrey. “RNA mimics of green fluorescent protein.” Science 333.6042 (2011): 642-646). It has also been suggested that aptamers may be used as components of targeted siRNA therapeutic delivery systems, for example targeting cell surface proteins (Zhou, Jiehua, and John J. Rossi. “Aptamer-targeted cell-specific RNA interference.” Silence 1.1 (2010): 4).

[0263] Accordingly, in particular embodiments, the nucleic acid component molecule is modified, e.g., by one or more aptamer(s) designed to improve nucleic acid component molecule delivery, including delivery across the cellular membrane, to intracellular compartments, or into the nucleus. Such a structure can include, either in addition to the one or more aptamer(s) or without such one or more aptamer(s), moiety(ies) so as to render the nucleic acid component molecule deliverable, inducible or responsive to a selected effector. In some embodiments, the nucleic acid component molecule is responsive to a one or more particular conditions, such as normal or pathological physiological conditions, including without limitation pH, hypoxia, 02 concentration, temperature, protein concentration, enzymatic concentration, lipid structure, light exposure, mechanical disruption (e.g., ultrasound waves), magnetic fields, electric fields, electromagnetic radiation, or any combination thereof. Such responsiveness can also be referred to as an inducible system.

[0264] In some example embodiments, light responsiveness of an inducible system may be achieved via the activation and binding of cryptochrome-2 and CIB1. Blue light stimulation induces an activating conformational change in cryptochrome-2, resulting in recruitment of its binding partner CIB1. This binding is fast and reversible, achieving saturation in <15 see following pulsed stimulation and returning to baseline <15 min after the end of stimulation. These rapid binding kinetics result in a system temporally bound only by the speed of transcription/translation and transcript/protein degradation, rather than uptake and clearance of inducing agents. Crytochrome-2 activation is also highly sensitive, allowing for the use of low light intensity stimulation and mitigating the risks of phototoxicity. Further, in a context such as the intact mammalian brain, variable light intensity may be used to control the size of a stimulated region, allowing for greater precision than vector delivery alone may offer.

[0265] Energy sources such as electromagnetic radiation, sound energy or thermal energy may induce the Nucleic acid component molecule. Advantageously, the electromagnetic radiation is a component of visible light. In a preferred embodiment, the light is a blue light with a wavelength of about 450 to about 495 nm. In an especially preferred embodiment, the wavelength is about 488 nm. In another preferred embodiment, the light stimulation is via pulses. The light power may range from about 0-9 mW/cm2. In a preferred embodiment, a stimulation paradigm of as low as 0.25 sec every 15 sec should result in maximal activation.

[0266] The chemical or energy sensitive Nucleic acid component may undergo a conformational change upon induction by the binding of a chemical source or by the energy allowing it act as a nucleic acid component and have the Fanzor polypeptide system or complex function. The invention can involve applying the chemical source or energy so as to have the nucleic acid component function and the Fanzor polypeptide system or complex function; and optionally further determining that the expression of the genomic locus is altered.

[0267] There are several different designs of this chemical inducible system: 1. ABI-PYL based system inducible by Abscisic Acid (ABA) (see, e.g., stke.sciencemag.org/cgi/content/abstract/sigtrans;4/164/rs2), 2. FKBP-FRB based system inducible by rapamycin (or related chemicals based on rapamycin) (see, e.g., nature.com/nmeth/journal/v2/n6/full/nmeth763.html), 3. GID1-GAI based system inducible by Gibberellin (GA) (see, e.g., nature.com/nchembio/journal/v8/n5/full/nchembio.922.html).

[0268] A chemical inducible system can be an estrogen receptor (ER) based system inducible by 4-hydroxytamoxifen (40HT) (see, e.g., pnas.org/content/104/3/1027.abstract). A mutated ligand-binding domain of the estrogen receptor called ERT2 translocates into the nucleus of cells upon binding of 4-hydroxytamoxifen. In further embodiments of the invention any naturally occurring or engineered derivative of any nuclear receptor, thyroid hormone receptor, retinoic acid receptor, estrogen receptor, estrogen-related receptor, glucocorticoid receptor, progesterone receptor, androgen receptor may be used in inducible systems analogous to the ER based inducible system.

[0269] Another inducible system is based on the design using Transient receptor potential (TRP) ion channel-based system inducible by energy, heat or radio-wave (see, e.g., sciencemag.org/content/336/6081/604). These TRP family proteins respond to different stimuli, including light and heat. When this protein is activated by light or heat, the ion channel will open and allow the entering of ions such as calcium into the plasma membrane. This influx of ions will bind to intracellular ion interacting partners linked to a polypeptide including the nucleic acid component and the other components of the Fanzor polypeptide/Nucleic acid component molecule complex or system, and the binding will induce the change of sub-cellular localization of the polypeptide, leading to the entire polypeptide entering the nucleus of cells. Once inside the nucleus, the nucleic acid component protein, and the other components of the Fanzor polypeptide/Nucleic acid component molecule complex will be active and modulating target gene expression in cells.

[0270] While light activation may be an advantageous embodiment, sometimes it may be disadvantageous especially for in vivo applications in which the light may not penetrate the skin or other organs. In this instance, other methods of energy activation are contemplated, in particular, electric field energy and/or ultrasound which have a similar effect.

[0271] Electric field energy is preferably administered substantially as described in the art, using one or more electric pulses of from about 1 Volt/cm to about 10 kVolts/cm under in vivo conditions. Instead of or in addition to the pulses, the electric field may be delivered in a continuous manner. The electric pulse may be applied for between 1 μs and 500 milliseconds, preferably between 1 μs and 100 milliseconds. The electric field may be applied continuously or in a pulsed manner for 5 about minutes.

[0272] As used herein, ‘electric field energy’ is the electrical energy to which a cell is exposed. Preferably the electric field has a strength of from about 1 Volt/cm to about 10 kVolts/cm or more under in vivo conditions (see WO97/49450).

[0273] As used herein, the term “electric field” includes one or more pulses at variable capacitance and voltage and including exponential and/or square wave and/or modulated wave and/or modulated square wave forms. References to electric fields and electricity should be taken to include reference the presence of an electric potential difference in the environment of a cell. Such an environment may be set up by way of static electricity, alternating current (AC), direct current (DC), etc., as known in the art. The electric field may be uniform, non-uniform or otherwise, and may vary in strength and/or direction in a time dependent manner.

[0274] Single or multiple applications of electric field, as well as single or multiple applications of ultrasound are also possible, in any order and in any combination. The ultrasound and/or the electric field may be delivered as single or multiple continuous applications, or as pulses (pulsatile delivery).

[0275] Electroporation has been used in both in vitro and in vivo procedures to introduce foreign material into living cells. With in vitro applications, a sample of live cells is first mixed with the agent of interest and placed between electrodes such as parallel plates. Then, the electrodes apply an electrical field to the cell/implant mixture. Examples of systems that perform in vitro electroporation include the Electro Cell Manipulator ECM600 product, and the Electro Square Porator T820, both made by the BTX Division of Genetronics, Inc (see U.S. Pat. No. 5,869,326).

[0276] The known electroporation techniques (both in vitro and in vivo) function by applying a brief high voltage pulse to electrodes positioned around the treatment region. The electric field generated between the electrodes causes the cell membranes to temporarily become porous, whereupon molecules of the agent of interest enter the cells. In known electroporation applications, this electric field comprises a single square wave pulse on the order of 1000 V/cm, of about 100 .mu.s duration. Such a pulse may be generated, for example, in known applications of the Electro Square Porator T820.

[0277] Preferably, the electric field has a strength of from about 1 V/cm to about 10 kV/cm under in vitro conditions. Thus, the electric field may have a strength of 1 V/cm, 2 V/cm, 3 V/cm, 4 V/cm, 5 V/cm, 6 V/cm, 7 V/cm, 8 V/cm, 9 V/cm, 10 V/cm, 20 V/cm, 50 V/cm, 100 V/cm, 200 V/cm, 300 V/cm, 400 V/cm, 500 V/cm, 600 V/cm, 700 V/cm, 800 V/cm, 900 V/cm, 1 kV/cm, 2 kV/cm, 5 kV/cm, 10 kV/cm, 20 kV/cm, 50 kV/cm or more. More preferably from about 0.5 kV/cm to about 4.0 kV/cm under in vitro conditions. Preferably the electric field has a strength of from about 1 V/cm to about 10 kV/cm under in vivo conditions. However, the electric field strengths may be lowered where the number of pulses delivered to the target site are increased. Thus, pulsatile delivery of electric fields at lower field strengths is envisaged.

[0278] Preferably, the application of the electric field is in the form of multiple pulses such as double pulses of the same strength and capacitance or sequential pulses of varying strength and/or capacitance. As used herein, the term “pulse” includes one or more electric pulses at variable capacitance and voltage and including exponential and/or square wave and/or modulated wave/square wave forms.

[0279] Preferably, the electric pulse is delivered as a waveform selected from an exponential wave form, a square wave form, a modulated wave form and a modulated square wave form.

[0280] A preferred embodiment employs direct current at low voltage. Thus, Applicants disclose the use of an electric field which is applied to the cell, tissue or tissue mass at a field strength of between 1V/cm and 20V/cm, for a period of 100 milliseconds or more, preferably 15 minutes or more.

[0281] Ultrasound is advantageously administered at a power level of from about 0.05 W/cm2 to about 100 W/cm2. Diagnostic or therapeutic ultrasound may be used, or combinations thereof.

[0282] As used herein, the term “ultrasound” refers to a form of energy which consists of mechanical vibrations the frequencies of which are so high they are above the range of human hearing. Lower frequency limit of the ultrasonic spectrum may generally be taken as about 20 kHz. Most diagnostic applications of ultrasound employ frequencies in the range 1 and 15 MHz’ (From Ultrasonics in Clinical Diagnosis, P. N. T. Wells, ed., 2nd. Edition, Publ. Churchill Livingstone [Edinburgh, London & NY, 1977]).

[0283] Ultrasound has been used in both diagnostic and therapeutic applications. When used as a diagnostic tool (“diagnostic ultrasound”), ultrasound is typically used in an energy density range of up to about 100 mW/cm2 (FDA recommendation), although energy densities of up to 750 mW/cm2 have been used. In physiotherapy, ultrasound is typically used as an energy source in a range up to about 3 to 4 W/cm2 (WHO recommendation). In other therapeutic applications, higher intensities of ultrasound may be employed, for example, HIFU at 100 W/cm up to 1 kW/cm2 (or even higher) for short periods of time. The term “ultrasound” as used in this specification is intended to encompass diagnostic, therapeutic and focused ultrasound.

[0284] Focused ultrasound (FUS) allows thermal energy to be delivered without an invasive probe (see Morocz et al 1998 Journal of Magnetic Resonance Imaging Vol. 8, No. 1, pp. 136-142. Another form of focused ultrasound is high intensity focused ultrasound (HIFU) which is reviewed by Moussatov et al in Ultrasonics (1998) Vol. 36, No. 8, pp. 893-900 and TranHuuHue et al in Acustica (1997) Vol. 83, No. 6, pp. 1103-1106.

[0285] Preferably, a combination of diagnostic ultrasound and a therapeutic ultrasound is employed. This combination is not intended to be limiting, however, and the skilled reader will appreciate that any variety of combinations of ultrasound may be used. Additionally, the energy density, frequency of ultrasound, and period of exposure may be varied.

[0286] Preferably, the exposure to an ultrasound energy source is at a power density of from about 0.05 to about 100 Wcm-2. Even more preferably, the exposure to an ultrasound energy source is at a power density of from about 1 to about 15 Wcm-2.

[0287] Preferably, the exposure to an ultrasound energy source is at a frequency of from about 0.015 to about 10.0 MHz. More preferably the exposure to an ultrasound energy source is at a frequency of from about 0.02 to about 5.0 MHz or about 6.0 MHz. Most preferably, the ultrasound is applied at a frequency of 3 MHz.

[0288] Preferably the exposure is for periods of from about 10 milliseconds to about 60 minutes. Preferably the exposure is for periods of from about 1 second to about 5 minutes. More preferably, the ultrasound is applied for about 2 minutes. Depending on the particular target cell to be disrupted, however, the exposure may be for a longer duration, for example, for 15 minutes.

[0289] Advantageously, the target tissue is exposed to an ultrasound energy source at an acoustic power density of from about 0.05 Wcm-2 to about 10 Wcm-2 with a frequency ranging from about 0.015 to about 10 MHz (see WO 98/52609). However, alternatives are also possible, for example, exposure to an ultrasound energy source at an acoustic power density of above 100 Wcm-2, but for reduced periods of time, for example, 1000 Wcm-2 for periods in the millisecond range or less.

[0290] Preferably, the application of the ultrasound is in the form of multiple pulses; thus, both continuous wave and pulsed wave (pulsatile delivery of ultrasound) may be employed in any combination. For example, continuous wave ultrasound may be applied, followed by pulsed wave ultrasound, or vice versa. This may be repeated any number of times, in any order and combination. The pulsed wave ultrasound may be applied against a background of continuous wave ultrasound, and any number of pulses may be used in any number of groups.

[0291] Preferably, the ultrasound may comprise pulsed wave ultrasound. In a highly preferred embodiment, the ultrasound is applied at a power density of 0.7 Wcm-2 or 1.25 Wcm-2 as a continuous wave. Higher power densities may be employed if pulsed wave ultrasound is used.

[0292] Use of ultrasound is advantageous as, like light, it may be focused accurately on a target. Moreover, ultrasound is advantageous as it may be focused more deeply into tissues unlike light. It is therefore better suited to whole-tissue penetration (such as but not limited to a lobe of the liver) or whole organ (such as but not limited to the entire liver or an entire muscle, such as the heart) therapy. Another important advantage is that ultrasound is a non-invasive stimulus which is used in a wide variety of diagnostic and therapeutic applications. By way of example, ultrasound is well known in medical imaging techniques and, additionally, in orthopedic therapy. Furthermore, instruments suitable for the application of ultrasound to a subject vertebrate are widely available and their use is well known in the art.

[0293] In particular embodiments, the Nucleic acid component molecule is modified by a secondary structure to increase the specificity of the Fanzor polypeptide and related system, and the secondary structure can protect against exonuclease activity and allow for 5′ additions to the nucleic acid component sequence also referred to herein as a protected nucleic acid component molecule.

[0294] In one aspect, the invention provides for hybridizing a “protector RNA” to a sequence of the nucleic acid component molecule, wherein the “protector RNA” is an RNA strand complementary to the 3′ end of the nucleic acid component molecule to thereby generate a partially double-stranded nucleic acid component. In an embodiment of the invention, protecting mismatched bases (i.e., the bases of the nucleic acid component molecule which do not form part of the nucleic acid component sequence) with a perfectly complementary protector sequence decreases the likelihood of target DNA binding to the mismatched base pairs at the 3′ end. In particular embodiments of the invention, additional sequences comprising an extended length may also be present within the nucleic acid component molecule such that the nucleic acid component comprises a protector sequence within the nucleic acid component molecule. This “protector sequence” ensures that the nucleic acid component molecule comprises a “protected sequence” in addition to an “exposed sequence” (comprising the part of the nucleic acid component sequence hybridizing to the target sequence). In particular embodiments, the nucleic acid component molecule is modified by the presence of the protector nucleic acid component to comprise a secondary structure such as a hairpin. Advantageously there are three or four to thirty or more, e.g., about 10 or more, contiguous base pairs having complementarity to the protected sequence, the nucleic acid component sequence or both. It is advantageous that the protected portion does not impede thermodynamics of the Fanzor polypeptide and related system interacting with its target. By providing such an extension including a partially double stranded nucleic acid component molecule, the nucleic acid component molecule is considered protected and results in improved specific binding of the Fanzor polypeptide/nucleic acid component molecule complex, while maintaining specific activity.

[0295] In particular embodiments, use is made of a truncated nucleic acid component (tru-nucleic acid component), i.e., a nucleic acid component molecule which comprises a nucleic acid component sequence which is truncated in length with respect to the canonical nucleic acid component sequence length. As described by Nowak et al. (Nucleic Acids Res (2016) 44 (20): 9555-9564), such nucleic acid component molecules may allow catalytically active Fanzor polypeptide to bind its target without cleaving the target DNA. In particular embodiments, a truncated nucleic acid component is used which allows the binding of the target but retains only nickase activity of the Fanzor polypeptide.

[0296] In one embodiment, conjugation of triantennary N-acetyl galactosamine (GalNAc) to oligonucleotide components may be used to improve delivery, for example delivery to select cell types, for example hepatocytes (see International Patent Publication No. WO 2014/118272 incorporated herein by reference; Nair, J K et al., 2014, Journal of the American Chemical Society 136 (49), 16958-16961). This is considered to be a sugar-based particle and further details on other particle delivery systems and/or formulations are provided herein. GalNAc can therefore be considered to be a particle in the sense of the other particles described herein, such that general uses and other considerations, for instance delivery of said particles, apply to GalNAc particles as well. A solution-phase conjugation strategy may for example be used to attach triantennary GalNAc clusters (mol. wt. ˜2000) activated as PFP (pentafluorophenyl) esters onto 5′-hexylamino modified oligonucleotides (5′-HA ASOs, mol. wt. ˜8000 Da; Ostergaard et al., Bioconjugate Chem., 2015, 26 (8), pp 1451-1455). Similarly, poly(acrylate) polymers have been described for in vivo nucleic acid delivery (see WO2013158141 incorporated herein by reference). In further alternative embodiments, pre-mixing Fanzor polypeptide nanoparticles (or protein complexes) with naturally occurring serum proteins may be used in order to improve delivery (Akinc A et al, 2010, Molecular Therapy vol. 18 no. 7, 1357-1364).

[0297] Screening techniques are available to identify delivery enhancers, for example by screening chemical libraries (Gilleron J. et al., 2015, Nucl. Acids Res. 43 (16): 7984-8001). Approaches have also been described for assessing the efficiency of delivery vehicles, such as lipid nanoparticles, which may be employed to identify effective delivery vehicles for components (see Sahay G. et al., 2013, Nature Biotechnology 31, 653-658).

### Target Adjacent Motifs (TAMs)

[0298] The Fanzor systems disclosed may recognize a target adjacent motif (TAM) in order to recognize and bind a target sequence on a target polynucleotide. In one embodiment, the nucleic acid-guided nucleases described herein (e.g., a Fanzor polypeptide and/or system) and related compositions do not contain a TAM requirement. The precise sequence and length requirements for the TAM will differ depending on the nucleic acid-guided nucleases used. In some examples, TAMs are typically 2-5 base pair sequences adjacent the protospacer (that is, the target sequence). In one example embodiment, the TAM is 3′ adjacent to the target polynucleotide. In another example embodiment, the TAM is 5′ adjacent to the target sequence of the target polynucleotide.

[0299] In one embodiment, the cleavage site is distant from the Target Adjacent Motif (TAM), e.g., the cleavage occurs after the nth nucleotide on the non-target strand and after the nucleotide on the targeted strand. In one embodiment, the cleavage site occurs after an identified nucleotide (counted from the TAM) on the non-target strand and after the further identified nucleotide (counted from the TAM) on the targeted strand. In one embodiment, a vector encodes a nucleic acid-targeting effector protein that may be mutated with respect to a corresponding wild-type enzyme such that the mutated nucleic acid-targeting effector protein lacks the ability to cleave one or both DNA and RNA strands of a target polynucleotide containing a target sequence.

[0300] In one example embodiment the TAM sequence is TCAG. In another example embodiment, the TAM sequence is TCAA. In some embodiments, the TAM sequence is or comprises TAA. In some embodiments, the TAM sequences are or comprise TTAA. In some embodiments, the TAM sequence is or comprises TAG. In some embodiments, the TAM sequence is 5′-NNTTAAN-3′. In some embodiments, the TAM sequence is 5′-NNTTAA-3′. In some embodiments, the TAM sequence is 5′-NNNTAG-3′. In some embodiments, the TAM sequence is 5′-(A)NCCG-3′. In some embodiments the TAM sequence is 5′-CATA-TAM sequence-3′. In some embodiments the TAM sequence is 5′-TTAAN-3′. In some embodiments, the TAM sequence is 5′-CCG-3′. TAM identification and specificity may be identified, for example, using the methods disclosed in the Examples section below.

### HDR Donor Templates

[0301] In one embodiment, the compositions and systems herein may further comprise one or more nucleic acid templates. In some cases, the nucleic acid template may comprise one or more polynucleotides. In certain cases, the nucleic acid template may comprise coding sequences for one or more polynucleotides. The nucleic acid template may be a DNA template.

[0302] The donor polynucleotide may be used for editing the target polynucleotide. In some cases, the donor polynucleotide comprises one or more mutations to be introduced into the target polynucleotide. Examples of such mutations include substitutions, deletions, insertions, or a combination thereof. The mutations may cause a shift in an open reading frame on the target polynucleotide. In some cases, the donor polynucleotide alters a stop codon in the target polynucleotide. For example, the donor polynucleotide may correct a premature stop codon. The correction may be achieved by deleting the stop codon or introduces one or more mutations to the stop codon. In other example embodiments, the donor polynucleotide addresses loss of function mutations, deletions, or translocations that may occur, for example, in certain disease contexts by inserting or restoring a functional copy of a gene, or functional fragment thereof, or a functional regulatory sequence or functional fragment of a regulatory sequence. A functional fragment refers to less than the entire copy of a gene by providing sufficient nucleotide sequence to restore the functionality of a wild type gene or non-coding regulatory sequence (e.g., sequences encoding long non-coding RNA). In certain example embodiments, the systems disclosed herein may be used to replace a single allele of a defective gene or defective fragment thereof. In another example embodiment, the systems disclosed herein may be used to replace both alleles of a defective gene or defective gene fragment. A “defective gene” or “defective gene fragment” is a gene or portion of a gene that when expressed fails to generate a functioning protein or non-coding RNA with functionality of a corresponding wild-type gene. In certain example embodiments, these defective genes may be associated with one or more disease phenotypes. In certain example embodiments, the defective gene or gene fragment is not replaced but the systems described herein are used to insert donor polynucleotides that encode gene or gene fragments that compensate for or override defective gene expression such that cell phenotypes associated with defective gene expression are eliminated or changed to a different or desired cellular phenotype.

[0303] In an embodiment of the invention, the donor polynucleotide may include, but not be limited to, genes or gene fragments, encoding proteins or RNA transcripts to be expressed, regulatory elements, repair templates, and the like. According to the invention, the donor polynucleotides may comprise left end and right end sequence elements that function with transposition components that mediate insertion.

[0304] In certain cases, the donor polynucleotide manipulates a splicing site on the target polynucleotide. In some examples, the donor polynucleotide disrupts a splicing site. The disruption may be achieved by inserting the polynucleotide to a splicing site and/or introducing one or more mutations to the splicing site. In certain examples, the donor polynucleotide may restore a splicing site. For example, the polynucleotide may comprise a splicing site sequence.

[0305] The donor polynucleotide to be inserted may has a size from 10 base pair or nucleotides to 50 kb in length, e.g., from 50 to 40k, from 100 and 30 k, from 100 to 10000, from 100 to 300, from 200 to 400, from 300 to 500, from 400 to 600, from 500 to 700, from 600 to 800, from 700 to 900, from 800 to 1000, from 900 to from 1100, from 1000 to 1200, from 1100 to 1300, from 1200 to 1400, from 1300 to 1500, from 1400 to 1600, from 1500 to 1700, from 600 to 1800, from 1700 to 1900, from 1800 to 2000 base pairs (bp) or nucleotides in length.

### Systems and Complexes

[0306] In one aspect, the present disclosure provides nucleic acid-targeting systems. Such systems may be used to target, modify, and otherwise manipulate a nucleic acid. In one embodiment, the systems comprise the Fanzor polypeptide and one or more ωRNAs. The Fanzor polypeptide may have nuclease activity, e.g., capable of cleaving DNA. In some embodiments the Fanzor polypeptide may, or be engineered to have nickase activity, e.g., capable of generating a single-strand break on a double-strand nucleic acid such as dsDNA or dsRNA.

[0307] In some examples, two or more of the components in a system herein may form a complex. For example, the components are separate molecules but interact with each other directly or indirectly. In certain two or more of the components in a system herein may be comprised in a fusion protein.

[0308] As used herein, “target sequence” refers to a sequence to which a ωRNA is designed to have complementarity, where hybridization between a target sequence and a ωRNA promotes the formation of a polynucleotide targeting complex. Full complementarity is not necessarily required, provided there is sufficient complementarity to cause hybridization and promote formation of a nucleic acid-targeting complex. A target sequence may comprise DNA polynucleotides. In one embodiment, a target sequence is located in the nucleus or cytoplasm of a cell. In one embodiment, the target sequence may be within an organelle of a eukaryotic cell, for example, mitochondrion or chloroplast. A sequence or template that may be used for recombination into the targeted locus comprising the target sequences is referred to as an “editing template” or “editing sequence”. In aspects of the invention, an exogenous template may be referred to as an editing template. In an aspect the recombination is homologous recombination.

[0309] In one embodiment, formation of a nucleic acid-targeting complex (comprising a guide RNA hybridized to a target sequence and complexed with one or more nucleic acid-targeting effector proteins) results in cleavage of one or both nucleic acid strands in or near (e.g., within 1, 2, 3, 4, 5, 6, 7, 8, 9, 10, 20, 50, or more base pairs from) the target sequence. In one embodiment, one or more vectors driving expression of one or more elements of a nucleic acid-targeting system are introduced into a host cell such that expression of the elements of the nucleic acid-targeting system direct formation of a nucleic acid-targeting complex at one or more target sites. For example, a Fanzor polypeptide and a ωRNA could each be operably linked to separate regulatory elements on separate vectors. Alternatively, two or more of the elements expressed from the same or different regulatory elements, may be combined in a single vector, with one or more additional vectors providing any components of the nucleic acid-targeting system not included in the first vector. Fanzor system elements combined in a single vector may be arranged in any suitable orientation, such as one element located 5′ with respect to (“upstream” of) or 3′ with respect to (“downstream” of) a second element. The coding sequence of one element may be located on the same or opposite strand of the coding sequence of a second element, and oriented in the same or opposite direction. In one embodiment, a single promoter drives expression of a transcript encoding a Fanzor and a ωRNA embedded within one or more intron sequences (e.g., each in a different intron, two or more in at least one intron, or all in a single intron). In one embodiment, the Fanzor polypeptide and ωRNAs are operably linked to and expressed from the same promoter.

[0310] The present disclosure encompasses computational methods and algorithms to predict new Fanzor polypeptides, identify the components, and new Fanzor systems therein. In some examples, a computational method of identifying novel Fanzor polypeptide loci analysis of the candidates may be conducted by searching metagenomics databases for additional homologs.

[0311] In one aspect the identifying all predicted protein coding genes is carried out by comparing the identified genes with Fanzor polypeptide specific profiles and annotating them according to NCBI Conserved Domain Database (CDD) which is a protein annotation resource that consists of a collection of well-annotated multiple sequence alignment models for ancient domains and full-length proteins. These are available as position-specific score matrices (PSSMs) for fast identification of conserved domains in protein sequences via RPS-BLAST. CDD content includes NCBI-curated domains, which use 3D-structure information to explicitly define domain boundaries and provide insights into sequence/structure/function relationships, as well as domain models imported from a number of external source databases (Pfam, SMART, COG, PRK, TIGRFAM).

[0312] In a further aspect, the case-by-case analysis is performed using PSI-BLAST (Position-Specific Iterative Basic Local Alignment Search Tool). PSI-BLAST derives a position-specific scoring matrix (PSSM) or profile from the multiple sequence alignment of sequences detected above a given score threshold using protein-protein BLAST. This PSSM is used to further search the database for new matches and is updated for subsequent iterations with these newly detected sequences. Thus, PSI-BLAST provides a means of detecting distant relationships between proteins.

[0313] In another aspect, the case-by-case analysis is performed using HHpred, a method for sequence database searching and structure prediction that is as easy to use as BLAST or PSI-BLAST and that is at the same time much more sensitive in finding remote homologs. In fact, HHpred's sensitivity is competitive with the most powerful servers for structure prediction currently available. HHpred is the first server that is based on the pairwise comparison of profile hidden Markov models (HMMs). Whereas most conventional sequence search methods search sequence databases such as UniProt or the NR, HHpred searches alignment databases, like Pfam or SMART. This greatly simplifies the list of hits to a number of sequence families instead of a clutter of single sequences. All major publicly available profile and alignment databases are available through HHpred. HHpred accepts a single query sequence or a multiple alignment as input. Within only a few minutes it returns the search results in an easy-to-read format similar to that of PSI-BLAST. Search options include local or global alignment and scoring secondary structure similarity. HHpred can produce pairwise query-template sequence alignments, merged query-template multiple alignments (e.g., for transitive searches), as well as 3D structural models calculated by the MODELLER software from HHpred alignments.

### Specialized Systems

[0314] In one embodiment, the system is a Fanzor-based system that is capable of performing a specialized function or activity. For example, the Fanzor protein may be fused, operably coupled to, or otherwise associated with one or more heterologous functionals domains. In certain example embodiments, the Fanzor protein may be a catalytically dead Fanzor protein and/or have nickase activity. A nickase is an Fanzor protein that cuts only one strand of a double stranded target. In such embodiments, the catalytically inactive Fanzor or nickase provide a sequence specific targeting functionality via the Nucleic acid component that delivers the functional domain to or proximate a target sequence.

[0315] It is also envisaged that the Fanzor complex as a whole may be associated with two or more functional domains. For example, there may be two or more functional domains associated with the Fanzor polypeptide, or there may be two or more functional domains associated with the nucleic acid component (via one or more adaptor proteins or aptamers), or there may be one or more functional domains associated with the Fanzor polypeptide and one or more functional domains associated with the nucleic acid component.

[0316] In one embodiment, one or more functional domains are associated with a Fanzor polypeptide via an adaptor protein, for example as used with the modified guides of Konnerman et al. (Nature 517, 583-588, 29 Jan. 2015). In one embodiment, the one or more functional domains is attached to the adaptor protein so that upon binding of the Fanzor polypeptide to the RNA molecule and target, the functional domain is in a spatial orientation allowing for the functional domain to function in its attributed function.

[0317] In one embodiment, one or more functional domains are associated with a dead nucleic acid component. In one embodiment, a complex with active Fanzor polypeptide directs gene regulation by a functional domain at on gene locus while a functional domain associated with the nucleic acid component directs DNA cleavage by the active Fanzor polypeptide at another. In one embodiment, nucleic acid components are selected to maximize selectivity of regulation for a gene locus of interest compared to off-target regulation. In one embodiment, nucleic acid components are selected to maximize target gene regulation and minimize target cleavage. Loops of the nucleic acid component may be extended, without colliding with the Fanzor polypeptide by the insertion of distinct loop(s) or distinct sequence(s) that may recruit adaptor proteins that can bind to the distinct loop(s) or distinct sequence(s). The adaptor proteins may include but are not limited to orthogonal polynucleotide-binding protein/aptamer combinations that exist within the diversity of bacteriophage coat proteins. A list of such coat proteins includes, but is not limited to: Qβ, F2, GA, fr, JP501, M12, R17, BZ13, JP34, JP500, KU1, M11, MX1, TW18, VK, SP, FI, ID2, NL95, TW19, AP205, φCb5, φCb8r, φCb12r, φCb23r, 7s and PRR1. These adaptor proteins or orthogonal RNA binding proteins can further recruit effector proteins or fusions which comprise one or more functional domains.

[0318] Example functional domains that may be fused to, operably coupled to, or otherwise associated with a Fanzor protein can be or include, but are not limited to a nuclear localization signal (NLS) domain, a nuclear export signal (NES) domain, a translational activation domain, a transcriptional activation domain (e.g. VP64, p65, MyoD1, HSF1, RTA, and SET7/9), a translation initiation domain, a transcriptional repression domain (e.g., a KRAB domain, NuE domain, NcoR domain, and a SID domain such as a SID4X domain), a nuclease domain (e.g., FokI), a histone modification domain (e.g., a histone acetyltransferase), a light inducible/controllable domain, a chemically inducible/controllable domain, a transposase domain, a homologous recombination machinery domain, a recombinase domain, a ligase domain, a topoisomerase domain, an integrase domain, and combinations thereof. Methods for generating catalytically dead Fanzor or a nickase Fanzor can be adapted from approaches in Cas9 proteins, see, for example, WO 2014/204725, Ran et al. Cell. 2013 Sep. 12; 154(6):1380-1389, known in the art and incorporated herein by reference Briefly, one or more mutations in the catalytic domain of the RuvC domain and/or the HNH domain of the Fanzor protein can be introduced that may reduce or abolish NHEJ activity. In an aspect, at least one mutation in the RuvC domain and at least one mutation in the HNH domain is provided.

[0319] In one embodiment, the functional domains can have one or more of the following activities: nucleobase deaminse activity, reverse transcriptase activity, retrotransposase activity, transposase activity, integrase activity, recombinase activity, topoisomerase activity, ligase activity, polymerase activity, helicase activity, methylase activity, demethylase activity, translation activation activity, translation initiation activity, translation repression activity, transcription activation activity, transcription repression activity, transcription release factor activity, histone modification activity, nuclease activity (e.g. VirD2), single-strand RNA cleavage activity, double-strand RNA cleavage activity, single-strand DNA cleavage activity, double-strand DNA cleavage activity, molecular switch activity, chemical inducibility, light inducibility, and nucleic acid binding activity. In one embodiment, the one or more functional domains may comprise epitope tags or reporters. Non-limiting examples of epitope tags include histidine (His) tags, V5 tags, FLAG tags, influenza hemagglutinin (HA) tags, Myc tags, VSV-G tags, and thioredoxin (Trx) tags. Examples of reporters include, but are not limited to, glutathione-S-transferase (GST), horseradish peroxidase (HRP), chloramphenicol acetyltransferase (CAT) beta-galactosidase, beta-glucuronidase, luciferase, green fluorescent protein (GFP), HcRed, DsRed, cyan fluorescent protein (CFP), yellow fluorescent protein (YFP), and auto-fluorescent proteins including blue fluorescent protein (BFP).

[0320] The one or more functional domain(s) may be positioned at, near, and/or in proximity to a terminus of the effector protein (e.g., a Fanzor protein). In embodiments having two or more functional domains, each of the two can be positioned at or near or in proximity to a terminus of the effector protein (e.g., a Fanzor protein). In one embodiment, such as those where the functional domain is operably coupled to the effector protein, the one or more functional domains can be tethered or linked via a suitable linker (including, but not limited to, GlySer linkers) to the effector protein (e.g., a Fanzor protein). When there is more than one functional domain, the functional domains can be same or different. In one embodiment, all the functional domains are the same. In one embodiment, all of the functional domains are different from each other. In one embodiment, at least two of the functional domains are different from each other. In one embodiment, at least two of the functional domains are the same as each other.

[0321] In one embodiment, histone modifying domains are also preferred. Exemplary histone modifying domains are discussed below. Transposase domains, HR (Homologous Recombination) machinery domains, recombinase domains, and/or integrase domains are also preferred as the present functional domains. In one embodiment, DNA integration activity includes HR machinery domains, integrase domains, recombinase domains and/or transposase domains.

[0322] In one embodiment, the DNA cleavage activity is due to a nuclease. In one embodiment, the nuclease comprises a Fok1 nuclease. See, “Dimeric CRISPR RNA-guided FokI nucleases for highly specific genome editing”, Shengdar Q. Tsai, Nicolas Wyvekens, Cyd Khayter, Jennifer A. Foden, Vishal Thapar, Deepak Reyon, Mathew J. Goodwin, Martin J. Aryee, J. Keith Joung Nature Biotechnology 32(6): 569-77 (2014), relates to dimeric RNA-guided FokI Nucleases that recognize extended sequences and can edit endogenous genes with high efficiencies in human cells.

[0323] Functional domains may be used to regulate transcription, e.g., transcriptional repression. Transcriptional repression is often mediated by chromatin modifying enzymes such as histone methyltransferases (HMTs) and deacetylases (HDACs). Repressive histone effector domains are known and an exemplary list is provided below. Proteins and functional truncations of small size to facilitate efficient viral packaging (for instance via AAV) are preferred. In general, however, the domains may include HDACs, histone methyltransferases (HMTs), and histone acetyltransferase (HAT) inhibitors, as well as HDAC and HMT recruiting proteins. The functional domain may be or include, In one embodiment, HDAC Effector Domains, HDAC Recruiter Effector Domains, Histone Methyltransferase (HMT) Effector Domains, Histone Methyltransferase (HMT) Recruiter Effector Domains, or Histone Acetyltransferase Inhibitor Effector Domains.

[0324] In one embodiment, the functional domain may be a Methyltransferase (HMT) Effector Domain. Preferred examples include NUE, vSET, EHMT2/G9A, SUV39H1, dim-5, KYP, SUVR4, SET4, SET1, SETD8, and TgSET8. NUE is exemplified in the present Examples and, although preferred, it is envisaged that others in the class will also be useful.

[0325] In one embodiment, the functional domain may be a Histone Methyltransferase (HMT) Recruiter Effector Domain. Preferred examples include Hp1a, PHF19, and NIPP1.

[0326] In one embodiment, the functional domain may be Histone Acetyltransferase Inhibitor Effector Domain. Preferred examples include SET/TAF-1β.

[0327] In some cases, the target endogenous (regulatory) control elements (such as enhancers and silencers) in addition to a promoter or promoter-proximal elements. Thus, the invention can also be used to target endogenous control elements (including enhancers and silencers) in addition to targeting of the promoter. These control elements can be located upstream and downstream of the transcriptional start site (TSS), starting from 200 bp from the TSS to 100 kb away. Targeting of known control elements can be used to activate or repress the gene of interest. In some cases, a single control element can influence the transcription of multiple target genes. Targeting of a single control element could therefore be used to control the transcription of multiple genes simultaneously.

[0328] Targeting of putative control elements on the other hand (e.g., by tiling the region of the putative control element as well as 200 bp up to 100 kB around the element) can be used as a means to verify such elements (by measuring the transcription of the gene of interest) or to detect novel control elements (e.g., by tiling 100 kb upstream and downstream of the TSS of the gene of interest). In addition, targeting of putative control elements can be useful in the context of understanding genetic causes of disease. Many mutations and common SNP variants associated with disease phenotypes are located outside coding regions. Targeting of such regions with either the activation or repression systems described herein can be followed by readout of transcription of either a) a set of putative targets (e.g., a set of genes located in closest proximity to the control element) or b) whole-transcriptome readout by e.g., RNAseq or microarray. This would allow for the identification of likely candidate genes involved in the disease phenotype. Such candidate genes could be useful as novel drug targets.

[0329] In one embodiment, the one or more functional domains comprise an acetyltransferase, preferably a histone acetyltransferase. These are useful in the field of epigenomics, for example in methods of interrogating the epigenome. Methods of interrogating the epigenome may include, for example, targeting epigenomic sequences. Targeting epigenomic sequences may include the Nucleic acid component being directed to an epigenomic target sequence. In one embodiment, epigenomic target sequence may include a promoter, silencer or an enhancer sequence. The functional domains may be acetyltransferases domains. Examples of acetyltransferases are known but may include, histone acetyltransferases. In one embodiment, the histone acetyltransferase may comprise the catalytic core of the human acetyltransferase p300 (Gerbasch & Reddy, Nature Biotech 6 Apr. 2015).

[0330] Further examples of specialized Fanzor systems are discussed in further detail below.

### Fanzor Base Editing Systems

[0331] The present disclosure also provides for base editing systems. In some example embodiments, the Fanzor system is a base editing system. In some embodiments, the Fanzor base-editing system is a DNA base editing system. In some embodiments, the Fanzor base-editing system is an RNA base editing system. In general, such a system may comprise a n deaminase (e.g., an adenosine deaminase or cytidine deaminase) associated or coupled with (e.g., fused or linked to) with a Fanzor polypeptide. The Fanzor polypeptide may be a catalytically inactive, or dead Fanzor polypeptide, dFanzor. In certain examples, the nucleobase deaminase is a mutated form of an adenosine deaminase. The mutated form of the adenosine deaminase may have both adenosine deaminase and cytidine deaminase activities.

[0332] In some examples, the present disclosure provides an engineered, non-naturally occurring composition comprising: a dFanzor, a nucleobase deaminase associated or coupled with or otherwise capable of forming a complex with the dFanzor, and a ωRNA capable of forming a complex with the Fanzor protein and directing site-specific binding at a target sequence at or adjacen to a single nucleotide or nucleotide base pair to be edited.

[0333] The Fanzor base editor can be a cytosine base editor (CBEs) and/or adenine base editor (ABEs). In general, CBEs convert a C•G base pair into a T•A base pair (Komor et al. 2016. Nature. 533:420-424; Nishida et al. 2016. Science. 353; and Li et al. Nat. Biotech. 36:324-327) and ABEs convert an A•T base pair to a G•C base pair, which is facilitated by the nucleobase daminase associated or coupled with the Fanzor polypeptide. Collectively, CBEs and ABEs can mediate all four possible transition mutations (C to T, A to G, T to C, and G to A). Rees and Liu. 2018. Nat. Rev. Genet. 19(12): 770-788, particularly at FIGS. 1b, 2a-2c, 3a-3f, and Table 1.

[0334] Generally, a Fanzor CBEs contain a cytidine deaminase that is fused or otherwise coupled to (e.g., linked or tethered) to a Fanzor protein and Fanzor ABEs contain an adenosine deaminase fused or otherwise coupled to (linked or tethered) to Fanzor protein. In some embodiments, a polynucleotide can be modified using a Fanzor base editing system.

[0335] In some embodiments, the nucleobase deaminase is fused or otherwise coupled to the N-terminus of a Fanzor polypeptide, the C-terminus of a Fanzor polypeptide, or both. In some embodiments, the deaminase is fused or otherwise coupled at an amino acid or between two contiguous amino acids of a Fanzor polypeptide between the N- and C-terminus of the Fanzor polypeptide.

[0336] In some examples, the base editing systems may comprise an intein-mediated trans-splicing system that enables in vivo delivery of a base editor, e.g., a split-intein cytidine base editors (CBE) or adenine base editor (ABE) engineered to trans-splice. Examples of such base editing systems include those described in Colin K. W. Lim et al., Treatment of a Mouse Model of ALS by In Vivo Base Editing, Mol Ther. 2020 Jan. 14. pii: S1525-0016(20)30011-3. doi: 10.1016/j.ymthe.2020.01.005; and Jonathan M. Levy et al., Cytosine and adenine base editing of the brain, liver, retina, heart and skeletal muscle of mice via adeno-associated viruses, Nature Biomedical Engineering volume 4, pages 97-110 (2020), which are incorporated by reference herein in their entireties and can be adapted for use with the Fanzor base editing systems of the present invention.

[0337] Examples of base editing systems include those described in International Patent Publication Nos. WO 2019/071048 (e.g. paragraphs [0933]-[0938]), WO 2019/084063 (e.g., paragraphs [0173]-[0186], [0323]-[0475], [0893]-[1094]), WO 2019/126716 (e.g., paragraphs [0290]-[0425], [1077]-[1084]), WO 2019/126709 (e.g., paragraphs [0294]-[0453]), WO 2019/126762 (e.g., paragraphs [0309]-[0438]), WO 2019/126774 (e.g., paragraphs [0511]-[0670]), Cox D B T, et al., RNA editing with CRISPR-Cas13, Science. 2017 Nov. 24; 358(6366):1019-1027; Abudayyeh 00, et al., A cytosine deaminase for programmable single-base RNA editing, Science 26 Jul. 2019: Vol. 365, Issue 6451, pp. 382-386; Gaudelli N M et al., Programmable base editing of A•T to G•C in genomic DNA without DNA cleavage, Nature volume 551, pages 464-471 (23 Nov. 2017); Komor A C, et al., Programmable editing of a target base in genomic DNA without double-stranded DNA cleavage. Nature. 2016 May 19; 533(7603):420-4; Jordan L. Doman et al., Evaluation and minimization of Cas9-independent off-target DNA editing by cytosine base editors, Nat Biotechnol (2020). doi.org/10.1038/s41587-020-0414-6; and Richter M F et al., Phage-assisted evolution of an adenine base editor with improved Cas domain compatibility and activity, Nat Biotechnol (2020). doi.org/10.1038/s41587-020-0453-z, which are incorporated by reference herein in their entireties and can be used to adapt to the Fanzor polypeptides and systems.

### Exemplary CBEs and Cytidine Deaminases

[0338] As previously discussed, Fanzor CBEs generally contain a cytidine deaminase. The term “cytidine deaminase” or “cytidine deaminase protein” or “cytidine deaminase activity” as used herein refers to a protein, a polypeptide, or one or more functional domain(s) of a protein or a polypeptide that is capable of catalyzing a hydrolytic deamination reaction that converts a cytosine (or an cytosine moiety of a molecule) to an uracil (or a uracil moiety of a molecule), as shown below. In some embodiments, the cytosine-containing molecule is a cytidine (C), and the uracil-containing molecule is a uridine (U). The cytosine-containing molecule can be deoxyribonucleic acid (DNA) or ribonucleic acid (RNA). In certain examples, a cytidine deaminase may be a cytidine deaminase acting on RNA (CDAR).

[0339] In some embodiments, the cytidine deaminase is derived from one or more metazoa species, including but not limited to, mammals, birds, frogs, squids, fish, flies and worms. In some embodiments, the cytidine deaminase is a human, primate, cow, dog rat or mouse cytidine deaminase. In some embodiments, the cytidine deaminase of the base editor system is a human, rat or lamprey cytidine deaminase. In some embodiments, cytidine deaminases that can be used in the base editing system of the present disclosure include, but are not limited to, members of the enzyme family known as apolipoprotein B mRNA-editing complex (APOBEC) family deaminase, an activation-induced deaminase (AID), or a cytidine deaminase 1 (CDA1). In particular embodiments, the deaminase in an APOBEC1 deaminase, an APOBEC2 deaminase, an APOBEC3A deaminase, an APOBEC3B deaminase, an APOBEC3C deaminase, and APOBEC3D deaminase, an APOBEC3E deaminase, an APOBEC3F deaminase an APOBEC3G deaminase, an APOBEC3H deaminase, or an APOBEC4 deaminase.

[0340] In some embodiments, the cytidine deaminase is an apolipoprotein B mRNA-editing complex (APOBEC) family deaminase, an activation-induced deaminase (AID), or a cytidine deaminase 1 (CDA1). In particular embodiments, the deaminase in an APOBEC1 deaminase, an APOBEC2 deaminase, an APOBEC3A deaminase, an APOBEC3B deaminase, an APOBEC3C deaminase, and APOBEC3D deaminase, an APOBEC3E deaminase, an APOBEC3F deaminase an APOBEC3G deaminase, an APOBEC3H deaminase, or an APOBEC4 deaminase. In some embodiments, the cytidine deaminase is a human APOBEC, including, but not limited to, hAPOBEC1 or hAPOBEC3. In some embodiments, the cytidine deaminase is a human AID.

[0341] In some embodiments, the cytidine deaminase comprises human APOBEC1 full protein (hAPOBEC1) or the deaminase domain thereof (hAPOBEC1-D) or a C-terminally truncated version thereof (hAPOBEC-T). In some embodiments, the cytidine deaminase is an APOBEC family member that is homologous to hAPOBEC1, hAPOBEC-D or hAPOBEC-T. In some embodiments, the cytidine deaminase comprises human AID1 full protein (hAID) or the deaminase domain thereof (hAID-D) or a C-terminally truncated version thereof (hAID-T). In some embodiments, the cytidine deaminase is an AID family member that is homologous to hAID, hAID-D or hAID-T. In some embodiments, the hAID-T is a hAID which is C-terminally truncated by about 20 amino acids.

[0342] In some embodiments, the cytidine deaminase is an APOBEC1 deaminase comprising one or more mutations corresponding to W90A, W90Y, R118A, H121R, H122R, R126A, R126E, or R132E in rat APOBEC1, or an APOBEC3G deaminase comprising one or more mutations corresponding to W285A, W285Y, R313A, D316R, D317R, R320A, R320E, or R326E in human APOBEC3G.

[0343] In some embodiments, the cytidine deaminase comprises the wild-type amino acid sequence of a cytosine deaminase. In some embodiments, the cytidine deaminase comprises one or more mutations in the cytosine deaminase sequence, such that the editing efficiency, and/or substrate editing preference of the cytosine deaminase is changed according to specific needs.

[0344] In some embodiments, the cytidine deaminase or engineered adenosine deaminase with cytidine deaminase activity is capable of targeting cytosine in a DNA single strand. In certain example embodiments the cytidine deaminase activity edits on a single strand present outside of the binding component e.g., bound Fanzor protein. In other example embodiments, the cytidine deaminase may edit at a localized bubble, such as a localized bubble formed by a mismatch at the target edit site but the guide sequence. In certain example embodiments, the cytidine deaminase contains mutations that help focus the area of activity (e.g., editing window) such as those disclosed in Kim et al., Nature Biotechnology (2017) 35(4):371-377 (doi: 10.1038/nbt.3803.

[0345] Certain mutations of APOBEC1 and APOBEC3 proteins have been described in Kim et al., Nature Biotechnology (2017) 35(4):371-377 (doi:10.1038/nbt.3803); and Harris et al. Mol. Cell (2002) 10:1247-1253, each of which is incorporated herein by reference in its entirety. In some embodiments, the APOBEC1 and/or APOBEC3 contained in a Fanzor base editing system contain one or more mutaions described in Kim et al., Nature Biotechnology (2017) 35(4):371-377 (doi:10.1038/nbt.3803); and Harris et al. Mol. Cell (2002) 10:1247-1253.

[0346] In some embodiments, the cytidine deaminase is an APOBEC1 deaminase comprising one or more mutations at amino acid positions corresponding to W90, R118, H121, H122, R126, or R132 in rat APOBEC1, or an APOBEC3G deaminase comprising one or more mutations at amino acid positions corresponding to W285, R313, D316, D317X, R320, or R326 in human APOBEC3G.

[0347] In some embodiments, the cytidine deaminase comprises a mutation at tryptophane⁹⁰ of the rat APOBEC1 amino acid sequence, or a corresponding position in a homologous APOBEC protein, such as tryptophane²⁸⁵ of APOBEC3G. In some embodiments, the tryptophane residue at position 90 is replaced by a tyrosine or phenylalanine residue (W90Y or W90F).

[0348] In some embodiments, the cytidine deaminase comprises a mutation at Arginine¹¹⁸ of the rat APOBEC1 amino acid sequence, or a corresponding position in a homologous APOBEC protein. In some embodiments, the arginine residue at position 118 is replaced by an alanine residue (R118A).

[0349] In some embodiments, the cytidine deaminase comprises a mutation at Histidine¹²¹ of the rat APOBEC1 amino acid sequence, or a corresponding position in a homologous APOBEC protein. In some embodiments, the histidine residue at position 121 is replaced by an arginine residue (H121R).

[0350] In some embodiments, the cytidine deaminase comprises a mutation at Histidine¹²² of the rat APOBEC1 amino acid sequence, or a corresponding position in a homologous APOBEC protein. In some embodiments, the histidine residue at position 122 is replaced by an arginine residue (H122R).

[0351] In some embodiments, the cytidine deaminase comprises a mutation at Arginine¹²⁶ of the rat APOBEC1 amino acid sequence, or a corresponding position in a homologous APOBEC protein, such as Arginine³²⁰ of APOBEC3G. In some embodiments, the arginine residue at position 126 is replaced by an alanine residue (R126A) or by a glutamic acid (R126E).

[0352] In some embodiments, the cytidine deaminase comprises a mutation at arginine¹³² of the APOBEC1 amino acid sequence, or a corresponding position in a homologous APOBEC protein. In some embodiments, the arginine residue at position 132 is replaced by a glutamic acid residue (R132E).

[0353] In some embodiments, to narrow the width of the editing window, the cytidine deaminase may comprise one or more of the mutations: W90Y, W90F, R126E and R132E, based on amino acid sequence positions of rat APOBEC1, and mutations in a homologous APOBEC protein corresponding to the above.

[0354] In some embodiments, to reduce editing efficiency, the cytidine deaminase may comprise one or more of the mutations: W90A, R118A, R132E, based on amino acid sequence positions of rat APOBEC1, and mutations in a homologous APOBEC protein corresponding to the above. In particular embodiments, it can be of interest to use a cytidine deaminase enzyme with reduced efficiency to reduce off-target effects.

[0355] In some embodiments, the cytidine deaminase is wild-type rat APOBEC1 (rAPOBEC1, or a catalytic domain thereof. In some embodiments, the cytidine deaminase comprises one or more mutations in the rAPOBEC1 sequence, such that the editing efficiency, and/or substrate editing preference of rAPOBEC1 is changed according to specific needs.

rAPOBEC1:
(SEQ ID NO: 554)
[sequence omitted]

[0356] In some embodiments, the cytidine deaminase is wild-type human APOBEC1 (hAPOBEC1) or a catalytic domain thereof. In some embodiments, the cytidine deaminase comprises one or more mutations in the hAPOBEC1 sequence, such that the editing efficiency, and/or substrate editing reference of hAPOBEC1 is changed according to specific needs.

APOBEC1:
(SEQ ID NO: 555)
MTSEKGPSTGDPTLRRRIEPWEFDVFYDPRELRKEACLLYEIKWGMSRK
IWRSSGKNTTNHVEVNFIKKFTSERDFHPSMSCSITWFLSWSPCWECSQ
AIREFLSRHPGVTLVIYVARLFWHMDQQNRQGLRDLVNSGVTIQIMRAS
EYYHCWRNFVNYPPGDEAHWPQYPPLWMMLYALELHCIILSLPPCLKIS
RRWQNHLTFFRLHLQNCHYQTIPPHILLATGLIHPSVAWR.

[0357] In some embodiments, the cytidine deaminase is wild-type human APOBEC3G (hAPOBEC3G) or a catalytic domain thereof. In some embodiments, the cytidine deaminase comprises one or more mutations in the hAPOBEC3G sequence, such that the editing efficiency, and/or substrate editing preference of hAPOBEC3G is changed according to specific needs.

hAPOBEC3G:
(SEQ ID NO: 556)
MELKYHPEMRFFHWFSKWRKLHRDQEYEVTWYISWSPCTKCTRDMATFL
AEDPKVTLTIFVARLYYFWDPDYQEALRSLCQKRDGPRATMKIMNYDEF
QHCWSKFVYSQRELFEPWNNLPKYYILLHIMLGEILRHSMDPPTFTFNF
NNEPWVRGRHETYLCYEVERMHNDTWVLLNQRRGFLCNQAPHKHGFLEG
RHAELCFLDVIPFWKLDLDQDYRVTCFTSWSPCFSCAQEMAKFISKNKH
VSLCIFTARIYDDQGRCQEGLRTLAEAGAKISIMTYSEFKHCWDTFVDH
QGCPFQPWDGLDEHSQDLSGRLRAILQNQEN

[0358] In some embodiments, the cytidine deaminase is wild-type Petromyzon marinus CDA1 (pmCDA1) or a catalytic domain thereof. In some embodiments, the cytidine deaminase comprises one or more mutations in the pmCDA1 sequence, such that the editing efficiency, and/or substrate editing preference of pmCDA1 is changed according to specific needs.

pmCDA1:
(SEQ ID NO: 557)
MTDAEYVRIHEKLDIYTFKKQFFNNKKSVSHRCYVLFELKRRGERRACF
WGYAVNKPQSGTERGIHAEIFSIRKVEEYLRDNPGQFTINWYSSWSPCA
DCAEKILEWYNQELRGNGHTLKIWACKLYYEKNARNQIGLWNLRDNGVG
LNVMVSEHYQCCRKIFIQSSHNQLNENRWLEKTLKRAEKRRSELSIMIQ
VKILHTTKSPAV

[0359] In some embodiments, the cytidine deaminase is wild-type human AID (hAID) or a catalytic domain thereof. In some embodiments, the cytidine deaminase comprises one or more mutations in the pmCDA1 sequence, such that the editing efficiency, and/or substrate editing preference of pmCDA1 is changed according to specific needs.

hAID:
(SEQ ID NO: 558)
MDSLLMNRRKFLYQFKNVRWAKGRRETYLCYVVKRRDSATSFSLDFGYL
RNKNGCHVELLFLRYISDWDLDPGRCYRVTWFTSWSPCYDCARHVADFL
RGNPYLSLRIFTARLYFCEDRKAEPEGLRRLHRAGVQIAIMTFKDYFYC
WNTFVENHERTFKAWEGLHENSVRLSRQLRRILLPLYEVDDLRDAFRTL
GLLD

[0360] In some embodiments, the cytidine deaminase is truncated version of hAID (hAID-DC) or a catalytic domain thereof. In some embodiments, the cytidine deaminase comprises one or more mutations in the hAID-DC sequence, such that the editing efficiency, and/or substrate editing preference of hAID-DC is changed according to specific needs.

hAID-DC:
(SEQ ID NO: 559)
MDSLLMNRRKFLYQFKNVRWAKGRRETYLCYVVKRRDSATSFSLDFGYL
RNKNGCHVELLFLRYISDWDLDPGRCYRVTWFTSWSPCYDCARHVADFL
RGNPNLSLRIFTARLYFCEDRKAEPEGLRRLHRAGVQIAIMTFKDYFYC
WNTFVENHERTFKAWEGLHENSVRLSRQLRRILL

[0361] Additional embodiments of the cytidine deaminase are disclosed in WO WO2017/070632, titled “Nucleobase Editor and Uses Thereof,” which is incorporated herein by reference in its entirety.

[0362] In some embodiments, the cytidine deaminase has an efficient deamination window that encloses the nucleotides susceptible to deamination editing. Accordingly, in some embodiments, the “editing window width” refers to the number of nucleotide positions at a given target site for which editing efficiency of the cytidine deaminase exceeds the half-maximal value for that target site. In some embodiments, the cytidine deaminase has an editing window width in the range of about 1 to about 6 nucleotides. In some embodiments, the editing window width of the cytidine deaminase is 1, 2, 3, 4, 5, or 6 nucleotides.

[0363] Not intended to be bound by theory, it is contemplated that in some embodiments, the length of a linker sequence (such as that coupling a deaminase and a Fanzor) can affect the editing window width. In some embodiments, the editing window width increases (e.g., from about 3 to about 6 nucleotides) as the linker length extends (e.g., from about 3 to about 21 amino acids). In a non-limiting example, a 16-residue linker offers an efficient deamination window of about 5 nucleotides. In some embodiments, the length of the guide molecule (e.g., omega RNA) affects the editing window width. In some embodiments, shortening the guide molecule (e.g., omega RNA) leads to a narrowed efficient deamination window of the cytidine deaminase.

[0364] In some embodiments, mutations to the cytidine deaminase affect the editing window width. In some embodiments, the cytidine deaminase component of a Fanzor CBE comprises one or more mutations that reduce the catalytic efficiency of the cytidine deaminase, such that the deaminase is prevented from deamination of multiple cytidines per DNA binding event. In some embodiments, tryptophan at residue 90 (W90) of APOBEC1 or a corresponding tryptophan residue in a homologous sequence is mutated. In some embodiments, the Fanzor polylpeptide is fused to or linked to an APOBEC1 mutant that comprises a W90Y or W90F mutation. In some embodiments, tryptophan at residue 285 (W285) of APOBEC3G, or a corresponding tryptophan residue in a homologous sequence is mutated. In some embodiments, the Fanzor polypeptide is fused to or linked to an APOBEC3G mutant that comprises a W285Y or W285F mutation.

[0365] In some embodiments, the cytidine deaminase component of a Fanzor base editor system comprises one or more mutations that reduce tolerance for non-optimal presentation of a cytidine to the deaminase active site. In some embodiments, the cytidine deaminase comprises one or more mutations that alter substrate binding activity of the deaminase active site. In some embodiments, the cytidine deaminase comprises one or more mutations that alter the conformation of DNA to be recognized and bound by the deaminase active site. In some embodiments, the cytidine deaminase comprises one or more mutations that alter the substrate accessibility to the deaminase active site. In some embodiments, arginine at residue 126 (R126) of APOBEC1 or a corresponding arginine residue in a homologous sequence is mutated. In some embodiments, the Fanzor protein is fused to or linked to an APOBEC1 that comprises a R126A or R126E mutation. In some embodiments, tryptophan at residue 320 (R320) of APOBEC3G, or a corresponding arginine residue in a homologous sequence is mutated. In some embodiments, the Fanzor protein is fused to or linked to an APOBEC3G mutant that comprises a R320A or R320E mutation. In some embodiments, arginine at residue 132 (R132) of APOBEC1 or a corresponding arginine residue in a homologous sequence is mutated. In some embodiments, the Fanzor protein is fused to or linked to an APOBEC1 mutant that comprises a R132E mutation.

[0366] In some embodiments, the APOBEC1 domain of the base editor system comprises one, two, or three mutations selected from W90Y, W90F, R126A, R126E, and R132E. In some embodiments, the APOBEC1 domain comprises double mutations of W90Y and R126E. In some embodiments, the APOBEC1 domain comprises double mutations of W90Y and R132E. In some embodiments, the APOBEC1 domain comprises double mutations of R126E and R132E. In some embodiments, the APOBEC1 domain comprises three mutations of W90Y, R126E and R132E.

[0367] Exemplary reference APOBEC sequences are SEQ ID NO: 195-200 of WO 2019/005886.

[0368] In some embodiments, one or more mutations in the cytidine deaminase as disclosed herein reduce the editing window width to about 2 nucleotides. In some embodiments, one or more mutations in the cytidine deaminase as disclosed herein reduce the editing window width to about 1 nucleotide. In some embodiments, one or more mutations in the cytidine deaminase as disclosed herein reduce the editing window width while only minimally or modestly affecting the editing efficiency of the enzyme. In some embodiments, one or more mutations in the cytidine deaminase as disclosed herein reduce the editing window width without reducing the editing efficiency of the enzyme. In some embodiments, one or more mutations in the cytidine deaminase as disclosed herein enable discrimination of neighboring cytidine nucleotides, which would be otherwise edited with similar efficiency by the cytidine deaminase.

[0369] In some embodiments, the Fanzor CBE comprises one or more copies of the UNG inhibitor, UGI, linked to the Fanzor protein similarly to CRISPR-Cas-based fourth generation Base editors (BE4s). In some embodiments, the FAnzor CBE comprises extended Fanzor-UGI linkers, which, without being bound by theory, can result in the improved product purity. In some embodiments, the Fanzor CBE further contains a Gam protein coupled to the N-terminus of BE4. See e.g., Komor et al., Sci. Adv. 3(8) doi: 10.1126/sciadv.aao4774 (2017).

[0370] Not intended to be bound by theory, it is contemplated that the cytidine deaminase domain functions to recognize and convert one or more target cytosine (C) residue(s) contained in a single-stranded bubble of n RNA duplex, DNA duplex, or RNA/DNA duplex into (an) uracil (U) residue (s). In some embodiments, the deaminase domain comprises an active center. In some embodiments, the active center comprises a zinc ion. In some embodiments, amino acid residues in or near the active center interact with one or more nucleotide(s) 5′ to a target cytosine residue. In some embodiments, amino acid residues in or near the active center interact with one or more nucleotide(s) 3′ to a target cytosine residue. In some embodiments, the cytidine deaminase protein recognizes and converts one or more target cytosine residue(s) in a single-stranded bubble of an RNA duplex, DNA duplex, or RNA/DNA duplex into uracil residues(s). In some embodiments, the cytidine deaminase protein recognizes a binding window on the single-stranded bubble of an RNA duplex, DNA duplex, or RNA/DNA duplex. In some embodiments, the binding window contains at least one target cytosine residue(s). In some embodiments, the binding window is in the range of about 3 bp to about 100 bp. In some embodiments, the binding window is in the range of about 5 bp to about 50 bp. In some embodiments, the binding window is in the range of about 10 bp to about 30 bp. In some embodiments, the binding window is about 1 bp, 2 bp, 3 bp, 5 bp, 7 bp, 10 bp, 15 bp, 20 bp, 25 bp, 30 bp, 40 bp, 45 bp, 50 bp, 55 bp, 60 bp, 65 bp, 70 bp, 75 bp, 80 bp, 85 bp, 90 bp, 95 bp, or 100 bp.

### Exemplary Fanzor ABEs and Adenosine Deaminases

[0371] As previously discussed, Fanzor ABEs generally contain an adenosine deaminase. See e.g., Guadellie et al., Nature 551:464-471 (2017). The term “adenosine deaminase” or “adenosine deaminase protein” as used herein refers to a protein, a polypeptide, or one or more functional domain(s) of a protein or a polypeptide that is capable of catalyzing a hydrolytic deamination reaction that converts an adenine (or an adenine moiety of a molecule) to a hypoxanthine (or a hypoxanthine moiety of a molecule), as shown below. In some embodiments, the adenine-containing molecule is an adenosine (A), and the hypoxanthine-containing molecule is an inosine (I). The adenine-containing molecule (such as a target polynucleotide) can be deoxyribonucleic acid (DNA) or ribonucleic acid (RNA).

[0372] Without limitation, described herein are exemplary ABEs and adenosine deaminases that can be included in BE system described herein. In some embodiments, the ABE comprises ABEmaxAW, SECURE-ABE, ABE7.10, ABE7.10^{F148A}, ABE8, ABE8(V106W), ABE8e, ABE8e (V106W), ABE8/ABE8e, ABE7.9, CP1041, CP1028, dCasMINI-ABE, CP-ABEs. In some embodiments, the adenosine deaminase is an ADAR.

[0373] In one aspect, the present disclosure provides an engineered adenosine deaminase, which can be coupled to (e.g., fused to or linked to) the Fanzor protein. The engineered adenosine deaminase may comprise one or more mutations herein. In one embodiment, the engineered adenosine deaminase has cytidine deaminase activity. In certain examples, the engineered adenosine deaminase has both cytidine deaminase activity and adenosine deaminase. In some cases, the modifications by base editors herein may be used for targeting post-translational signaling or catalysis. In one embodiment, compositions herein comprise nucleotide sequence comprising encoding sequences for one or more components of a base editing system. A base-editing system may comprise a deaminase (e.g., an adenosine deaminase or cytidine deaminase) fused with a Fanzor polypeptide or a variant thereof. In some cases, the target polynucleotide is edited at one or more bases to introduce a G→A or C→T mutation.

[0374] In some embodiments, the adenosine deaminases included in the Fanzor base editor are members of the enzyme family known as adenosine deaminases that act on RNA (ADARs), members of the enzyme family known as adenosine deaminases that act on tRNA (ADATs), and other adenosine deaminase domain-containing (ADAD) family members. According to the present disclosure, the adenosine deaminase is capable of targeting adenine in a RNA/DNA and RNA duplexes. Indeed, Zheng et al. (Nucleic Acids Res. 2017, 45(6): 3369-3377) demonstrate that ADARs can carry out adenosine to inosine editing reactions on RNA/DNA and RNA/RNA duplexes. In particular embodiments, the adenosine deaminase has been modified to increase its ability to edit DNA in an RNA/DNA heteroduplex (such as that formed between a guide molecule and target DNA and is also referred to herein as the “RNA/DNA hybrid”, “DNA/RNA hybrid” or “double-stranded substrate”) or in an RNA duplex as detailed herein. In particular embodiments, the effector domain comprises the adenosine deaminase acting on RNA (ADAR) family of enzymes. In some embodiments, the adenosine deaminase is derived from one or more metazoa species, including but not limited to, mammals, birds, frogs, squids, fish, flies and worms. In some embodiments, the adenosine deaminase is a human, squid or Drosophila adenosine deaminase. In particular embodiments, the adenosine deaminase protein or catalytic domain thereof is capable of deaminating adenosine or cytidine in RNA or is an RNA specific adenosine deaminase and/or is a bacterial, human, cephalopod, or Drosophila adenosine deaminase protein or catalytic domain thereof, preferably TadA, more preferably ADAR, optionally huADAR, optionally (hu)ADAR1 or (hu)ADAR2, preferably huADAR2 or catalytic domain thereof. In some embodiments, the adenosine deaminase is a human ADAR, including hADAR1, hADAR2, hADAR3. In some embodiments, the adenosine deaminase is a Caenorhabditis elegans ADAR protein, including ADR-1 and ADR-2. In some embodiments, the adenosine deaminase is a Drosophila ADAR protein, including dAdar. In some embodiments, the adenosine deaminase is a squid Loligo pealeii ADAR protein, including sqADAR2a and sqADAR2b. In some embodiments, the adenosine deaminase is a human ADAT protein. In some embodiments, the adenosine deaminase is a Drosophila ADAT protein. In some embodiments, the adenosine deaminase is a human ADAD protein, including TENR (hADAD1) and TENRL (hADAD2).

[0375] In some embodiments, the adenosine deaminase is a TadA protein such as E. coli TadA. See Kim et al., Biochemistry 45:6407-6416 (2006); Wolf et al., EMBO J. 21:3841-3851 (2002). In some embodiments, the adenosine deaminase is mouse ADA. See Grunebaum et al., Curr. Opin. Allergy Clin. Immunol. 13:630-638 (2013). In some embodiments, the adenosine deaminase is human ADAT2. See Fukui et al., J. Nucleic Acids 2010:260512 (2010). In some embodiments, the deaminase (e.g., adenosine or cytidine deaminase) is one or more of those described in Cox et al., Science. 2017, November 24; 358(6366): 1019-1027; Komore et al., Nature. 2016 May 19; 533(7603):420-4; and Gaudelli et al., Nature. 2017 Nov. 23; 551(7681):464-471.

[0376] The term “editing selectivity” as used herein refers to the fraction of all sites on a double-stranded substrate that is edited by an adenosine deaminase. Without being bound by theory, it is contemplated that editing selectivity of an adenosine deaminase is affected by the double-stranded substrate's length and secondary structures, such as the presence of mismatched bases, bulges and/or internal loops.

[0377] In some embodiments, when the substrate is a perfectly base-paired duplex longer than 50 bp, the adenosine deaminase may be able to deaminate multiple adenosine residues within the duplex (e.g., 50% of all adenosine residues). In some embodiments, when the substrate is shorter than 50 bp, the editing selectivity of an adenosine deaminase is affected by the presence of a mismatch at the target adenosine site. Particularly, in some embodiments, adenosine (A) residue having a mismatched cytidine (C) residue on the opposite strand is deaminated with high efficiency. In some embodiments, adenosine (A) residue having a mismatched guanosine (G) residue on the opposite strand is skipped without editing.

[0378] In some embodiments, the adenosine deaminase protein recognizes and converts one or more target adenosine residue(s) in a double-stranded nucleic acid substrate into inosine residue(s). In some embodiments, the double-stranded nucleic acid substrate is an RNA-DNA hybrid duplex. In some embodiments, the adenosine deaminase protein recognizes a binding window on the double-stranded substrate. In some embodiments, the binding window contains at least one target adenosine residue(s). In some embodiments, the binding window is in the range of about 3 bp to about 100 bp. In some embodiments, the binding window is in the range of about 5 bp to about 50 bp. In some embodiments, the binding window is in the range of about 10 bp to about 30 bp. In some embodiments, the binding window is about 1 bp, 2 bp, 3 bp, 5 bp, 7 bp, 10 bp, 15 bp, 20 bp, 25 bp, 30 bp, 40 bp, 45 bp, 50 bp, 55 bp, 60 bp, 65 bp, 70 bp, 75 bp, 80 bp, 85 bp, 90 bp, 95 bp, or 100 bp.

[0379] In some embodiments, the adenosine deaminase protein comprises one or more deaminase domains. Not intended to be bound by a particular theory, it is contemplated that the deaminase domain functions to recognize and convert one or more target adenosine (A) residue(s) contained in a double-stranded nucleic acid substrate into inosine (I) residue(s). In some embodiments, the deaminase domain comprises an active center. In some embodiments, the active center comprises a zinc ion. In some embodiments, during the A-to-I editing process, base pairing at the target adenosine residue is disrupted, and the target adenosine residue is “flipped” out of the double helix to become accessible by the adenosine deaminase. In some embodiments, amino acid residues in or near the active center interact with one or more nucleotide(s) 5′ to a target adenosine residue. In some embodiments, amino acid residues in or near the active center interact with one or more nucleotide(s) 3′ to a target adenosine residue. In some embodiments, amino acid residues in or near the active center further interact with the nucleotide complementary to the target adenosine residue on the opposite strand. In some embodiments, the amino acid residues form hydrogen bonds with the 2′ hydroxyl group of the nucleotides.

[0380] In some embodiments, the adenosine deaminase comprises human ADAR2 full protein (hADAR2) or the deaminase domain thereof (hADAR2-D). In some embodiments, the adenosine deaminase is an ADAR family member that is homologous to hADAR2 or hADAR2-D.

[0381] Particularly, in some embodiments, the homologous ADAR protein is human ADAR1 (hADAR1) or the deaminase domain thereof (hADAR1-D). In some embodiments, glycine 1007 of hADAR1-D corresponds to glycine 487 hADAR2-D, and glutamic Acid 1008 of hADAR1-D corresponds to glutamic acid 488 of hADAR2-D.

[0382] In some embodiments, the adenosine deaminase comprises the wild-type amino acid sequence of hADAR2-D. In some embodiments, the adenosine deaminase comprises one or more mutations in the hADAR2-D sequence, such that the editing efficiency, and/or substrate editing preference of hADAR2-D is changed according to specific needs. The engineered adenosine deaminase may be fused with a Cas protein, e.g., Cas9, or an engineered form of the Cas protein (e.g., an invective, dead form, a nickase form). In some examples, provided herein include an engineered adenosine deaminase fused with a dead Cas protein or Cas nickase.

[0383] Certain mutations of hADAR1 and hADAR2 proteins have been described in Kuttan et al., Proc Natl Acad Sci USA. (2012) 109(48):E3295-304; Want et al. ACS Chem Biol. (2015) 10(11):2512-9; and Zheng et al. Nucleic Acids Res. (2017) 45(6):3369-337, each of which is incorporated herein by reference in its entirety.

### Modified Adenosine Deaminase Having C to U Deamination Activity

[0384] In certain example embodiments, directed evolution may be used to design modified ADAR proteins capable of catalyzing additional reactions besides deamination of an adenine to a hypoxanthine. For example, the modified ADAR protein may be capable of catalyzing deamination of a cytidine to a uracil. While not bound by a particular theory, mutations that improve C to U activity may alter the shape of the binding pocket to be more amenable to the smaller cytidine base. In some cases, the modified ADAR comprise mutations on residues the catalytic core and/or residues that contact the RNA target. Examples of mutations on residues in the catalytic core include V351G and K350I., based on amino acid sequence positions of hADAR2-D, and mutations in a homologous ADAR protein corresponding to the above. Examples of mutations on residues on the residues that contact with the RNA target include S486A and S495N, based on amino acid sequence positions of hADAR2-D, and mutations in a homologous ADAR protein corresponding to the above.

[0385] In certain embodiments the adenosine deaminase is engineered to convert the activity to cytidine deaminase. Such engineered adenosine deaminase may also retain its adenosine deaminase activity, i.e., such mutated adenosine deaminase may have both adenosine deaminase and cytidine deaminase activities. Accordingly in some embodiments, the adenosine deaminase comprises one or more mutations in positions selected from E396, C451, V351, R455, T375, K376, S486, Q488, R510, K594, R348, G593, S397, H443, L444, Y445, F442, E438, T448, A353, V355, T339, P539, T339, P539, V525 I520, P462 and N579. In particular embodiments, the adenosine deaminase comprises one or more mutations in a position selected from V351, L444, V355, V525 and I520. In some embodiments, the adenosine deaminase may comprise one or more of mutations at E488, V351, S486, T375, S370, P462, N597, based on amino acid sequence positions of hADAR2-D, and mutations in a homologous ADAR protein corresponding to the above.

[0386] In some cases, the adenosine deaminase is double-stranded RNA-specific adenosine deaminase (ADAR). Examples of ADARs include those described Yiannis A Savva et al., The ADAR protein family, Genome Biol. 2012; 13(12): 252, which is incorporated by reference in its entirety. In some examples, the ADAR may be hADAR1. In certain examples, the ADAR may be hADAR2. The sequence of hADAR2 may be that described under Accession No. AF525422.1.

[0387] In some cases, the deaminase may be a deaminase domain, e.g., a deaminase domain of ADAR (“ADAR-D”). In one example, the deaminase may be the deaminase domain of hADAR2 (“hADAR2-D), e.g., as described in Phelps K J et al., Recognition of duplex RNA by the deaminase domain of the RNA editing enzyme ADAR2. Nucleic Acids Res. 2015 January; 43(2):1123-32, which is incorporated by reference herein in its entirety. In a particular example, the hADAR2-D has a sequence comprising amino acid 299-701 of hADAR2-D, e.g., amino acid 299-701 of the sequence under Accession No. AF525422.1.

[0388] In certain examples, the system comprises a mutated form of an adenosine deaminase fused with a dFanzor. The mutated form of the adenosine deaminase may have both adenosine deaminase and cytidine deaminase activities. In one embodiment, the adenosine deaminase may comprise one or more of the mutations: E488Q based on amino acid sequence positions of hADAR2-D, and mutations in a homologous ADAR protein corresponding to the above. In one embodiment, the adenosine deaminase may comprise one or more of the mutations: E488Q, V351G, based on amino acid sequence positions of hADAR2-D, and mutations in a homologous ADAR protein corresponding to the above. In one embodiment, the adenosine deaminase may comprise one or more of the mutations: E488Q, V351G, S486A, based on amino acid sequence positions of hADAR2-D, and mutations in a homologous ADAR protein corresponding to the above. In one embodiment, the adenosine deaminase may comprise one or more of the mutations: E488Q, V351G, S486A, T375S, based on amino acid sequence positions of hADAR2-D, and mutations in a homologous ADAR protein corresponding to the above. In one embodiment, the adenosine deaminase may comprise one or more of the mutations: E488Q, V351G, S486A, T375S, S370C, based on amino acid sequence positions of hADAR2-D, and mutations in a homologous ADAR protein corresponding to the above. In one embodiment, the adenosine deaminase may comprise one or more of the mutations: E488Q, V351G, S486A, T375S, S370C, P462A, based on amino acid sequence positions of hADAR2-D, and mutations in a homologous ADAR protein corresponding to the above. In one embodiment, the adenosine deaminase may comprise one or more of the mutations: E488Q, V351G, S486A, T375S, S370C, P462A, N597I, based on amino acid sequence positions of hADAR2-D, and mutations in a homologous ADAR protein corresponding to the above. In one embodiment, the adenosine deaminase may comprise one or more of the mutations: E488Q, V351G, S486A, T375S, S370C, P462A, N597I, L332I, based on amino acid sequence positions of hADAR2-D, and mutations in a homologous ADAR protein corresponding to the above. In one embodiment, the adenosine deaminase may comprise one or more of the mutations: E488Q, V351G, S486A, T375S, S370C, P462A, N597I, L332I, I398V, based on amino acid sequence positions of hADAR2-D, and mutations in a homologous ADAR protein corresponding to the above. In one embodiment, the adenosine deaminase may comprise one or more of the mutations: E488Q, V351G, S486A, T375S, S370C, P462A, N597I, L332I, I398V, K350I, based on amino acid sequence positions of hADAR2-D, and mutations in a homologous ADAR protein corresponding to the above. In one embodiment, the adenosine deaminase may comprise one or more of the mutations: E488Q, V351G, S486A, T375S, S370C, P462A, N597I, L332I, I398V, K350I, M383L, based on amino acid sequence positions of hADAR2-D, and mutations in a homologous ADAR protein corresponding to the above. In one embodiment, the adenosine deaminase may comprise one or more of the mutations: E488Q, V351G, S486A, T375S, S370C, P462A, N597I, L332I, I398V, K350I, M383L, D619G, based on amino acid sequence positions of hADAR2-D, and mutations in a homologous ADAR protein corresponding to the above. In one embodiment, the adenosine deaminase may comprise one or more of the mutations: E488Q, V351G, S486A, T375S, S370C, P462A, N597I, L332I, I398V, K350I, M383L, D619G, S582T, based on amino acid sequence positions of hADAR2-D, and mutations in a homologous ADAR protein corresponding to the above. In one embodiment, the adenosine deaminase may comprise one or more of the mutations: E488Q, V351G, S486A, T375S, S370C, P462A, N597I, L332I, I398V, K350I, M383L, D619G, S582T, V440I based on amino acid sequence positions of hADAR2-D, and mutations in a homologous ADAR protein corresponding to the above. In one embodiment, the adenosine deaminase may comprise one or more of the mutations: E488Q, V351G, S486A, T375S, S370C, P462A, N597I, L332I, I398V, K350I, M383L, D619G, S582T, V440I, S495N based on amino acid sequence positions of hADAR2-D, and mutations in a homologous ADAR protein corresponding to the above. In one embodiment, the adenosine deaminase may comprise one or more of the mutations: E488Q, V351G, S486A, T375S, S370C, P462A, N597I, L332I, I398V, K350I, M383L, D619G, S582T, V440I, S495N, K418E based on amino acid sequence positions of hADAR2-D, and mutations in a homologous ADAR protein corresponding to the above. In one embodiment, the adenosine deaminase may comprise one or more of the mutations: E488Q, V351G, S486A, T375S, S370C, P462A, N597I, L332I, I398V, K350I, M383L, D619G, S582T, V440I, S495N, K418E, S661T based on amino acid sequence positions of hADAR2-D, and mutations in a homologous ADAR protein corresponding to the above. In some examples, provided herein includes a mutated adenosine deaminase e.g., an adenosine deaminase comprising one or more mutations of E488Q, V351G, S486A, T375S, S370C, P462A, N597I, L332I, I398V, K350I, M383L, D619G, S582T, V440I, S495N, K418E, S661T, fused with a dead Fanzor polypeptide or Fanzor polypeptide nickase. In some examples, provided herein includes a mutated adenosine deaminase e.g., an adenosine deaminase comprising E488Q, V351G, S486A, T375S, S370C, P462A, N597I, L332I, I398V, K350I, M383L, D619G, S582T, V440I, S495N, K418E, and S661T, fused with a dead Fanzor polypeptide or Fanzor polypeptide nickase. In some examples, provided herein includes a mutated adenosine deaminase e.g., an adenosine deaminase comprising E488Q, V351G, S486A, T375S, S370C, P462A, N597I, L332I, I398V, K350I, M383L, D619G, S582T, V440I, S495N, K418E, S661T, and S375N fused with a dead Fanzor polypeptide or Fanzor polypeptide nickase.

[0389] In one embodiment, the adenosine deaminase may be a tRNA-specific adenosine deaminase or a variant thereof. In one embodiment, the adenosine deaminase may comprise one or more of the mutations: W23L, W23R, R26G, H36L, N37S, P48S, P48T, P48A, I49V, R51L, N72D, L84F, S97C, A106V, D108N, H123Y, G125A, A142N, S146C, D147Y, R152H, R152P, E155V, I156F, K157N, K161T, based on amino acid sequence positions of E. coli TadA, and mutations in a homologous deaminase protein corresponding to the above. In one embodiment, the adenosine deaminase may comprise one or more of the mutations: D108N based on amino acid sequence positions of E. coli TadA, and mutations in a homologous deaminase protein corresponding to the above. In one embodiment, the adenosine deaminase may comprise one or more of the mutations: A106V, D108N, based on amino acid sequence positions of E. coli TadA, and mutations in a homologous deaminase protein corresponding to the above. In one embodiment, the adenosine deaminase may comprise one or more of the mutations: A106V, D108N, D147Y, E155V, based on amino acid sequence positions of E. coli TadA, and mutations in a homologous deaminase protein corresponding to the above. In one embodiment, the adenosine deaminase may comprise one or more of the mutations: A106V, D108N, based on amino acid sequence positions of E. coli TadA, and mutations in a homologous deaminase protein corresponding to the above. In one embodiment, the adenosine deaminase may comprise one or more of the mutations: A106V, D108N, D147Y, E155V, L84F, H123Y, I156F, based on amino acid sequence positions of E. coli TadA, and mutations in a homologous deaminase protein corresponding to the above. In one embodiment, the adenosine deaminase may comprise one or more of the mutations: A106V, D108N, D147Y, E155V, L84F, H123Y, I156F, A142N, based on amino acid sequence positions of E. coli TadA, and mutations in a homologous deaminase protein corresponding to the above. In one embodiment, the adenosine deaminase may comprise one or more of the mutations: A106V, D108N, D147Y, E155V, L84F, H123Y, I156F, H36L, R51L, S146C, K157N, based on amino acid sequence positions of E. coli TadA, and mutations in a homologous deaminase protein corresponding to the above. In one embodiment, the adenosine deaminase may comprise one or more of the mutations: A106V, D108N, D147Y, E155V, L84F, H123Y, I156F, H36L, R51L, S146C, K157N, P48S, based on amino acid sequence positions of E. coli TadA, and mutations in a homologous deaminase protein corresponding to the above. In one embodiment, the adenosine deaminase may comprise one or more of the mutations: A106V, D108N, D147Y, E155V, L84F, H123Y, I156F, H36L, R51L, S146C, K157N, P48S, A142N, based on amino acid sequence positions of E. coli TadA, and mutations in a homologous deaminase protein corresponding to the above. In one embodiment, the adenosine deaminase may comprise one or more of the mutations: A106V, D108N, D147Y, E155V, L84F, H123Y, I156F, H36L, R51L, S146C, K157N, P48S, W23R, P48A, based on amino acid sequence positions of E. coli TadA, and mutations in a homologous deaminase protein corresponding to the above. In one embodiment, the adenosine deaminase may comprise one or more of the mutations: A106V, D108N, D147Y, E155V, L84F, H123Y, I156F, H36L, R51L, S146C, K157N, P48S, W23R, P48A, A142N, based on amino acid sequence positions of E. coli TadA, and mutations in a homologous deaminase protein corresponding to the above. In one embodiment, the adenosine deaminase may comprise one or more of the mutations: A106V, D108N, D147Y, E155V, L84F, H123Y, I156F, H36L, R51L, S146C, K157N, P48S, W23R, P48A, R152P, based on amino acid sequence positions of E. coli TadA, and mutations in a homologous deaminase protein corresponding to the above. In one embodiment, the adenosine deaminase may comprise one or more of the mutations: A106V, D108N, D147Y, E155V, L84F, H123Y, I156F, H36L, R51L, S146C, K157N, P48S, W23R, P48A, R152P, A142N, based on amino acid sequence positions of E. coli TadA, and mutations in a homologous deaminase protein corresponding to the above.

### Fanzor Prime Editing Systems

[0390] In one embodiment, the present disclosure provides compositions and systems may comprise a Fanzor or a dFanzor, one or more nucleic acid components, and a reverse transcriptase. The systems may be used to insert a donor polynucleotide to a target polynucleotide. In some examples, the composition or system comprises a catalytically inactive Fanzor polypeptide, a reverse transcriptase associated with or otherwise capable of forming a complex with the Fanzor polypeptide, and a nucleic acid component molecule capable of forming a complex with the Fanzor polypeptide and directing site-specific binding of the complex to a target sequence of a target polynucleotide, the nucleic acid component molecule further comprising a donor template which functions as a template for insertion of a donor sequence into a target polynucleotide by the reverse transcriptase.

[0391] In some cases, the dFanzor may be a nickase, e.g., a DNA nickase. The Fanzor nickase may comprise or more mutations. In some examples, the Fanzor comprises mutations corresponding to the mutations in the RuvC nuclease.

[0392] A reverse transcriptase domain may be a reverse transcriptase or a fragment thereof. In certain aspects, the reverse transcriptase is Human immunodeficiency virus (HIV) RT, Avian myoblastosis virus (AMV) RT, Moloney murine leukemia virus (M-MLV) RT a group II intron RT, a group II intron-like RT, or a chimeric RT. In certain embodiments, the RT comprises modified forms of these RTs, such as, engineered variants of Avian myoblastosis virus (AMV) RT, Moloney murine leukemia virus (M-MLV) RT, or Human immunodeficiency virus (HIV) RT (see, e.g., Anzalone, et al., Search-and-replace genome editing without double-strand breaks or donor DNA, Nature. 2019 December; 576(7785):149-157).

[0393] In some examples, the compositions and systems may comprise the Fanzor protein herein; a reverse transcriptase (RT) polypeptide connected to or otherwise capable of forming a complex with the Fanzor protein; and a ωRNA molecule capable of forming a complex with the Fanzor protein and comprising: a ωRNA sequence capable of directing site-specific binding of the Fanzor complex to a target sequence of a target polynucleotide; a 3′ binding site region capable of binding to a cleaved upstream strand of the target polynucleotide; and a RT template sequence encoding an extended sequence, wherein the extended sequence comprises a variant region and a 3′ homologous sequence capable of hybridization to the downstream cleaved strand of the target polynucleotide.

[0394] A wide variety of reverse transcriptases (RT) may be used in alternative embodiments of the present invention, including prokaryotic and eukaryotic RT, provided that the RT functions within the host to generate a donor polynucleotide sequence from the RNA template. If desired, the nucleotide sequence of a native RT may be modified, for example using known codon optimization techniques, so that expression within the desired host is optimized. A reverse transcriptase (RT) is an enzyme used to generate complementary DNA (cDNA) from an RNA template, a process termed reverse transcription. Reverse transcriptases are used by retroviruses to replicate their genomes, by retrotransposon mobile genetic elements to proliferate within the host genome, by eukaryotic cells to extend the telomeres at the ends of their linear chromosomes, and by some non-retroviruses such as the hepatitis B virus, a member of the Hepadnaviridae, which are dsDNA-RT viruses. Retroviral RT has three sequential biochemical activities: RNA-dependent DNA polymerase activity, ribonuclease H, and DNA-dependent DNA polymerase activity. Collectively, these activities enable the enzyme to convert single-stranded RNA into double-stranded cDNA. In one embodiment, the RT domain of a reverse transcriptase is used in the present invention. The domain may include only the RNA-dependent DNA polymerase activity. In some examples, the RT domain is non-mutagenic, i.e., does not cause mutation in the donor polynucleotide (e.g., during the reverse transcriptase process). In some cases, in some examples, the RT domain may be non-retron RT, e.g., a viral RT or human endogenous RTs. In some examples, the RT domain may be retron RT or DGRs RT. In some examples, the RT may be less mutagenic than a counterpart wildtype RT. In one embodiment, the RT herein is not mutagenic.

[0395] The reverse transcriptase may be fused to the C-terminus of a Fanzor. Alternatively or additionally, the reverse transcriptase may be fused to the N-terminus of a Fanzor. The fusion may be via a linker and/or an adaptor protein. In some examples, the reverse transcriptase may be an M-MLV reverse transcriptase or variant thereof. The M-MLV reverse transcriptase variant may comprise one or more mutations. For the examples, the M-MLV reverse transcriptase may comprise D200N, L603W, and T330P. In another example, the M-MLV reverse transcriptase may comprise D200N, L603W, T330P, T306K, and W313F. In a particular example, the fusion of Fanzor polypeptide and reverse transcriptase is Fanzor polypeptide with mutation fused with M-MLV reverse transcriptase (D200N+L603W+T330P+T306K+W313F).

[0396] The small sizes of the Fanzor polypeptide herein may allow easier packaging and delivery of the prime editing system, e.g., with a viral vector, e.g., AAV or lentiviral vector.

[0397] A single-strand break (a nick) may be generated on the target DNA by the Fanzor polypeptide at the target site to expose a 3′-hydroxyl group, thus priming the reverse transcription of an edit-encoding extension on the nucleic acid component molecule directly into the target site. These steps may result in a branched intermediate with two redundant single-stranded DNA flaps: a 5′ flap that contains the unedited DNA sequence, and a 3′ flap that contains the edited sequence copied from the nucleic acid component. The 5′ flaps may be removed by a structure-specific endonuclease, e.g., FEN122, which excises 5′ flaps generated during lagging-strand DNA synthesis and long-patch base excision repair. The non-edited DNA strand may be nicked to induce bias DNA repair to preferentially replace the non-edited strand. Examples of prime editing systems and methods include those described in Anzalone A V et al., Search-and-replace genome editing without double-strand breaks or donor DNA, Nature. 2019 Oct. 21. doi: 10.1038/s41586-019-1711-4, which is incorporated by reference herein in its entirety.

[0398] The Fanzor (e.g., the nickase form) may be used to prime-edit a single nucleotide on a target DNA. Alternatively or additionally, the Fanzor polypeptide may be used to prime-edit at least 2, at least 3, at least 4, at least 5, at least 6, at least 7, at least 8, at least 10, at least 11, at least 12, at least 13, at least 14, at least 15, at least 16, at least 17, at least 18, at least 19, at least 20, at least 21, at least 22, at least 23, at least 24, at least 25, at least 26, at least 27, at least 28, at least 29, at least 30, at least 40, at least 50, at least 60, at least 70, at least 80, at least 90, at least 100, at least 200, at least 300, at least 400, at least 500, at least 600, at least 700, at least 800, at least 900, or at least 1000 nucleotides on a target DNA.

[0399] In yet another embodiment, PRIME editing is used first to create a longer 3′ region (e.g., 20 nucleotides). Examples of prime editing systems and methods include those described in Anzalone A V et al., Search-and-replace genome editing without double-strand breaks or donor DNA, Nature. 2019 Oct. 21. doi: 10.1038/s41586-019-1711-4, which is incorporated by reference herein in its entirety. In such cases, the system comprises a Fanzor protein with nickase activity, a reverse transcriptase domain, and a DNA polymerase, and a ωRNA molecule comprising a binding sequence capable of hybridizing to the target polynucleotide and an editing sequence. The generated region may be further extended on a DNA template as described herein. The latter may allow generation of a target-independent sequence, compatible with a generic donor sequence.

[0400] The Fanzor protein is capable of generating a first cleavage in the target sequence and a second cleavage outside the target sequence on the target polynucleotide. In some variations, a second Fanzor-mediated cleavage in vicinity to the target site may be made, which may enable more efficient invasion of the extended DNA.

[0401] In some examples, the compositions and systems of the Fanzor protein herein comprise: a reverse transcriptase (RT) polypeptide connected to or otherwise capable of forming a complex with the Fanzor protein; a first ωRNA molecule capable of forming a first Fanzor-reverse transcriptase complex with the Fanzor protein and comprising: a ωRNA sequence capable of directing site-specific binding of the first Fanzor-reverse transcriptase complex to a first target sequence of a target polynucleotide; a first binding site region capable of binding to a cleaved or nicked strand of the target polynucleotide; and a RT template sequence encoding a first extended sequence; a second ωRNA molecule capable of forming a second Fanzor-reverse transcriptase complex with the Fanzor protein and comprising: a ωRNA sequence capable of directing site specific binding of the second Fanzor-reverse transcriptase complex to a second target sequence of the target polynucleotide; a second binding site region capable of binding to a cleaved or nicked strand of the target polynucleotide; and a RT template sequence encoding a second extended sequence. Such paired systems allow for “double-flap” editing which allow for the excision or insertion of large DNA sequences.

[0402] In some cases, the compositions and systems may further comprise: a donor template; a third ωRNA sequence capable of forming a Fanzor-reverse transcriptase complex-ωRNA with the Fanzor protein and comprising: a ωRNA sequence capable of directing site-specific binding to a target sequence on the donor template; a third binding region capable of binding to a cleaved or nicked strand of the donor template; and a RT template encoding a third extended region complementary to the first extended region generated on the target polynucleotide; and a fourth ωRNA sequence capable of forming a Fanzor-reverse transcriptase complex with the Fanzor protein and comprising: a ωRNA sequence capable of directing site-specific binding to a second target sequence on the donor template; a fourth binding region capable of binding to a cleaved or nicked strand of the donor template; and a RT template encoding a fourth extended region complementary to the second extended region generated on the target polynucleotide.

[0403] In some cases, the compositions and systems may further comprise a site-specific recombinase, and wherein the first and second extended regions are complementary to each other and introduce a serine integrase recombination site; and a donor molecule comprising a donor sequence for insertion into the target polypeptide and the complementary recombination site to the serine integrase recombination site.

[0404] In some examples, the compositions and systems may further comprise a recombinase. The recombinase is connected to or otherwise capable of forming a complex with the Fanzor protein. In certain embodiments, the complex is capable of inserting a recombination site in the DNA loci of interest by extension of RT templates that encode for the recombination site on the 3′ extension of the ωRNA sequences by the reverse transcriptase. In certain embodiments, a donor template comprising a compatible recombination site is provided that can recombine unidirectionally with the inserted recombination site when a recombinase specific for the recombination site is also provided. In certain embodiments, the donor template is a plasmid comprising the complementary recombination site and any sequence for insertion at the DNA loci of interest. In certain embodiments, the recombinase is connected to or capable of forming a complex with the Fanzor enzyme, such that all of the enzymatic proteins are brought into contact at the loci of interest. In certain embodiments, the recombinase is codon optimized for eukaryotic cells (described further herein). In certain embodiments, the recombinase includes a NLS (described further herein). In certain embodiments, the recombinase is provided as a separate protein. The separate recombinase may form a dimer and bind to the donor template recombination site. The recombinase may be targeted to the loci of interest as a result of the insertion of the compatible recombination site that is also recognized by the recombinase. Thus, the recombinase may recognize the recombination site inserted at the DNA loci of interest and the recombination site on the donor and be targeted to the DNA loci of interest without any additional modifications to the recombinase.

[0405] In certain embodiments, a second Fanzor complex connected to a recombinase is targeted to the DNA loci of interest. In certain embodiments, the second Fanzor complex comprises a dead Fanzor protein (dFanzor, described further elsewhere herein), such that the recombinase is targeted to the DNA loci of interest, but the target sequence is not further cleaved. In certain embodiments, the dFanzor targets a sequence generated only after the insertion of the recombination site. In certain embodiments, the recombinase recognizes and binds to the donor template recombination site and the inserted recombination site. In certain embodiments, the recombinase forms a dimer with a recombinase provided as a separate protein.

[0406] As used herein, the term “Recombinase” refers to an enzyme that catalyzes recombination between two or more recombination sites (e.g., an acceptor and donor site). Recombinases useful in the present invention catalyze recombination at specific recombination sites which are specific polynucleotide sequences that are recognized by a particular recombinase. “Uni-directional recombinases” or “integrases” refer to recombinase enzymes whose recognition sites are destroyed after the recombination has taken place. The term “integrase” refers to a type of recombinase. In other words, the sequence recognized by the recombinase is changed into one that is not recognized by the recombinase upon recombination. As a result, once a sequence is subjected to recombination by the uni-directional recombinase, the continued presence of the recombinase cannot reverse the previous recombination event.

[0407] “Recombination sites” are specific polynucleotide sequences that are recognized by the recombinase enzymes described herein. Typically, two different sites are involved (in regard to recombination termed “complementary sites”), one present in the target nucleic acid (e.g., a chromosome or episome of a eukaryote) and another on the nucleic acid that is to be integrated at the target recombination site. The terms “attB” and “attP,” which refer to attachment (or recombination) sites originally from a bacterial target (attachment site of bacteria) and a phage donor (attachment site of phage), respectively, are used herein although recombination sites for particular enzymes may have different names. The two attachment sites can share as little sequence identity as a few base pairs. The recombination sites typically include left and right arms separated by a core or spacer region. Thus, an attB recombination site consists of BOB′, where B and B′ are the left and right arms, respectively, and O is the core region. Similarly, attP is POP′, where P and P′ are the arms and O is again the core region. Upon recombination between the attB and attP sites, and concomitant integration of a nucleic acid at the target, the recombination sites that flank the integrated DNA are referred to as “attL” and “aatR.” The attL and attR sites, using the terminology above, thus consist of BOP′ and POB′, respectively. In some representations herein, the “O” is omitted and attB and attP, for example, are designated as BB′ and PP′, respectively.

### Fanzor-Associated Transposase Systems

[0408] The systems and compositions herein may comprise a Fanzor polypeptide, one or more nucleic acid components, and one or more components of a transposase. In one example embodiment, the Fanzor polypeptide mediates RNA-guided TnpA-catalyzed transposition. In one-example embodiment, Fanzor polypeptide mediates RNA-guided Tn7-catalyzed transposition.

[0409] In an example embodiment, the transposases may comprise TnpA. The transposase may be a Y1 transposase of the IS200/IS605 family, encoded by the insertion sequence (IS) IS608 from Helicobacter pylori, e.g., TnpAIS608, from Deinococcus radiodurans, e.g., ISDra2, from Halanaerobium hydrogenformans or from Sulfolobus solfataricus. Examples of the transposases include those described in Barabas, O., Ronning, D. R., Guynet, C., Hickman, A. B., TonHoang, B., Chandler, M. and Dyda, F. (2008) Mechanism of IS200/IS605 family DNA transposases: activation and transposon-directed target site selection. Cell, 132, 208-220; in Sadler et al., Genes 2020, 11, 484, doi: 10.3390/genes11050484, and in He et al., (2013) NAR, 41:5, 3302-3313. In certain example embodiments, the transposase is a single stranded DNA transposase. In certain example embodiments, the single stranded DNA transposase is TnpA or a functional fragment thereof.

[0410] In some examples, the one or more transposases or transposase sub-units are, or are derived from, Tn7 transposases. In a particular embodiment, the Tn7 or TN7-like transposase may be a Tn5053 transposase. For example, the Tn5053 transposases include those described in Minakhina S et al., Tn5053 family transposons are res site hunters sensing plasmidal res sites occupied by cognate resolvases. Mol Microbiol. 1999 September; 33(5):1059-68; and FIG. 4 and related texts in Partridge S R et al., Mobile Genetic Elements Associated with Antimicrobial Resistance, Clin Microbiol Rev. 2018 Aug. 1; 31(4), both of which are incorporated by reference herein in their entirety. In some cases, the one or more Tn5053 transposases may comprise one or more of TniA, TniB, and TniQ. TniA is also known as TnsB. TniB is also known as TnsC. TniQ is also known as TnsD. Accordingly, in one embodiment, these Tn5053 transposase subunits may be referred to as TnsB, TnsC, and TnsD, respectively. In certain cases, the one or more transposases may comprise TnsB, TnsC, and TnsD.

[0411] In one embodiment, the transposases may be one or more Vibrio cholerae Tn6677 transposases. In one example, the transposon may include a terminal operon comprising the tnsA, tnsB, and tnsC genes. The transposon may further comprise a tniQ gene. In one embodiment, the TnsE may be absent in the transposon.

[0412] In certain examples, the transposase includes one or more of Mu-transposase, TniQ, TniB, or functional domains thereof. In certain examples, the transposase includes one or more of TniQ, a TniB, a TnpB, or functional domains thereof. In certain examples, the transposase includes one or more of a rve integrase, TniQ, TniB, or functional domains thereof.

[0413] In one embodiment the system, more particularly the transposase does not include an rve integrase. In one embodiment the system, more particularly the transposase does not include one or more of Mu-transposase, TniQ, a TniB, a TnpB, a IstB domain or functional domains thereof.

[0414] In certain examples, the transposase includes one or more of Mu-transposase, TniQ, TniB, or functional domains thereof. In certain examples, the transposase includes one or more of TniQ, a TniB, a TnpB, or functional domains thereof. In certain examples, the transposase includes one or more of a rve integrase, TniQ, TniB, TnpB domain, or functional domains thereof.

[0415] A right end sequence element or a left end sequence element are made in reference to an example Tn7 transposon. The general structure of the left end (LE) and right end (RE) sequence elements of canonical Tn7 is established. Tn7 ends comprise a series of 22-bp TnsB-binding sites. Flanking the most distal TnsB-binding sites is an 8-bp terminal sequence ending with 5′-TGT-3′/3′-ACA-5′. The right end of Tn7 contains four overlapping TnsB-binding sites in the ˜90-bp right end element. The left end contains three TnsB-binding sites dispersed in the ˜150-bp left end of the element. The number and distribution of TnsB-binding sites can vary among Tn7-like elements. End sequences of Tn7-related elements can be determined by identifying the directly repeated 5-bp target site duplication, the terminal 8-bp sequence, and 22-bp TnsB-binding sites (Peters J E et al., 2017). Example Tn7 elements, including right end sequence element and left end sequence element include those described in Parks A R, Plasmid, 2009 January; 61(1):1-14.

### Fanzor Recombinase/Integrase Systems

[0416] The systems and compositions herein may comprise a Fanzor system or component(s) thereof, and one or more components of a recombinase or integrase. In an aspect, the Fanzor is naturally catalytically inactive and utilized with one or more nucleic acid components to provide site-specific targeting, and the one or more components of the recombinase to introduce a modification. In an aspect, the Fanzor polypeptide may be catalytically inactivated via mutation of one or more residues of a catalytic domain (e.g., RuvC) or via truncation, and utilized with one or more nucleic acid components to provide site-specific targeting, and the one or more components of the recombinase introduce a modification. In one embodiment, a naturally inactive Fanzor is provided with a recombinase, e.g., an integrase, and optionally a reverse transcriptase. The systems and compositions herein may comprise a Fanzor polypeptide, one or more nucleic acid components, and one or more components of an integrase. In an aspect, the Fanzor polypeptide is a nickase, and utilized with one or more nucleic acid components to provide site-specific targeting, with the one or more components of the integrase introduce a modification. The systems and compositions may be used to insert a donor polynucleotide to a target polynucleotide. The systems and compositions may further comprise a donor polynucleotide.

[0417] In preferred embodiments, the recombinase mediates unidirectional site-specific recombination. In one embodiment, the recombinase is a serine recombinase (SR) also referred to as a serine integrase, encoded, for example, by IS607 family, Tn4451, and bacteriophage phiC31. See, generally, Smith M C, Thorpe H M: Diversity in the serine recombinases. Mol Microbiol. 2002, 44: 299-307. 10.1046/j.1365-2958.2002.02891.x; Li et al., (2018) J. Mol. Biol. 430:21, 4401-4418.

[0418] In an embodiment, the recombinase is a tyrosine recombinase (YR) encoded by IS91, Helitron, IS200/IS605, Crypton or DIRS-retrotransposon families. See, generally, Goodwin T J, Butler M I, Poulter T: Cryptons: a group of tyrosine-recombinase-encoding DNA transposons from pathogenic fungi. Microbiology. 2003, 149: 3099-3109. Doi:10.1099/mic.0.26529-0; Cappello J, Handelsman K, Lodish H F: Sequence of Dictyostelium DIRS-1: an apparent retrotransposon with inverted terminal repeats and an internal circle junction sequence. Cell. 1985, 43: 105-115. 10.1016/0092-8674(85)90016-9.

[0419] In an aspect, the recombinase provides site-specific integration of a template that can be provided with the composition, e.g., a donor oligonucleotide. Without being bound by theory, the recombinase allows for integration independent of payload size and can coordinate strand exchange and re-ligation across multiple cell types, allowing integration of long stretches of polynucleotides. In an exemplary embodiment, the serine recombinase is PhiC31 and the target is DNA. In an aspect, the phiC31 allows for integration of a target site comprising an attP or pseudoattP recognition site. See, e.g., systembio.com/wp-content/uploads/phiC31_productsheet-1.pdf. In an embodiment utilizing phiC231, a donor oligonucleotide would be provided with an attB at sequence that facilitates attachment at the attP site of the target genome. Similar approaches of designing donor oligonucleotides with sequences complementary to attachment sites for a recombinase can be designed for use with the present invention. See, e.g., Li et al., (2018) J. Mol. Biol. 430:21, 4401-4418.

[0420] In preferred embodiments, the integrase mediates gene integration at diverse loci by directing insertion with an Fanzor nickase fused to both a reverse transcriptase and an integrase. In one embodiment, the integrase is a serine integrase, encoded, for example, BxbINT. See, generally, Ioannidi et al., “Drag-and-drop genome insertion without DNA cleavage with CRISPR-directed integrases”; doi:10.1101/2021.11.01.466786m incorporated herein by reference in its entirety. In Ioannidi, Gootenberg, Abudayyeh, and colleagues show integration using a CRISPR-Cas9 nickase fused to a reverse transcriptase and serine integrase termed Programmable Addition via Site-specific Targeting Elements (PASTE) with delivery via a single dose of plasmids with functionality in non-dividing and primary cells, utilizing a guide RNA comprising an AttB landing site, termed attachment site-containing guide RNA were used to insert sequences, including diverse cargo sequences that can be inserted across different loci, varying in size up to about 36 kb. Additional uses of the PASTE system included gene tagging, gene replacement, gene delivery, and protein production and secretion, approaches that are contemplated for use with the Fanzor nickase and integrase approach. In an aspect, the omega RNA may comprise an AttB landing site. In an aspect, the recombinase provides site-specific integration of a template that can be provided with the composition, e.g., a donor oligonucleotide.

[0421] Additional large serine integrases can be used with the Fanzor polypeptide, for example, as identified and described in Durrant et al., Large-scale discovery of recombinases for integrating DNA into the human genome, doi:10.1101/2021.11.05.467528, incorporated herein by reference. Other integrases include BceINT, SscINT, SacINT. See, e.g., Ioannidi, 2021 at and FIG. 6d, and FIG. 10a.

[0422] Without being bound by theory, the recombinase allows for integration independent of payload size and can coordinate strand exchange and re-ligation across multiple cell types, allowing integration of long stretches of polynucleotides. In an exemplary embodiment, the integrase is BxbINT and the target is DNA. In an aspect, the BxbINT allows for integration of a target site comprising an attP or pseudoattP recognition site. In an embodiment utilizing BxbINT, a donor oligonucleotide would be provided with an attB at sequence that facilitates attachment at the attP site of the target genome. Similar approaches of designing donor oligonucleotides with sequences complementary to attachment sites for an integrase can be designed for use with the present invention, for example a circular double-strand DNA template containing the AttP attachment site, or delivery of large cargo via an adenovirus or other viral vector, as described elsewhere herein. See, e.g., Ioannidi et al., 2021 at FIGS. 1a, 1b and 5b.

### Fanzor Topoisomerase Systems

[0423] The one or more functional domains may be one or more topoisomerase domains. Topoisomerases are a class of enzymes that modify the topological state of DNA via the breakage and rejoining of nucleic acid strands. In some cases, a topoisomerase may be a DNA topoisomerase, which is an enzyme that controls and alters the topologic states of DNA during transcription and catalyzes the transient breaking and rejoining of a single strand of DNA which allows the strands to pass through one another, thus altering the topology of DNA.

[0424] In one embodiment, the topoisomerase domain is capable of ligating the donor polynucleotide with the target polynucleotide. The ligation may be achieved by sticky end or blunt end ligation. In an example, a donor polynucleotide may comprise a overhang comprising a sequence complementary to a region of the target polynucleotide. Examples of ligating the donor polynucleotide with the target polynucleotide include those of TOPO cloning, e.g., those described in “The Technology Behind TOPO Cloning,” at www.thermofisher.com/us/en/home/life-science/cloning/topo/topo-resources/the-technology-behind-topo-cloning.html.

[0425] In one embodiment, the topoisomerase domain may be associated with a donor polynucleotide. For example, the topoisomerase domain is covalently linked to a donor polynucleotide. In one embodiment, a topoisomerase domain may be provided together with, e.g., associated (e.g., fused) with a Fanzor polypeptide or a variant thereof.

[0426] Alternatively or additionally, the topoisomerase domain may be on a molecule different from Fanzor polypeptide. In some cases, the topoisomerase domain may be associated with a donor polynucleotide. For example, the topoisomerase domain may be pre-loaded covalently with a donor DNA molecule. Such deign may allow for efficient ligation of only a specific cargo. The topoisomerase domain may ligate the donor polynucleotide (e.g., a DNA molecule) to a target site on a target polynucleotide (e.g., a free double-stranded DNA end). In one embodiment, the donor polynucleotide may have an overhang that comprises a sequence complementary to a region of the target polynucleotide. For example, the overhang may invade into the target polynucleotide at a cut site generated by the Fanzor polypeptide.

[0427] Examples of topoisomerases include type I, including type IA and type IB topoisomerases, which cleave a single strand of a double-stranded nucleic acid molecule, and type II topoisomerases (e.g., gyrases), which cleave both strands of a double-stranded nucleic acid molecule.

[0428] Type IA and IB topoisomerases cleave one strand of a double-stranded nucleic acid molecule. In some examples, the cleavage of a double-stranded nucleic acid molecule by type IA topoisomerases generates a 5′ phosphate and a 3′ hydroxyl at the cleavage site, with the type IA topoisomerase covalently binding to the 5′ terminus of a cleaved strand. Cleavage of a double-stranded nucleic acid molecule by type IB topoisomerases may generate a 3′ phosphate and a 5′ hydroxyl at the cleavage site, with the type IB topoisomerase covalently binding to the 3′ terminus of a cleaved strand.

[0429] Examples of Type IA topoisomerases include E. coli topoisomerase I, E. coli topoisomerase III, eukaryotic topoisomerase II, archeal reverse gyrase, yeast topoisomerase III, Drosophila topoisomerase III, human topoisomerase III, Streptococcus pneumoniae topoisomerase III, and the like, including other type IA topoisomerases. A DNA-protein adduct is formed with the enzyme covalently binding to the 5′-thymidine residue, with cleavage occurring between the two thymidine residues.

[0430] Examples of Type IB topoisomerases include the nuclear type I topoisomerases present in all eukaryotic cells and those encoded by Vaccinia and other cellular poxviruses. The eukaryotic type IB topoisomerases are exemplified by those expressed in yeast, Drosophila and mammalian cells, including human cells. Viral type IB topoisomerases are exemplified by those produced by the vertebrate poxviruses (Vaccinia, Shope fibroma virus, ORF virus, fowlpox virus, and molluscum contagiosum virus), and the insect poxvirus (Amsacta moorei entomopoxvirus).

[0431] Examples of Type II topoisomerases include, bacterial gyrase, bacterial DNA topoisomerase IV, eukaryotic DNA topoisomerase II, and T-even phage encoded DNA topoisomerases. Type II topoisomerases may have both cleaving and ligating activities. Substrate double-stranded nucleic acid molecules of type II topoisomerase can be prepared such that the type II topoisomerase can form a covalent linkage to one strand at a cleavage site. For example, calf thymus type II topoisomerase can cleave a substrate ds nucleic acid molecule containing a 5′ recessed topoisomerase recognition site positioned three nucleotides from the 5′ end, resulting in dissociation of the three nucleic acid molecule 5′ to the cleavage site and covalent binding of the topoisomerase to the 5′ terminus of the ds nucleic acid molecule. Furthermore, upon contacting such a type II topoisomerase-charged ds nucleic acid molecule with a second nucleic acid molecule containing a 3′ hydroxyl group, the type II topoisomerase can ligate the sequences together, and then is released from the recombinant nucleic acid molecule.

[0432] Structural analysis of topoisomerases indicates that the members of each particular topoisomerase families, including type IA, type IB and type II topoisomerases, share common structural features with other members of the family. In addition, sequence analysis of various type IB topoisomerases indicates that the structures are highly conserved, particularly in the catalytic domain. For example, a domain comprising amino acids 81 to 314 of the 314 amino acid Vaccinia topoisomerase shares substantial homology with other type IB topoisomerases, and the isolated domain has essentially the same activity as the full length topoisomerase, although the isolated domain has a slower turnover rate and lower binding affinity to the recognition site. In addition, a mutant Vaccinia topoisomerase, which is mutated in the amino terminal domain (e.g., at amino acid residues 70 and 72) may display identical properties as the full length topoisomerase. Mutation analysis of Vaccinia type IB topoisomerase reveals a large number of amino acid residues that can be mutated without affecting the activity of the topoisomerase and has identified several amino acids that are required for activity. In view of the high homology shared among the Vaccinia topoisomerase catalytic domain and the other type IB topoisomerases, and the detailed mutation analysis of Vaccinia topoisomerase, it will be recognized that isolated catalytic domains of the type IB topoisomerases and type IB topoisomerases having various amino acid mutations can be used in the methods of the invention and thus are considered to be topoisomerases for purposes of the present invention.

[0433] The various topoisomerases exhibit a range of sequence specificity. For example, type II topoisomerases can bind to a variety of sequences, but cleave at a highly specific recognition site. The type IB topoisomerases may include site specific topoisomerases, which bind to and cleave a specific nucleotide sequence (“topoisomerase recognition site”). Upon cleavage of a double-stranded nucleic acid molecule by a topoisomerase, for example, a type IB topoisomerase, the energy of the phosphodiester bond is conserved via the formation of a phosphotyrosyl linkage between a specific tyrosine residue in the topoisomerase and the 3′ nucleotide of the topoisomerase recognition site. Where the topoisomerase cleavage site is near the 3′ terminus of the nucleic acid molecule, the downstream sequence (3′ to the cleavage site) can dissociate, leaving a nucleic acid molecule having the topoisomerase covalently bound to the newly generated 3′ end.

[0434] The covalently bound topoisomerase also can catalyze the reverse reaction, for example, covalent linkage of the 3′ nucleotide of the recognition sequence, to which a type IB topoisomerase is linked through the phosphotyrosyl bond, and a nucleic acid molecule containing a free 5′ hydroxyl group. As such, methods have been developed for using a type IB topoisomerase to produce recombinant nucleic acid molecules. Nucleic acid molecules such as those comprising a cDNA library, or restriction fragments, or sheared genomic DNA sequences that are to be cloned into such a vector are treated, for example, with a phosphatase to produce 5′ hydroxyl termini, then are added to the linearized vector under conditions that allow the topoisomerase to ligate the nucleic acid molecules at the 5′ terminus containing the hydroxyl group and the 3′ terminus containing the covalently bound topoisomerase.

[0435] Examples of vaccinia viruses encode a 314 amino acid type I topoisomerase enzyme capable of site-specific single-strand nicking of double stranded DNA, as well as 5′ hydroxyl driven re-ligation. Site-specific type I topoisomerases include, but are not limited to, viral topoisomerases such as pox virus topoisomerase. Examples of pox virus topoisomerases include Shope fibroma virus and ORF virus. Other site-specific topoisomerases are well known to those skilled in the art and can be used to practice this invention.

[0436] Examples of vaccinia topoisomerase binds to duplex DNA and cleaves the phosphodiester backbone of one strand while exhibiting a high level of sequence specificity. Cleavage may occur at a consensus pentapyrimidine element 5′-(C/T)CCTT↓, or related sequences in the scissile strand. In one embodiment the scissile bond is situated in the range of 2 to 12 bp from the 3′ end of the duplex DNA. In another embodiment cleavable complex formation by Vaccinia topoisomerase requires six duplex nucleotides upstream and two nucleotides downstream of the cleavage site.

[0437] In some examples, the topoisomerase is DNA topoisomerase I, e.g., a Vaccinia virus topoisomerase I. The topoisomerase may be pre-loaded with a donor polynucleotide. The Vaccinia virus topoisomerase may need a target comprising a 5′-OH group.

### Fanzor Directed Integrase Systems

[0438] Described in some embodiments herein are Fanzor directed integrase systems. Without being bound by theory such systems can couple Fanzor-hased targeting with efficient insertion via the integrase. In some embodiments, the Fanzor directed integrase system can facilitate integration of a polynucleotide, including large polynucleotide, cargos into a recipient polynucleotide. In some embodiments the Fanzor directed integrase system comprises a Fanzor polypeptide and an integrase. In some embodiments, such a system further comprises a reverse transcriptase. In some embodiments, the reverse transcriptase and/or integrase are coupled to (e.g., fused or linked to) the Fnazor polypeptide. In some embodiments, the reverse transcriptase and/or integrase are capable of complexing with or otherwise interacting with the Fanzor polypeptide or sequence otherwise modified by a Fanzor system. In some embodiments, the integrase is a serine integrase. The Fanzor polypeptide is capable of complexing with an omega RNA as previously described herein. In some embodiments, the Fanzor is a catalytically inactive Fanzor. In some embodiments, the Fanzor one or more catalytic activities reduced or eliminated.

[0439] Without being bound by theory, integrases typically insert sequences containing an integrase attachment site (e.g., “attP” or “attB”) into a target containing a related attachment site within a recipient polynucleotide. By using programmable genome editing to place integrase landing sites at desired locations in the genome, this system may be used guide the direct activity of the associated integrase to the specific genomic site.

[0440] In some embodiments, the system comprises an omega RNA that contains an integrase landing (attachment) site (e.g., attB) for an integrase, such as a serine integrase. When copied into the target polynucleotide, which can be in a genome, by the Fanzor-directed integrase system, the landing site can serve as a target for the integrase, which can then direct insertion of a cargo polynucleotide at the integrase site. In some embodiments, the integrase is provided in trans to the Fanzor protein. In some embodiments, the integrase is coupled to or otherwise associated with or complexed with the Fanzor protein. In some embodiments, the cargo polynucleotide inserted is a large polynucleotide.

[0441] A similar approach has been described based on CRISPR-Cas systems. See e.g., Yarnell et al., Nat. Biotechnol. 2022. https://doi.org/10.1038/s41587-022-01527-4, which can be adapted for use with the present invention.

### Fanzor Guided Excision-Transposition Systems

[0442] Embodiments disclosed herein provide an engineered or non-natural guided excision-transposition system. The engineered or non-natural guided excision-transposition system may comprise one or more components of a ωRNA-Fanzor system, e.g., an ωRNA scaffold and spacer (also referred to as the guide) and/or Fanzor polypeptide, and one or more components of a Class II transposon. The components of the ωRNA-Fanzor system can direct the Class II transposon component(s) to retrotransposon to a target nucleic acid sequence and direct its transposition into a recipient polynucleotide.

[0443] For example, the engineered or non-natural guided excision-transposition systems that can include (a) a first Fanzor protein; (b) a first Class II transposon polypeptide coupled to or otherwise capable of complexing with the first Fanzor protein; (c) a first guide molecule capable of forming a first ωRNA-Fanzor complex with the first Fanzor protein and directing site-specific binding to a first target sequence of a first target polynucleotide; (d) a second Fanzor protein; (e) a second Class II transposon polypeptide coupled to or otherwise capable of complexing with the second Fanzor protein; (f) a second guide molecule capable of forming a second ωRNA-Fanzor complex with the first Fanzor protein and directing site-specific binding to a second target sequence of the first target polynucleotide; and (g) a Class II transposon polynucleotide comprising the first target polynucleotide and is capable of forming a complex with the first and second Fanzor protein, the first and second guide molecules, and the first and second Class II transposon polypeptides.

[0444] In some embodiments, the engineered or non-natural guided excision-transposition system can include (h) a third guide molecule capable of complexing with the first Fanzor protein and directing site-specific binding to a first target sequence of a second target polynucleotide, wherein the third guide molecule is optionally coupled to the first Fanzor protein; (i) optionally, a first guide molecule polynucleotide that encodes the third guide molecule; (j) a fourth guide molecule capable of complexing with the second Fanzor protein and directing site-specific binding to a second target sequence of the second target polynucleotide, wherein the fourth guide molecule is optionally coupled to the second Fanzor protein; and (k) optionally, a second guide molecule polynucleotide that encodes the fourth guide molecule.

[0445] In some embodiments, the first and the second Class II transposon polypeptides are capable of excising the first target polynucleotide from the Class II transposon polynucleotide. In some embodiments, the first and the second Class II transposon polypeptides are capable of transposing the first target polynucleotide in the second target polynucleotide. In some embodiments, the first target polynucleotide does not include one or more Class II transposon long terminal repeats.

[0446] The engineered or non-natural guided excision-transposition systems described herein can be based on a Class II transposon or Class II transposon system. The engineered or non-natural guided excision-transposition system may include a first target polynucleotide, also referred to as a donor polynucleotide or transposon and a second target polynucleotide, which is also referred to herein as a recipient polynucleotide. As used herein, “transposon” (also referred to as transposable element) refers to a polynucleotide sequence that is capable of moving form location in a genome to another. There are several classes of transposons. Transposons include retrotransposons (Class I transposons) and DNA transposons (Class II transposons). In some cases, retrotransposons require the transcription of the polynucleotide that is moved (or transposed) in order to transpose the polynucleotide to a new genome or polynucleotide. DNA transposons are those that do not require reverse transcription of the polynucleotide that is moved (or transposed) in order to transpose the polynucleotide to a new genome or polynucleotide.

[0447] Any suitable transposon system can be used. Suitable transposon and systems thereof can include, but are not limited, to Sleeping Beauty transposon system (Tcl/mariner superfamily) (see e.g., Ivics et al. 1997. Cell. 91(4): 501-510), piggyBac (piggyBac superfamily) (see e.g., Li et al. 2013 110(25): E2279-E2287 and Yusa et al. 2011. PNAS. 108(4): 1531-1536), Tol2 (superfamily hAT), Frog Prince (Tcl/mariner superfamily) (see e.g., Miskey et al. 2003 Nucleic Acid Res. 31(23):6873-6881) and variants thereof.

[0448] In some embodiments, the first and/or second Class II transposon polypeptide is a DD[E/D] transposon or transposon polypeptide. In some embodiments, the first and/or the second Class II transposon polynucleotide is a Tcl/mariner, PiggyBac, Frog Prince, Tn3, Tn5, hAT, CACTA, P, Mutator, PIF/Harbinger, Transib, or a Merlin/IS1016 transposon polynucleotide. In some embodiments, the first and/or second Class II transposon polypeptide is a Tcl/mariner, PiggyBac, Frog Prince, Tn3, Tn5, hAT, CACTA, P, Mutator, PIF/Harbinger, Transib, or a Merlin/IS1016 transposon polypeptide.

[0449] Suitable Class II transposon systems and components that can be utilized can also be and are not limited to those described in e.g. and without limitation, Han et al., 2013. BMC Genomics. 14:71, doi: 10.1186/1471-2164-14-71, Lopez and Garcia-Perez. 2010. Curr. Genomics. 11(2):115-128; Wessler. 2006. PNAS. 103(47): 176000-17601; Gao et al., 2017. Marine Genomics. 34:67-77; Bradic et al. 2014. Mobile DNA. 5(12) doi:10.1186/1759-8753-5-12; Li et al., 2013. PNAS. 110(25)E2279-E2287; Kebriaei et al. 2017. Trends in Genetics. 33(11): 852-870); Miskey et al. 2003. Nucleic Acid res. 31(23):6873-6881; Nicolas et al. 2015. Microbiol Spectr. 3(4) doi: 10.1128/microbiolspec.MDNA3-0060-2014); W. S. Reznikoff. 1993. Annu Rev. Microbiol. 47:945-963; Rubin et al. 2001. Genetics. 158(3): 949-957; Wicker et al. 2003. Plant Physiol. 132(1): 52-63; Majumdar and Rio. 2015. Microbiol. Spectr. 3(2) doi: 10.1128/microbiolspec.MDNA3-0004-2014; D. Lisch. 2002. Trends in Plant Sci. 7(11): 498-504; Sinzelle et al. 2007. PNAS. 105(12): 4715-4720; Han et al. 2014; Genome Biol. Evol. 6(7):1748-1757; Grzebelus et al. 2006; Mol. Genet. Genomics. 275(5):450-459; Zhang et al. 2004. Genetics. 166(2):971-986; Chen and Li. 2008. Gene. 408(1-2):51-63; and C. Feschotte. 2004. Mol. Biol. Evol. 21(9):1769-1780.

### Fanzor Retrotransposon Systems

[0450] The systems and compositions herein may comprise a Fanzor polypeptide, one or more nucleic acid components, and one or more components of a retrotransposon, e.g., a non-LTR retrotransposon. The one or more components of a retrotransposon include a retrotransposon protein and retrotransposon RNA. The systems and compositions may be used to insert a donor polynucleotide to a target polynucleotide. The systems and compositions may further comprise a donor polynucleotide.

[0451] In some examples, the present disclosure provides an engineered, non-naturally occurring composition comprising: a Fanzor polypeptide, a non-LTR retrotransposon protein associated with or otherwise capable of forming a complex with the Fanzor polypeptide; a single nucleic acid component capable of forming a complex with the Fanzor polypeptide and directing site-specific binding to a target sequence of a target polynucleotide. The composition may further comprise a donor construct comprising a donor polynucleotide for insertion to the target polynucleotide and located between two binding elements capable of forming a complex with the non-LTR retrotransposon protein. In some cases, the Fanzor polypeptide is engineered to have nickase activity.

[0452] In some examples, the Fanzor polypeptide is fused to the N-terminus of the non-LTR retrotransposon protein. In some examples, the Fanzor polypeptide is fused to the C-terminus of the non-LTR retrotransposon protein.

[0453] The nucleic acid component molecule s may direct the fusion protein to a target sequence 5′ of the targeted insertion site, and wherein the Fanzor polypeptide generates a double-strand break at the targeted insertion site. The nucleic acid component molecule s may direct the fusion protein to a target sequence 3′ of the targeted insertion site, and wherein the Fanzor polypeptide generates a double-strand break at the targeted insertion site.

[0454] The donor polynucleotide may further comprise a polymerase processing element to facilitate 3′ end processing of the donor polynucleotide sequence. The polymerase may be a DNA polymerase, e.g., DNA polymerase I. In some examples, the polymerase may be an RNA polymerase.

[0455] In some examples, the donor polynucleotide further comprises a homology region to the target sequence on the 5′ end of the donor construct, the 3′ end of the donor construct, or both. In some examples, the homology region is from 1 to 50, from 5 to 30, from 8 to 25, e.g., 1, 2, 3, 4, 5, 6, 7, 8, 9, 10, 11, 12, 13, 14, 15, 16, 17, 18, 19, 20, 21, 22, 23, 24, 25, 26, 27, 28, 29, 30, 31, 32, 33, 34, 35, 36, 37, 38, 39, 40, 41, 42, 43, 44, 45, 46, 47, 48, 49, or 50 base pairs in length.

[0456] Native or wild-type non-LTR retrotransposons encode the protein machinery necessary for their self-mobilization. The non-LTR retrotransposon element comprises a DNA element integrated into a host genome. This DNA element may encode one or two open reading frames (ORFs). For example, the R2 element of Bombyx mori encodes a single ORF containing reverse transcriptase (RT) activity and a restriction enzyme-like (REL) domain. L1 elements encode two ORFs, ORF1 and ORF2. ORF1 contains a leucine zipper domain involved in protein-protein interactions and a C-terminal nucleic acid binding domain. ORF2 has a N-terminal apurinic/apyrimidinic endonuclease (APE), a central RT domain, and a C-terminal cysteine histidine rich domain. An example replicative cycle of a non-LTR retrotransposon may comprise transcription of the full-length retrotransposon element to generate an mRNA active element (retrotransposon RNA). The active element mRNA is translated to generate the encoded retrotransposon proteins or polypeptides. A ribonucleoprotein complex comprising the active element and retrotransposon protein or polypeptide is formed and this RNP facilitates integration of the active element into the genome. The RNA-transposase complex nicks the genome. The 3′ end of the nicked DNA serves as a primer to allow the reverse transcription of the transposon RNA into cDNA. Fourth, the transposase proteins integrate the cDNA into the genome.

[0457] Elements of these systems may be engineered to work within the context of the invention. For example, a non-LTR retrotransposon polypeptide may be fused to a site-specific nuclease. The binding elements that allow a non-LTR retrotransposon polypeptide to bind to the native retrotransposon DNA element, may be engineered into a donor construct to facilitate entry of a donor polynucleotide sequence into a target polypeptide.

[0458] In the present invention the protein component of the non-LTR retrotransposon may be connected to or otherwise engineered to form a complex with a site-specific nuclease, e.g., Fanzor polypeptide. The retrotransposon RNA may be engineered to encode a donor polynucleotide sequence. Thus, in certain example embodiments, the Fanzor polypeptide, via formation of a Fanzor polypeptide complex with a nucleic acid component molecule sequence, directs the retrotransposon complex (e.g., the retrotransposon polypeptide(s) and retrotransposon RNA to a target sequence in a target polynucleotide, where the retrotransposon RNP complex facilitates integration of the donor polynucleotide sequence into the target polynucleotide. Accordingly, the one or more non-LTR retrotransposon components may comprise retrotransposon polypeptides, or function domains thereof, that facilitate binding of the retrotransposon RNA, reverse transcription of the retrotransposon RNA into cDNA, and/or integration of the donor polynucleotide into the target polynucleotide, as well as retrotransposon RNA elements modified to encode the donor polynucleotide sequence.

[0459] Examples non-LTR retrotransposons include CRE, R2, R4, L1, RTE, Tad, R1, LOA, I, Jockey, CR1. In one example, the non-LTR retrotransposon is R2. In another example, the non-LTR retrotransposon is L1. Examples of non-LTR retrotransposons may include those described in Christensen S M et al., RNA from the 5′ end of the R2 retrotransposon controls R2 protein binding to and cleavage of its DNA target site, Proc Natl Acad Sci USA. 2006 Nov. 21; 103(47):17602-7; Eickbush T H et al, Integration, Regulation, and Long-Term Stability of R2 Retrotransposons, Microbiol Spectr. 2015 April; 3(2):MDNA3-0011-2014. doi: 10.1128/microbiolspec.MDNA3-0011-2014; Han J S, Non-long terminal repeat (non-LTR) retrotransposons: mechanisms, recent developments, and unanswered questions, Mob DNA. 2010 May 12; 1(1):15. doi: 10.1186/1759-8753-1-15; Malik H S et al., The age and evolution of non-LTR retrotransposable elements, Mol Biol Evol. 1999 June; 16(6):793-805, which are incorporated by reference herein in their entireties.

[0460] Examples of the non-LTR retrotransposon polypeptides also include R2 from Clonorchis sinensis, or Zonotrichia albicollis.

[0461] A non-LTR retrotransposon may comprise multiple retrotransposon polypeptides or polynucleotides encoding same. In one embodiment, the retrotransposon polypeptides may form a complex. For example, a non-LTR retrotransposon is a dimer, e.g., comprising two retrotransposon polypeptides forming a dimer. The dimer subunits may be connected or form a tandem fusion. A Fanzor polypeptide may be associate with (e.g., connected to) one or more subunits of such complex. In some examples, the non-LTR retrotransposon is a dimer of two retrotransposon polypeptides; one of the retrotransposon polypeptides comprises nuclease or nickase activity and is connected with a Fanzor polypeptide.

[0462] The retrotransposon polypeptides may comprise one or more modifications to, for example, enhance specificity or efficiency of donor polynucleotide recognition, target-primed template recognition (TPTR). The retrotransposon polypeptides may also comprise one or more truncations or excisions to remove domains or regions of wild-type protein to arrive at a minimal polypeptide that retain donor polynucleotide recognition and TPTR. In some example embodiments, the native endonuclease activity may be mutated to eliminate endonuclease activity.

[0463] In certain example embodiments, the modifications or truncations of the non-LTR retrotransposon peptide may be in a zinc finger region, a Myb region, a basic region, a reverse transcriptase domain, a cysteine-histidine rich motif, or an endonuclease domain.

[0464] A non-LTR retrotransposon may comprise polynucleotide encoding one or more retrotransposon RNA molecules. The polynucleotide may comprise one or more regulatory elements. The regulatory elements may be promoters. The regulatory elements and promoters on the polynucleotides include those described throughout this application. For example, the polynucleotide may comprise a pol2 promoter, a pol3 promoter, or a T7 promoter.

[0465] In some cases, the polynucleotide encodes a retrotransposon RNA with at least a portion of its sequence complementary to a target sequence. For example, the 3′ end of the retrotransposon RNA may be complementary to a target sequence. The RNA may be complementary to a portion of a nicked target sequence. In one embodiment, a retrotransposon RNA may comprise one or more donor polynucleotides. In certain cases, a retrotransposon RNA may encode one or more donor polynucleotides.

[0466] A retrotransposon RNA may be capable of binding to a retrotransposon polypeptide. Such retrotransposon RNA may comprise one or more elements for binding to the retrotransposon polypeptide. Examples of binding elements include hairpin structures, pseudoknots (e.g., a nucleic acid secondary structure containing at least two stem-loop structures in which half of one stem is intercalated between the two halves of another stem), stem loops, and bulges (e.g., unpaired stretches of nucleotides located within one strand of a nucleic acid duplex). In certain examples, the retrotransposon RNA comprises one or more hairpin structures. In some examples, the retrotransposon RNA comprises one or more pseudoknots. In certain examples, a retrotransposon RNA comprises a sequence encoding a donor polynucleotide and one or more binding elements for forming a complex with the retrotransposon polypeptide. The binding elements may be located on the 5′ end or the 3′ end.

[0467] In one embodiment, a retrotransposon RNA comprises a region capable of hybridizing with an overhang of a target polynucleotide at the target site. The overhang may be a stretch of single-stranded DNA. The overhang may function as a primer for reverse transcription of at least a portion of the retrotransposon RNA to a cDNA. In some cases, a region of the cDNA may be capable of hybridizing a second overhang of the target polynucleotide. The second overhang may function as a primer for the synthesis of a second strand to generate a double-stranded cDNA. The cDNA may comprise a donor polynucleotide sequence. The two overhangs may be from different strands of the target polynucleotide.

### Reverse Transcriptase Domain

[0468] The one or more functional domains may be one or more reverse transcriptase domains. In some embodiments, the systems comprise an engineered system for modifying a target polynucleotide comprising: a Fanzor protein or a variant thereof (e.g., dFanzor); a reverse transcriptase (RT) domain; a RNA template comprising or encoding a donor polynucleotide to be inserted to a target sequence of the target polynucleotide; and an ωRNA molecule (i.e., a naturally single guide RNA molecule comprising a scaffold for reprogamming).

[0469] The reverse transcriptase may generate single-strand DNA based on the RNA template. The single-strand DNA may be generated by a non-retron, retron, or diversity generating retroelement (DGR). In some examples, the single-strand DNA may be generated from a self-priming RNA template. A self-priming RNA template may be used to generate a DNA without the need of a separate primer.

[0470] A reverse transcriptase domain may be a reverse transcriptase or a fragment thereof. A wide variety of reverse transcriptases (RT) may be used in alternative embodiments of the present invention, including prokaryotic and eukaryotic RT, provided that the RT functions within the host to generate a donor polynucleotide sequence from the RNA template. If desired, the nucleotide sequence of a native RT may be modified, for example using known codon optimization techniques, so that expression within the desired host is optimized. A reverse transcriptase (RT) is an enzyme used to generate complementary DNA (cDNA) from an RNA template, a process termed reverse transcription. Reverse transcriptases are used by retroviruses to replicate their genomes, by retrotransposon mobile genetic elements to proliferate within the host genome, by eukaryotic cells to extend the telomeres at the ends of their linear chromosomes, and by some non-retroviruses such as the hepatitis B virus, a member of the Hepadnaviridae, which are dsDNA-RT viruses. Retroviral RT has three sequential biochemical activities: RNA-dependent DNA polymerase activity, ribonuclease H, and DNA-dependent DNA polymerase activity. Collectively, these activities enable the enzyme to convert single-stranded RNA into double-stranded cDNA. In certain embodiments, the RT domain of a reverse transcriptase is used in the present invention. The domain may include only the RNA-dependent DNA polymerase activity. In some examples, the RT domain is non-mutagenic, i.e., does not cause mutation in the donor polynucleotide (e.g., during the reverse transcriptase process). In some examples, the RT domain may be non-retron RT, e.g., a viral RT or a human endogenous RT. In some examples, the RT domain may be retron RT or DGRs RT. In some examples, the RT may be less mutagenic than a counterpart wildtype RT. In some embodiments, the RT herein is not mutagenic.

### Retrons

[0471] In certain embodiments, a donor template for homologous recombination is generated by use of a self-priming RNA template for reverse transcription. A non-limiting example of a self-priming reverse transcription system is the retron system. By the term “retron” it is meant a genetic element which encodes components enabling the synthesis of branched RNA-linked single stranded DNA (msDNA) and a reverse transcriptase. Retrons which encode msDNA are known in the art, for example, but not limited to U.S. Pat. Nos. 6,017,737; 5,849,563; 5,780,269; 5,436,141; 5,405,775; 5,320,958; CA 2,075,515; all of which are herein incorporated by reference.

[0472] In certain embodiments, the reverse transcriptase domain is a retron RT domain. In certain embodiments, the RNA template encodes a retron RNA template that is recognized, and reverse transcribed by the retron reverse transcriptase domain. Conserved across many bacterial species, retrons are highly efficient reverse transcription systems of relatively unknown function. The retron system consists of the retron RT protein, as well as the msr and msd transcripts, which function as the primer and template sequences, respectively. All components of the retron system are expressed from a single open reading frame as a single transcript including the msr-msd and encoding the retron RT protein (Lampson, et al., 2005, Retrons, msDNA, and the bacterial genome. Cytogenet Genome Res 110:491-499). The msr element ORF of a retron provides for the RNA portion of the msDNA molecule, while the msd element ORF provides for the DNA portion of the msDNA molecule. The primary transcript from the msr-msd region is thought to serve as both a template and a primer to produce the msDNA. Synthesis of msDNA is primed from an internal rG residue of the RNA transcript using its 2′-OH group. Modification of msd, or msr may also be made to permit insertion of a RNA template encoding a donor polynucleotide within the msd without altering the functioning of or the production of msDNA. The RNA template encoding a donor polynucleotide sequence may be any length but is preferably less than about 5 kb nucleotides, or also less than about 2 kb, or also less than 500 bases, provided that an msDNA product is produced.

### Fanzor Diversity Generating Retroelement System

[0473] In certain embodiments, the one or more functional domains may be a diversity generating retroelement(s) (e.g., DGR described in US20100041033A1). In some embodiments, the DGR may insert a donor polynucleotide with its homing mechanism. For example, the DGR may be associated with a catalytically inactive Fanzor protein (e.g., a dead Fanzor), and integrate the single-strand DNA using a homing mechanism. In some examples, the DGR may be less mutagenic than a counterpart wild type DGR. In some examples, the DGR is not error-prone. In some embodiments, the DGR herein is not mutagenic. The non-mutagenic DGR may be a mutant of a wild type DGR. As used herein, the term “DGR” encompasses both diversity generating retroelement polynucleotides and proteins encoded by diversity generating retroelement polynucleotides. In some examples, DGR may be proteins encoded by diversity generating retroelement polynucleotides having reverse transcriptase activity. In some examples, DGR may be proteins encoded by diversity generating retroelement polynucleotides having reverse transcriptase activity and integrase activity. In some cases, the template or donor polynucleotide may be encoded by a diversity generating retroelement polynucleotide. In certain cases, the template may be a polynucleotide different from the diversity generating retroelement polynucleotide, e.g., provided as a separate construct or molecule.

[0474] In some embodiments, the DGR herein may also include a Group II intron (and any proteins and polynucleotides encoded), which are mobile ribozymes that self-splice from precursor RNAs to yield excised intron lariat RNAs, which then invade new genomic DNA sites by reverse splicing. Examples of Group II intron include those described in Lambowitz A M et al., Group II Introns: Mobile Ribozymes that Invade DNA, Cold Spring Harb Perspect Biol. 2011 August; 3(8): a003616.

[0475] In some embodiments, the diversity-generating retroelements (DGRs) are genetic elements that can produce targeted, massive variations in the genomes that carry these elements. In some embodiments, the DGR systems rely on error-prone reverse transcriptases to produce mutagenized cDNA (containing A-to-N mutations) from a template region (TR), to replace a segment called a variable region (VR) that is similar to the TR region—this process is called mutagenic retrohoming (see, e.g., Sharifi and Ye, MyDGR: a server for identification and characterization of diversity-generating retroelements. Nucleic Acids Res. 2019 Jul. 2; 47(W1): W289-W294). DGRs may include a unique family of retroelements that generate sequence diversity of DNA. They exist widely in bacteria, archaea, phage and plasmid, and benefit their hosts by introducing variations and accelerating the evolution of target proteins (see, e.g., Yan et al., Discovery and characterization of the evolution, variation and functions of diversity-generating retroelements using thousands of genomes and metagenomes. BMC Genomics. 2019; 20: 595). The first DGR was discovered in a Bordetella phage, BPP-1. Bordetella causes the respiratory infection in humans and many other mammals, controlled by the BvgAS signal transduction system. The surface of Bordetella is highly variable owing to the dynamic gene expression in the infectious cycle. The invasion of BPP-1 to Bordetella relies on the phage tail fiber protein Mtd. With the process of mutagenic reverse transcription and cDNA integration, DGR may introduce multiple nucleotide substitutions to Mtd gene and generates different receptor-binding molecules, thus making BPP-1 the ability to invade Bordetellae with diverse cell surfaces.

[0476] The systems may be used to generate an ssDNA donor using a retron- or DGR RT, which is then integrated by homologous recombination upon target cleavage or nicking using a Fanzor polypeptide. In some embodiments, the systems may comprise DGRs and/or Group-II intron reverse transcriptases. The homing mechanism of DGRs or Group-II introns may be used in modifying a target polynucleotide. The DGRs or Group-II introns reverse transcriptase may be guided to a target polynucleotide by tethering to a nuclease-dead Fanzor polypeptide, TALE, or ZF protein. In another embodiment, a non-retron/DGR reverse transcriptase (e.g., a viral RT) may be used for generating cDNA off of a self-priming RNA. In some embodiments, a ssDNA may be generated by an RT, but integrate it using a dead Fanzor enzyme, creating an accessible R-loop instead of nicking/cleaving.

### Fanzor Topoisomerase Systems

[0477] The one or more functional domains may be one or more topoisomerase domains. In some embodiments, an engineered system for modifying a target polynucleotide comprising: a Fanzor protein; a topoisomerase domain; and a nucleic acid template comprising or encoding a donor polynucleotide to be inserted to a target sequence of the target polynucleotide. In some examples, two or more of: the Fanzor protein; topoisomerase domain; and nucleic acid template may form a complex. In some examples, two or more of: the Fanzor protein; topoisomerase domain, may be comprised in a fusion protein.

[0478] Topoisomerases are a class of enzymes that modify the topological state of DNA via the breakage and rejoining of nucleic acid strands. In some cases, a topoisomerase may be a DNA topoisomerase, which is an enzyme that controls and alters the topologic states of DNA during transcription and catalyzes the transient breaking and rejoining of a single strand of DNA which allows the strands to pass through one another, thus altering the topology of DNA.

[0479] In some embodiments, the topoisomerase domain is capable of ligating the donor polynucleotide with the target polynucleotide. The ligation may be achieved by sticky end or blunt end ligation. In an example, the donor polynucleotide may comprise an overhang comprising a sequence complementary to a region of the target polynucleotide. Examples of ligating the donor polynucleotide with the target polynucleotide include those of TOPO cloning, e.g., those described in “The Technology Behind TOPO Cloning,” at www.thermofisher.com/us/en/home/life-science/cloning/topo/topo-resources/the-technology-behind-topo-cloning.html.

[0480] In some embodiments, the topoisomerase domain may be associated with the donor polynucleotide. For example, the topoisomerase domain is covalently linked to the donor polynucleotide.

[0481] In some embodiments, a topoisomerase domain may be provided together with, e.g., associated (e.g., fused) with a Fanzor protein (e.g., a Fanzor protein or a variant thereof such as a dead Fanzor or a Fanzor nickase). Alternatively or additionally, the topoisomerase domain may be on a molecule different from the Fanzor protein. In some cases, the topoisomerase domain may be associated with a donor polynucleotide. For example, the topoisomerase domain may be pre-loaded covalently with a donor DNA molecule. Such design may allow for efficient ligation of only a specific cargo. The topoisomerase domain may ligate the donor polynucleotide (e.g., a DNA molecule) to a target site on a target polynucleotide (e.g., a free double-stranded DNA end). In some embodiments, the donor polynucleotide may have an overhang that comprises a sequence complementary to a region of the target polynucleotide. For example, the overhang may invade into the target polynucleotide at a cut site generated by the Fanzor protein.

[0482] Examples of topoisomerases include type I, including type IA and type IB topoisomerases, which cleave a single strand of a double-stranded nucleic acid molecule, and type II topoisomerases (e.g., gyrases), which cleave both strands of a double-stranded nucleic acid molecule.

[0483] Type IA and IB topoisomerases cleave one strand of a double-stranded nucleic acid molecule. In some examples, the cleavage of a double-stranded nucleic acid molecule by type IA topoisomerases generates a 5′ phosphate and a 3′ hydroxyl at the cleavage site, with the type IA topoisomerase covalently binding to the 5′ terminus of a cleaved strand. Cleavage of a double-stranded nucleic acid molecule by type IB topoisomerases may generate a 3′ phosphate and a 5′ hydroxyl at the cleavage site, with the type IB topoisomerase covalently binding to the 3′ terminus of a cleaved strand.

[0484] Examples of Type IA topoisomerases include E. coli topoisomerase I, E. coli topoisomerase III, eukaryotic topoisomerase II, archeal reverse gyrase, yeast topoisomerase III, Drosophila topoisomerase III, human topoisomerase III, Streptococcus pneumoniae topoisomerase III, and the like, including other type IA topoisomerases. A DNA-protein adduct is formed with the enzyme covalently binding to the 5′-thymidine residue, with cleavage occurring between the two thymidine residues.

[0485] Examples of Type IB topoisomerases include the nuclear type I topoisomerases present in all eukaryotic cells and those encoded by Vaccinia and other cellular poxviruses. The eukaryotic type IB topoisomerases are exemplified by those expressed in yeast, Drosophila and mammalian cells, including human cells. Viral type IB topoisomerases are exemplified by those produced by the vertebrate poxviruses (Vaccinia, Shope fibroma virus, ORF virus, fowlpox virus, and molluscum contagiosum virus), and the insect poxvirus (Amsacta moorei entomopoxvirus).

[0486] Examples of Type II topoisomerases include, bacterial gyrase, bacterial DNA topoisomerase IV, eukaryotic DNA topoisomerase II, and T-even phage encoded DNA topoisomerases. Type II topoisomerases may have both cleaving and ligating activities. Substrate double-stranded nucleic acid molecules of type II topoisomerase can be prepared such that the type II topoisomerase can form a covalent linkage to one strand at a cleavage site. For example, calf thymus type II topoisomerase can cleave a substrate ds nucleic acid molecule containing a 5′ recessed topoisomerase recognition site positioned three nucleotides from the 5′ end, resulting in dissociation of the three nucleic acid molecule 5′ to the cleavage site and covalent binding of the topoisomerase to the 5′ terminus of the ds nucleic acid molecule. Furthermore, upon contacting such a type II topoisomerase-charged ds nucleic acid molecule with a second nucleic acid molecule containing a 3′ hydroxyl group, the type II topoisomerase can ligate the sequences together, and then is released from the recombinant nucleic acid molecule.

[0487] In some examples, the topoisomerase is DNA topoisomerase I, e.g., a Vaccinia virus topoisomerase I. The topoisomerase may be pre-loaded with a donor polynucleotide. The Vaccinia virus topoisomerase may need a target comprising a 5′-OH group.

### Fanzor Phosphatase Systems

[0488] The systems herein may further comprise a phosphatase domain. A phosphatase is an enzyme capable of removing a phosphate group from a molecule e.g., a nucleic acid such as DNA. Examples of phosphatases include calf intestinal phosphatase, shrimp alkaline phosphatase, Antarctic phosphatase, and APEX alkaline phosphatase.

[0489] In some examples, the 5′-OH group of in the target polynucleotide may be generated by a phosphatase. A topoisomerase compatible with a 5′ phosphate target may be used to generate stable loaded intermediates. In some cases, a Fanzor polypeptide that leaves a 5′ OH after cleaving the target polynucleotide may be used. In some cases, the phosphatase domain may be associated with (e.g., fused to) the Fanzor protein. The phosphatase domain may be capable of generating a —OH group at a 5′ end of the target polynucleotide. The phosphatase may be delivered separated from other components in the system, e.g., as a separate protein, on a separate vector from other components.

### Fanzor Polymerase Systems

[0490] The systems herein may further comprise a polymerase domain. A polymerase refers to an enzyme that synthesizes chains of nucleic acids. The polymerase may be a DNA polymerase or an RNA polymerase.

[0491] In some embodiments, the systems comprise an engineered system for modifying a target polynucleotide comprising: a Fanzor protein; a DNA polymerase domain; and a DNA template comprising a donor polynucleotide to be inserted to a target sequence of the target polynucleotide. In some examples, two or more of: the Fanzor protein; DNA polymerase domain; and DNA template may form a complex. In some examples, two or more of: the Fanzor protein; DNA polymerase domain; are comprised in a fusion protein. For example, the Fanzor protein and DNA polymerase domain may be comprised in a fusion protein.

[0492] In some embodiments, the systems may comprise a Fanzor enzyme (or variant thereof such as a dFanzor or Fanzor nickase) and a DNA polymerase (e.g., phi29, T4, T7 DNA polymerase). The systems may further comprise a single-stranded DNA or double-stranded DNA template. The DNA template may comprise i) a first sequence homologous to a target site of the Fanzor protein on the target polynucleotide, and/or ii) a second sequence homologous to another region of the target polynucleotide. In some embodiments, the template may be a synthetic single-stranded or PCR-generated DNA molecule, (optionally end-protected by modified nucleotides), or a viral genome (e.g., AAV). In another embodiment, the template is generated using a reverse transcriptase. When the system is delivered into a cell, an endogenous DNA polymerase in the cell may be used. Alternatively or additionally, an exogenous DNA polymerase may be expressed in the cell.

[0493] The DNA template may be end-protected by one or more modified nucleotides, or comprises a portion of a viral genome. In some embodiment, the DNA template comprises LNA or other modifications (e.g., at the 3′ end). The presence of LNA and/or the modifications may lead to more efficient annealing with the 3′ flap generated by Fanzor protein cleavage.

[0494] Examples of DNA polymerase include Taq, Tne (exo −), Tma (exo −), Pfu (exo −), Pwo (exo −), Thermoanaerobacter thermohydrosulfuricus DNA polymerase, Thermococcus litoralis DNA polymerase I, E. coli DNA polymerase I, Taq DNA polymerase I, Tth DNA polymerase I, Bacillus stearothermophilus (Bst) DNA polymerase I, E. coli DNA polymerase III, bacteriophage T5 DNA polymerase, bacteriophage M2 DNA polymerase, bacteriophage T4 DNA polymerase, bacteriophage T7 DNA polymerase, bacteriophage phi29 DNA polymerase, bacteriophage PRD1 DNA polymerase, bacteriophage phi15 DNA polymerase, bacteriophage phi21DNA polymerase, bacteriophage PZE DNA polymerase, bacteriophage PZA DNA polymerase, bacteriophage Nf DNA polymerase, bacteriophage M2Y DNA polymerase, bacteriophage B103 DNA polymerase, bacteriophage SF5 DNA polymerase, bacteriophage GA-1 DNA polymerase, bacteriophage Cp-5 DNA polymerase, bacteriophage Cp-7 DNA polymerase, bacteriophage PR4 DNA polymerase, bacteriophage PR5 DNA polymerase, bacteriophage PR722 DNA polymerase and bacteriophage L17 DNA polymerase.

### Fanzor Ligase Systems

[0495] In general, the systems comprise a Fanzor protein, and a ligase associated with the Fanzor protein. The Fanzor protein may be recruited to the target sequence by an ωRNA comprising a spacer capable of binding the target sequence and generate a break on the target sequence. The ωRNA may further comprise a template sequence with desired mutations or other sequence elements. The template sequence may be ligated to the target sequence to introduce the mutations or other sequence elements to the nucleic acid molecule. The Fanzor protein may be a nickase that generates a single-strand break on nucleic acid molecule, and the ligase may be a single-strand DNA ligase. In some embodiments, the systems comprise a pair of Fanzor-ligases complexes with two distinct ωRNA sequences. Each Fanzor-ligase complex can target one strand of a double-stranded polynucleotide and work together to effectively modify the sequence of the double-stranded polynucleotides.

[0496] In some examples, the Fanzor is associated with a ligase or functional fragment thereof. The ligase may ligate a single-strand break (a nick) generated by the Fanzor. In certain cases, the ligase may ligate a double-strand break generated by the Fanzor. In certain examples, the Fanzor is associated with a reverse transcriptase or functional fragment thereof.

[0497] The present invention further provides systems and methods of modifying a nucleic acid sequence using a pair of distinct Fanzor-ligase-ωRNA complexes, said systems and methods comprising: (a) an engineered Fanzor protein connected to or complexed with a ligase; (b) two distinct ωRNA sequences complexed with such Fanzor-ligase protein complex to form a first and a second distinct Fanzor-ligase ωRNA complexes; (c) the first Fanzor-ligase-ωRNA complex binding to one strand of a target double-stranded polynucleotide sequence, and the second Fanzor-ligase-ωRNA complex binding to another strand of the target double-stranded polynucleotide sequence; (d) upon binding of the said complexes to the locus of interest the effector protein induces the modification of the sequences associated with or at the target locus of interest, whereby the two Fanzor-ligase-ωRNA complexes work together on different strands of the double-stranded target sequence and modify the sequence.

[0498] One of the advantages of using such a “pair” of Fanzor-ligase-CoRNAcomplexes includes high efficiency in modifying the sequence associated with or at the locus of interest of target double-stranded polynucleotides.

[0499] In some embodiments, the Fanzor protein can be a nickase. In a preferred embodiment, a ligase is linked to the Fanzor protein. The ligase can ligate the donor sequence to the target sequence. The ligase can be a single-strand DNA ligase or a double-strand DNA ligase. The ligase can be fused to the carboxyl-terminus of a Fanzor protein, or to the amino-terminus of a Fanzor protein.

[0500] As used herein the term “ligase” refers to an enzyme, which catalyzes the joining of breaks (e.g., double-stranded breaks or single-stranded breaks (“nicks”) between adjacent bases of nucleic acids. For example, a ligase may be an enzyme capable of forming intra- or inter-molecular covalent bonds between a 5′ phosphate group and a 3′ hydroxyl group. The term “ligate” refers to the reaction of covalently joining adjacent oligonucleotides through formation of an internucleotide linkage.

[0501] DNA ligases fall into two general categories: ATP-dependent DNA ligases (EC 6.5.1.1), and NAD (+) dependent DNA ligases (EC 6.5.1.2). NAD (+) dependent DNA ligases are found only in bacteria (and some viruses) while ATP-dependent DNA ligases are ubiquitous. The ATP-dependent DNA ligases can be divided into four classes: DNA ligase I, II, III, and IV. DNA ligase I links Okazaki fragments to form a continuous strand of DNA; DNA ligase II is an alternatively spliced form of DNA ligase III, found only in non-dividing cells; DNA ligase III is involved in base excision repair; and DNA ligase IV is involved in the repair of DNA double-strand breaks by non-homologous end joining (NHEJ). Amongst all ligases, there are two types of prokaryotic and one type of eukaryotic ligases that are particularly well suited for facilitating the blunt-ended, double-stranded DNA ligation: Prokaryotic DNA ligases (T3 and T4) and Eukaryotic DNA ligase (Ligase 1).

[0502] In some cases, the ligase is specific for double-stranded nucleic acids (e.g., dsDNA, dsRNA, RNA/DNA duplex). An example of a ligase specific for double-stranded DNA and DNA/RNA hybrids is T4 DNA ligase. In some cases, the ligase is specific for single-stranded nucleic acids (e.g., ssDNA, ssRNA). An example of such ligase is CircLigase II. In some cases, the ligase is specific for RNA/DNA duplexes. In some cases, the ligase is able to work on single-stranded, double-stranded, and/or RNA/DNA nucleic acids in any combination.

[0503] In some cases, the ligase may be a pan-ligase, which is a single ligase with the ability to ligate both DNA and RNA targets. The ligase may be specific for a target (e.g., DNA-specific or RNA-specific). In some cases, the ligase may be a dual ligase system that include DNA-specific, RNA-specific, and/or pan-ligases, in any combination.

[0504] Examples of ligases that can be used with the disclosure include T4 DNA Ligase, T3 DNA Ligase, T7 DNA Ligase, E. coli DNA Ligase, HiFi Taq DNA Ligase, 9° N™ DNA Ligase, Taq DNA Ligase, SplintR® Ligase (also known as. PBCV-1 DNA Ligase or Chlorella virus DNA Ligase), Thermostable 5′ AppDNA/RNA Ligase, T4 RNA Ligase, T4 RNA Ligase 2, T4 RNA Ligase 2 Truncated, T4 RNA Ligase 2 Truncated K227Q, T4 RNA Ligase 2, Truncated KQ, RtcB Ligase (joins single stranded RNA with a 3″-phosphate or 2′,3′-cyclic phosphate to another RNA), CircLigase II, CircLigase ssDNA Ligase, CircLigase RNA Ligase, or Ampligase® Thermostable DNA Ligas, NAD-dependent ligases including Taq DNA ligase, Thermus filiformis DNA ligase, Escherichia coli DNA ligase, Tth DNA ligase, Thermus scotoductus DNA ligase (I and II), thermostable ligase, Ampligase thermostable DNA ligase, VanC-type ligase, 9° N DNA Ligase, Tsp DNA ligase, and novel ligases discovered by bioprospecting; ATP-dependent ligases including T4 RNA ligase, T4 DNA ligase, T3 DNA ligase, T7 DNA ligase, Pfu DNA ligase, DNA ligase I, DNA ligase III, DNA ligase IV, and novel ligases discovered by bioprospecting, and wild-type, mutant isoforms, and genetically engineered variants thereof. In a particular example, the ligase is a

[0505] In some embodiments, the examples of the ligases include those used in sequencing by synthesis or sequencing by ligation reactions.

### Fanzor Helitron Systems

[0506] The systems and compositions herein may comprise a Fanzor polypeptide, one or more nucleic acid components, and one or more components of a helitron. The systems and compositions may be used to insert a donor polynucleotide to a target polynucleotide. The systems and compositions may further comprise a donor polynucleotide.

[0507] The term “helitron”, as used herein, refers to a polynucleotide (or nucleic acid segment), recognized as a transposon that captures and mobilizes gene fragments in eukaryotes. The term “helitron” as used herein refers to transposase that comprises an endonuclease domain and a C-terminal helicase domain. Helitrons are rolling-circle RNA transposons. In particular embodiments, the helitron encodes a 1400 to about 2000 amino acid, or about 1800 amino acid multidomain transposase. In embodiments, the helitron comprises a hairpin near the 3′end to function as a transposition terminator. In embodiments, the transposon comprises a RepHel motif comprising a replication initiator (Rep) and a DNA helicase (hel) domain. See, Thomas J. & Pritham E. J. Helitrons, the eukaryotic rolling-circle transposable elements. Microbiol. Spectr. 3, 893-926 (2015). In embodiments, the helitron comprises a Rep nuclease domain and C-terminal helicase domain and inserts between an AT dinucleotide in single strand DNA. In an aspect, the C-terminal helicase unwinds the DNA in a 5′ to 3′ direction. The HUH nuclease domain may comprise one or two active site tyrosine residues, in embodiments, is a 2 Tyrosine (Y2) HUH endonuclease domain. Helitrons can encompass helentron, proto-helentron and helitron2 type proteins, structures of which can be as described in Thomas et al., 2015 at FIGS. 1 and 3, incorporated specifically by reference. Particular organisms in which the helitron or helentrons have been found can include those in Table 1 of Thomas J. & Pritham E. J. Helitrons, the eukaryotic rolling-circle transposable elements. Microbiol. Spectr. 3, 893-926 (2015), incorporated herein by reference. Similarly, helitrons can be identified based at least in part on the Rep motif, and conserived residues in the helitrons, and according to the alignment sequence of FIG. 2 of Thomas J. & Pritham E. J. Helitrons, the eukaryotic rolling-circle transposable elements. Microbiol. Spectr. 3, 893-926 (2015), specifically incorporated herein by reference.

[0508] The expression “helitron reaction” used herein refers to a reaction wherein a transposase inserts a donor polynucleotide sequence in or adjacent to an insertion site on a target polynucleotide. The insertion site may contain a sequence or secondary structure recognized by the helitron and/or an insertion motif sequence in the target polynucleotide into which the donor polynucleotide sequence may be inserted.

[0509] As described in Grabundzija 2018, the helitron terminal sequences contains a distinct ˜150 base pairs (bp) long sequence with an absolutely conserved dinucleotide at the end of left terminal sequence (LTS), and a tetranucleotide at the end of right terminal sequence (RTS) which is preceded by a palindromic sequence that can form a hairpin structure. Grabundzija et al., Nat. Commun. 2018; 9: 1278; doi:10.1035/s41467-018-03688-w.

[0510] The helitron end sequences may be responsible for identifying the donor polynucleotide for transposition. The helitron end sequences may be the DNA sequences used to perform a transposition reaction, the end sequences may be referred to herein as right terminal sequences and left terminal sequence. The donor polynucleotide can be configured to comprise a first and second helitron recognition sequence that are at least 80%, 85%, 90%, 95% 96%, 97%, 98%, 99% or 100% complementary to a left terminal sequence and/or a right terminal sequence of a polynucleotide encoding the helitron polypeptide.

[0511] In an aspect, the palindromic sequence may be located upstream of the right terminal sequence, for example, about 5, 10, 15, 20, 25, 30, 35 nucleotides upstream of the right terminal sequence end, or about 10 to 15 nucleotides upstream of the right terminal sequence end, about 10 to 12 nucleotides or about 11 nucleotides upstream of the right terminal sequence end. Ivana Grabundzija, Nat Commun. 2016; 7:10716, doi:10.1038/ncomms10716, incorporated herein by reference.

[0512] Exemplary helitrons can be identified using software, for example (EAHelitron) that has been used to identify Helitrons in a wide range of plant genomes. See, Hu, K., Xu, K., Wen, J. et al. Helitron distribution in Brassicaceae and whole Genome Helitron density as a character for distinguishing plant species. BMC Bioinformatics 20, 354 (2019). doi: 10.1186/s12859-019-2945-8, incorporated herein by reference.

[0513] The helitron may be derived from a eukaryote. In an aspect, the helitron is derived from a mammalian genome, in an aspect, vespertilionid bats, e.g. Helibat. In embodiments, the helitron is derived from derived from a Helibatl transposon. In embodiments, the helitron is Helraiser, the full DNA sequence of the consensus transposon, including left terminal and right terminal sequences as well as hairpin identified is provided in Grabundzija, 2016 at Supplementary FIG. 1, specifically incorporated herein by reference. In an aspect, the helitron is flanked by left and right terminal sequences of the transposon. In an aspect, the left terminal sequence and right terminal sequence terminates with the conserved 5′-TC/CTAG-3′ motif. In one embodiment, the helitron may comprise a palindromic sequence that is about 10 to about 35, or about 5-25 bp or about 19-bp-long palindromic sequence with the potential to form a hairpin structure.

[0514] Elements of these systems may be engineered to work within the context of the invention. For example, a helitron polypeptide may be fused to a polypeptide capable of generating an R-loop. Fusion may be by any appropriate linker, in an exemplary embodiment, XTEN16. The binding elements that allow a helitron polypeptide to bind, for example, the use of sequences complementary to the right terminal sequence and the left terminal sequence of the helitron may be engineered into a donor construct to facilitate entry of a donor polynucleotide sequence into a target polynucleotide.

[0515] In certain example embodiments, the Isc polypeptide, via formation of complex with a nucleic acid component sequence, directs the helitron polypeptide to a target sequence in a target polynucleotide, where the helitron facilitates integration of a donor polynucleotide sequence into the target polynucleotide.

[0516] The helitron polypeptides may also comprise one or more truncations or excisions to remove domains or regions of wild-type protein to arrive at a minimal polypeptide, alter functionality according to the system in which the helitron is used, or mutated to enhance or diminish particular activities associated with the helitron, i.e., nuclease activity or helicase activity.

### Multiplexing

[0517] In one embodiment, Fanzor polypeptides may be used in a multiplex (tandem) targeting approach. For example, Fanzor polypeptide herein can employ more than one nucleic acid component molecule without losing activity. This may enable the use of the Fanzor polypeptide, systems or complexes as defined herein for targeting multiple DNA targets, genes or gene loci, with a single enzyme, system or complex as defined herein. The nucleic acid component molecules may be tandemly arranged, optionally separated by a nucleotide sequence such as a conserved nucleotide sequence as defined herein. The position of the different nucleic acid component molecules is the tandem does not influence the activity.

[0518] In one aspect, the Fanzor polypeptides may be used for tandem or multiplex targeting. It is to be understood that any of the Fanzor polypeptides, complexes, or compositions herein elsewhere may be used in such an approach. Any of the methods, products, compositions and uses as described herein elsewhere are equally applicable with the multiplex or tandem targeting approach further detailed below. By means of further guidance, the following particular aspects and embodiments are provided.

[0519] In one aspect, the invention provides for the use of a Fanzor polypeptide, complex or system as defined herein for targeting multiple gene loci. In one embodiment, this can be established by using multiple (tandem or multiplex) nucleic acid component molecule sequences.

[0520] In one aspect, the invention provides methods for using one or more elements of a Fanzor polypeptide, complex or system as defined herein for tandem or multiplex targeting, wherein said system herein comprises multiple nucleic acid component molecule sequences. Said sequences are separated by a nucleotide sequence, such as a conserved nucleotide sequence as defined herein elsewhere.

[0521] The Fanzor polypeptides, compositions, systems or complexes as defined herein provides an effective means for modifying multiple target polynucleotides. The Fanzor polypeptide, system or complex as defined herein has a wide variety of utility including modifying (e.g., deleting, inserting, translocating, inactivating, activating) one or more target polynucleotides in a multiplicity of cell types. As such the Fanzor polypeptide, system or complex as defined herein of the invention has a broad spectrum of applications in, e.g., gene therapy, drug screening, disease diagnosis, and prognosis, including targeting multiple gene loci within a single system.

[0522] In one aspect, the present disclosure provides a Fanzor polypeptide, system or complex as defined herein, having a Fanzor polypeptide having at least one destabilization domain associated therewith, and multiple nucleic acid component molecule that target multiple nucleic acid molecules such as DNA molecules, whereby each of said multiple nucleic acid component molecules specifically targets its corresponding nucleic acid molecule, e.g., DNA molecule. Each nucleic acid molecule target, e.g., DNA molecule can encode a gene product or encompass a gene locus. Using multiple nucleic acid component molecules hence enables the targeting of multiple gene loci or multiple genes. In one embodiment the Fanzor polypeptide may cleave the DNA molecule encoding the gene product. In one embodiment expression of the gene product is altered. The Fanzor polypeptide and the nucleic acid component molecules do not naturally occur together. The present disclosure comprehends the nucleic acid component molecules comprising tandemly arranged nucleic acid component molecule. The present disclosure further comprehends coding sequences for the Fanzor polypeptide being codon optimized for expression in a eukaryotic cell. In an embodiment the eukaryotic cell is a mammalian cell, a plant cell or a yeast cell and in a more preferred embodiment the mammalian cell is a human cell. Expression of the gene product may be decreased. The Fanzor polypeptide may form part of a system or complex, which further comprises tandemly arranged nucleic acid component molecule comprising a series of 2, 3, 4, 5, 6, 7, 8, 9, 10, 15, 25, 25, 30, or more than 30 nucleic acid component molecules, each capable of specifically hybridizing to a target sequence in a genomic locus of interest in a cell. In one embodiment, the functional system or complex binds to the multiple target sequences. In one embodiment, the functional system or complex may edit the multiple target sequences, e.g., the target sequences may comprise a genomic locus, and in one embodiment, there may be an alteration of gene expression. In one embodiment, the functional system or complex may comprise further functional domains. In one embodiment, the invention provides a method for altering or modifying expression of multiple gene products. The method may comprise introducing into a cell containing said target nucleic acids, e.g., DNA molecules, or containing and expressing target nucleic acid, e.g., DNA molecules; for instance, the target nucleic acids may encode gene products or provide for expression of gene products (e.g., regulatory sequences).

[0523] In one embodiment, the Fanzor polypeptide used for multiplex targeting is associated with one or more functional domains. In some more specific embodiments, the Fanzor polypeptide used for multiplex targeting is a dead Fanzor polypeptide. The inventors have found that the Fanzor polypeptide as described herein may enable improved and/or direct access to one or more nucleotides involved in the DNA:RNA duplex.

### Inducible Systems

[0524] In one embodiment, a Fanzor polypeptide may form a component of an inducible system. The inducible nature of the system would allow for spatiotemporal control of gene editing or gene expression using a form of energy. The form of energy may include but is not limited to electromagnetic radiation, sound energy, chemical energy and thermal energy. Examples of inducible system include tetracycline inducible promoters (Tet-On or Tet-Off), small molecule two-hybrid transcription activations systems (FKBP, ABA, etc.), or light inducible systems (Phytochrome, LOV domains, or cryptochrome). In one embodiment, the Fanzor polypeptide may be a part of a Light Inducible Transcriptional Effector (LITE) to direct changes in transcriptional activity in a sequence-specific manner. The components of a light may include a Fanzor polypeptide, a light-responsive cytochrome heterodimer (e.g., from Arabidopsis thaliana), and a transcriptional activation/repression domain. Further examples of inducible DNA binding proteins and methods for their use are provided in US Provisional Application Nos. 61/736,465 and U.S. 61/721,283, and International Patent Publication No. WO 2014/018423 A2 which is hereby incorporated by reference in its entirety.

### Self-Inactivating Systems

[0525] Once all copies of a gene in the genome of a cell have been edited, continued expression of the system in that cell is no longer necessary. Indeed, sustained expression would be undesirable in case of off-target effects at unintended genomic sites, etc. Thus time-limited expression would be useful. Inducible expression offers one approach, but in addition Applicants have engineered a self-Inactivating system that relies on the use of a non-coding nucleic acid component molecule target sequence within the vector itself. Thus, after expression begins, the system will lead to its own destruction, but before destruction is complete it will have time to edit the genomic copies of the target gene (which, with a normal point mutation in a diploid cell, requires at most two edits). Simply, the self-inactivating system includes additional RNA (e.g., nucleic acid component molecule) that targets the coding sequence for the Fanzor polypeptide itself or that targets one or more non-coding nucleic acid component molecule target sequences complementary to unique sequences present in one or more of the following: (a) within the promoter driving expression of the non-coding RNA elements, (b) within the promoter driving expression of the Fanzor polypeptide gene, (c) within 100 bp of the ATG translational start codon in the Fanzor polypeptide coding sequence, (d) within the inverted terminal repeat (iTR) of a viral delivery vector, e.g., in the AAV genome.

[0526] In some aspects, a single nucleic acid component molecule is provided that is capable of hybridization to a sequence downstream of a Fanzor polypeptide start codon, whereby after a period of time there is a loss of the Fanzor polypeptide expression. In some aspects, one or more nucleic acid component molecule(s) are provided that are capable of hybridization to one or more coding or non-coding regions of the polynucleotide encoding the system, whereby after a period of time there is a inactivation of one or more, or in some cases all, of the system. In some aspects of the system, and not to be limited by theory, the cell may comprise a plurality of complexes, wherein a first subset of complexes comprise a first nucleic acid component molecule capable of targeting a genomic locus or loci to be edited, and a second subset of complexes comprise at least one second nucleic acid component molecule capable of targeting the polynucleotide encoding the system, wherein the first subset of complexes mediate editing of the targeted genomic locus or loci and the second subset of complexes eventually inactivate the system, thereby inactivating further expression in the cell.

[0527] The various coding sequences (Fanzor polypeptide and nucleic acid component molecule) can be included on a single vector or on multiple vectors. For instance, it is possible to encode the enzyme on one vector and the various RNA sequences on another vector, or to encode the enzyme and one nucleic acid component molecule on one vector, and the remaining nucleic acid component molecule on another vector, or any other permutation. In general, a system using a total of one or two different vectors is preferred.

[0528] Where multiple vectors are used, it is possible to deliver them in unequal numbers, and ideally with an excess of a vector which encodes the first nucleic acid component molecule relative to the second nucleic acid component molecule, thereby assisting in delaying final inactivation of the system until genome editing has had a chance to occur.

[0529] The first nucleic acid component molecule can target any target sequence of interest within a genome, as described elsewhere herein. The second nucleic acid component molecule targets a sequence within the vector which encodes the Fanzor polypeptide, and thereby inactivates the enzyme's expression from that vector. Thus, the target sequence in the vector must be capable of inactivating expression. Suitable target sequences can be, for instance, near to or within the translational start codon for the Fanzor polypeptide coding sequence, in a non-coding sequence in the promoter driving expression of the non-coding RNA elements, within the promoter driving expression of the Fanzor polypeptide gene, within 100 bp of the ATG translational start codon in the Fanzor polypeptide coding sequence, and/or within the inverted terminal repeat (iTR) of a viral delivery vector, e.g., in the AAV genome. A double stranded break near this region can induce a frame shift in the Fanzor polypeptide coding sequence, causing a loss of protein expression. An alternative target sequence for the “self-inactivating” nucleic acid component molecule would aim to edit/inactivate regulatory regions/sequences needed for the expression of the system or for the stability of the vector. For instance, if the promoter for the Fanzor polypeptide coding sequence is disrupted then transcription can be inhibited or prevented. Similarly, if a vector includes sequences for replication, maintenance or stability then it is possible to target these. For instance, in a AAV vector a useful target sequence is within the iTR. Other useful sequences to target can be promoter sequences, polyadenylation sites, etc.

[0530] Furthermore, if the nucleic acid component molecules are expressed in array format, the “self-inactivating” nucleic acid component molecules that target both promoters simultaneously will result in the excision of the intervening nucleotides from within the Fanzor polypeptide expression construct, effectively leading to its complete inactivation. Similarly, excision of the intervening nucleotides will result where the nucleic acid component molecules target both ITRs, or targets two or more other components simultaneously. Self-inactivation as explained herein is applicable, in general, with systems in order to provide regulation of the systems. For example, self-inactivation as explained herein may be applied to the repair of mutations, for example expansion disorders, as explained herein. As a result of this self-inactivation, repair may be only transiently active.

[0531] Addition of non-targeting nucleotides to the 5′ end (e.g., 1-10 nucleotides, preferably 1-5 nucleotides) of the “self-inactivating” nucleic acid component molecule can be used to delay its processing and/or modify its efficiency as a means of ensuring editing at the targeted genomic locus prior to shut down.

[0532] In one aspect of the self-inactivating AAV system, plasmids that co-express one or more nucleic acid component molecule targeting genomic sequences of interest (e.g., 1-2, 1-5, 1-10, 1-15, 1-20, 1-30) may be established with “self-inactivating” nucleic acid component molecule that target an Fanzor polypeptide sequence at or near the engineered ATG start site (e.g. within 5 nucleotides, within 15 nucleotides, within 30 nucleotides, within 50 nucleotides, within 100 nucleotides). A regulatory sequence in the U6 promoter region can also be targeted with a nucleic acid component molecule. The U6-driven nucleic acid component molecules may be designed in an array format such that multiple nucleic acid component molecule sequences can be simultaneously released. When first delivered into target tissue/cells (left cell) nucleic acid component molecules begin to accumulate while Fanzor polypeptide levels rise in the nucleus. Fanzor polypeptide complexes with all of the nucleic acid component molecules to mediate genome editing and self-inactivation of the Fanzor polypeptide plasmids.

[0533] One aspect of a self-inactivating system is expression of singly or in tandem array format from 1 up to 4 or more different nucleic acid component sequences; e.g. up to about 20 or about 30 sequences. Each individual self-inactivating nucleic acid component molecule sequence may target a different target. Such may be processed from, e.g., one chimeric pol3 transcript. Pol3 promoters such as U6 or H1 promoters may be used. Pol2 promoters such as those mentioned throughout herein. Inverted terminal repeat (iTR) sequences may flank the Pol3 promoter-nucleic acid component molecule(s)-Pol2 promoter-Fanzor polypeptide.

[0534] One aspect of a tandem array transcript is that one or more nucleic acid component molecule(s) edit the one or more target(s) while one or more self-inactivating nucleic acid component molecules inactivate the system. Thus, for example, the described system for repairing expansion disorders may be directly combined with the self-inactivating system described herein. Such a system may, for example, have two nucleic acid component molecules directed to the target region for repair as well as at least a third nucleic acid component molecule directed to self-inactivation of the Fanzor polypeptide or systems.

[0535] The nucleic acid component molecule may be a control molecule. For example, it may be engineered to target a nucleic acid sequence encoding the Fanzor polypeptide itself, as described in U.S. Patent Publication No. US2015232881A1, the disclosure of which is hereby incorporated by reference. In one embodiment, a system or composition may be provided with just the nucleic acid component molecule engineered to target the nucleic acid sequence encoding the Fanzor polypeptide. In addition, the system or composition may be provided with the nucleic acid component molecule engineered to target the nucleic acid sequence encoding the Fanzor polypeptide, as well as nucleic acid sequence encoding the Fanzor polypeptide and, optionally a second nucleic acid component molecule and, further optionally, a repair template. The second nucleic acid component may be the primary target of the system or composition (such a therapeutic, diagnostic, knock out etc. as defined herein). In this way, the system or composition is self-inactivating. This is exemplified in relation to Cas in US2015232881A1 (also published as WO2015070083 (A1), and may be extrapolated to Fanzor polypeptides disclosed herein, e.g., Fanzor polypeptides.

### Polynucleotides Encoding Fanzor Polypeptides, Vectors, and Fanzor Systems

[0536] The systems herein may comprise one or more polynucleotides. The polynucleotide(s) may comprise coding sequences of components of the systems herein, e.g., Fanzor polypeptide, nucleic acid component(s), functional domain(s), donor polynucleotide(s), and/or other components in the systems. The present disclosure further provides vectors or vector systems comprising one or more polynucleotides herein. The vectors or vector systems include those described in the delivery sections herein.

### Polynucleotides

[0537] Described in several example embodiments herein are polynucleotides that encode one or more of the Fanzor polypeptides or other system polypeptides and/or nucleic acid component molecules, and/or the like. The terms “polynucleotide”, “nucleotide”, “nucleotide sequence”, “nucleic acid” and “oligonucleotide” are used interchangeably. They refer to a polymeric form of nucleotides of any length, either deoxyribonucleotides or ribonucleotides, or analogs thereof. Polynucleotides may have any three dimensional structure, and may perform any function, known or unknown. The following are non-limiting examples of polynucleotides: coding or non-coding regions of a gene or gene fragment, loci (locus) defined from linkage analysis, exons, introns, messenger RNA (mRNA), transfer RNA, ribosomal RNA, short interfering RNA (siRNA), short-hairpin RNA (nucleic acid component), micro-RNA (miRNA), ribozymes, cDNA, recombinant polynucleotides, branched polynucleotides, plasmids, vectors, isolated DNA of any sequence, isolated RNA of any sequence, nucleic acid probes, and primers. The term also encompasses nucleic-acid-like structures with synthetic backbones, see, e.g., Eckstein, 1991; Baserga et al., 1992; Milligan, 1993; WO 97/03211; WO 96/39154; Mata, 1997; Strauss-Soukup, 1997; and Samstag, 1996. A polynucleotide may comprise one or more modified nucleotides, such as methylated nucleotides and nucleotide analogs. If present, modifications to the nucleotide structure may be imparted before or after assembly of the polymer. The sequence of nucleotides may be interrupted by non-nucleotide components. A polynucleotide may be further modified after polymerization, such as by conjugation with a labeling component. As used herein the term “wild type” is a term of the art understood by skilled persons and means the typical form of an organism, strain, gene or characteristic as it occurs in nature as distinguished from mutant or variant forms. A “wild type” can be a base line. As used herein the term “variant” should be taken to mean the exhibition of qualities that have a pattern that deviates from what occurs in nature. The terms “non-naturally occurring” or “engineered” are used interchangeably and indicate the involvement of the hand of man. The terms, when referring to nucleic acid molecules or polypeptides mean that the nucleic acid molecule or the polypeptide is at least substantially free from at least one other component with which they are naturally associated in nature and as found in nature. “Complementarity” refers to the ability of a nucleic acid to form hydrogen bond(s) with another nucleic acid sequence by either traditional Watson-Crick base pairing or other non-traditional types. A percent complementarity indicates the percentage of residues in a nucleic acid molecule which can form hydrogen bonds (e.g., Watson-Crick base pairing) with a second nucleic acid sequence (e.g., 5, 6, 7, 8, 9, 10 out of 10 being 50%, 60%, 70%, 80%, 90%, and 100% complementary). “Perfectly complementary” means that all the contiguous residues of a nucleic acid sequence will hydrogen bond with the same number of contiguous residues in a second nucleic acid sequence. “Substantially complementary” as used herein refers to a degree of complementarity that is at least 60%, 65%, 70%, 75%, 80%, 85%, 90%, 95%, 97%, 98%, 99%, or 100% over a region of 8, 9, 10, 11, 12, 13, 14, 15, 16, 17, 18, 19, 20, 21, 22, 23, 24, 25, 30, 35, 40, 45, 50, or more nucleotides, or refers to two nucleic acids that hybridize under stringent conditions. As used herein, “stringent conditions” for hybridization refer to conditions under which a nucleic acid having complementarity to a target sequence predominantly hybridizes with the target sequence, and substantially does not hybridize to non-target sequences. Stringent conditions are generally sequence-dependent and vary depending on a number of factors. In general, the longer the sequence, the higher the temperature at which the sequence specifically hybridizes to its target sequence. Non-limiting examples of stringent conditions are described in detail in Tijssen (1993), Laboratory Techniques In Biochemistry And Molecular Biology-Hybridization With Nucleic Acid Probes Part I, Second Chapter “Overview of principles of hybridization and the strategy of nucleic acid probe assay”, Elsevier, N.Y. Where reference is made to a polynucleotide sequence, then complementary or partially complementary sequences are also envisaged. These are preferably capable of hybridizing to the reference sequence under highly stringent conditions. “Hybridization” refers to a reaction in which one or more polynucleotides react to form a complex that is stabilized via hydrogen bonding between the bases of the nucleotide residues. The hydrogen bonding may occur by Watson Crick base pairing, Hoogstein binding, or in any other sequence specific manner. The complex may comprise two strands forming a duplex structure, three or more strands forming a multi stranded complex, a single self-hybridizing strand, or any combination of these. A hybridization reaction may constitute a step in a more extensive process, such as the initiation of PCR, or the cleavage of a polynucleotide by an enzyme. A sequence capable of hybridizing with a given sequence is referred to as the “complement” of the given sequence. As used herein, the term “genomic locus” or “locus” (plural loci) is the specific location of a gene or DNA sequence on a chromosome. A “gene” refers to stretches of DNA or RNA that encode a polypeptide or an RNA chain that has functional role to play in an organism and hence is the molecular unit of heredity in living organisms. For the purpose of this invention, it may be considered that genes include regions which regulate the production of the gene product, whether or not such regulatory sequences are adjacent to coding and/or transcribed sequences. Accordingly, a gene includes, but is not necessarily limited to, promoter sequences, terminators, translational regulatory sequences such as ribosome binding sites and internal ribosome entry sites, enhancers, silencers, insulators, boundary elements, replication origins, matrix attachment sites and locus control regions. As used herein, “expression of a genomic locus” or “gene expression” is the process by which information from a gene is used in the synthesis of a functional gene product. The products of gene expression are often proteins, but in non-protein coding genes such as rRNA genes or tRNA genes, the product is functional RNA. The process of gene expression is used by all known life—eukaryotes (including multicellular organisms), prokaryotes (bacteria and archaea) and viruses to generate functional products to survive. As used herein “expression” of a gene or nucleic acid encompasses not only cellular gene expression, but also the transcription and translation of nucleic acid(s) in cloning systems and in any other context. As used herein, “expression” also refers to the process by which a polynucleotide is transcribed from a DNA template (such as into and mRNA or other RNA transcript) and/or the process by which a transcribed mRNA is subsequently translated into peptides, polypeptides, or proteins. Transcripts and encoded polypeptides may be collectively referred to as “gene product.” If the polynucleotide is derived from genomic DNA, expression may include splicing of the mRNA in a eukaryotic cell. The terms “polypeptide”, “peptide” and “protein” are used interchangeably herein to refer to polymers of amino acids of any length. The polymer may be linear or branched, it may comprise modified amino acids, and it may be interrupted by non-amino acids. The terms also encompass an amino acid polymer that has been modified; for example, disulfide bond formation, glycosylation, lipidation, acetylation, phosphorylation, or any other manipulation, such as conjugation with a labeling component. As used herein the term “amino acid” includes natural and/or unnatural or synthetic amino acids, including glycine and both the D or L optical isomers, and amino acid analogs and peptidomimetics. As used herein, the term “domain” or “protein domain” refers to a part of a protein sequence that may exist and function independently of the rest of the protein chain. As described in aspects of the invention, sequence identity is related to sequence homology. Homology comparisons may be conducted by eye, or more usually, with the aid of readily available sequence comparison programs. These commercially available computer programs may calculate percent (%) homology between two or more sequences and may also calculate the sequence identity shared by two or more amino acid or nucleic acid sequences.

[0538] In one embodiment, the polynucleotide sequence is recombinant DNA. In further embodiments, the polynucleotide sequence further comprises additional sequences as described elsewhere herein. In one embodiment, the nucleic acid sequence is synthesized in vitro.

[0539] The present disclosure provides polynucleotide molecules that encode one or more components of the system or Fanzor polypeptide as referred to in any embodiment herein. In one embodiment, the polynucleotide molecules may comprise further regulatory sequences. By means of guidance and not limitation, the polynucleotide sequence can be part of an expression plasmid, a minicircle, a lentiviral vector, a retroviral vector, an adenoviral or adeno-associated viral vector, a piggyback vector, or a tol2 vector. In one embodiment, the polynucleotide sequence may be a bicistronic expression construct. In further embodiments, the isolated polynucleotide sequence may be incorporated in a cellular genome. In yet further embodiments, the isolated polynucleotide sequence may be part of a cellular genome. In further embodiments, the isolated polynucleotide sequence may be comprised in an artificial chromosome. In one embodiment, the 5′ and/or 3′ end of the isolated polynucleotide sequence may be modified to improve the stability of the sequence of actively avoid degradation. In one embodiment, the isolated polynucleotide sequence may be comprised in a bacteriophage. In other embodiments, the isolated polynucleotide sequence may be contained in agrobacterium species. In one embodiment, the isolated polynucleotide sequence is lyophilized.

### Codon Optimization

[0540] Aspects of the invention relate to polynucleotide molecules that encode one or more components of one or more systems as described in any of the embodiments herein, wherein at least one or more regions of the polynucleotide molecule may be codon optimized for expression in eukaryotic cells. In one embodiment, the polynucleotide molecules that encode one or more components of one or more systems as described in any of the embodiments herein are optimized for expression in a mammalian cell or a plant cell.

[0541] An example of a codon optimized sequence is in this instance a sequence optimized for expression in a eukaryote, e.g., humans (i.e., being optimized for expression in humans), or for another eukaryote, animal or mammal as herein discussed. In one embodiment, an enzyme coding sequence encoding a DNA/RNA-targeting Fanzor polypeptide is codon optimized for expression in particular cells, such as eukaryotic cells. The eukaryotic cells may be those of or derived from a particular organism, such as a plant or a mammal, including but not limited to human, or non-human eukaryote or animal or mammal as herein discussed, e.g., mouse, rat, rabbit, dog, livestock, or non-human mammal or primate. In one embodiment, processes for modifying the germ line genetic identity of human beings and/or processes for modifying the genetic identity of animals which are likely to cause them suffering without any substantial medical benefit to man or animal, and also animals resulting from such processes, may be excluded. In general, codon optimization refers to a process of modifying a nucleic acid sequence for enhanced expression in the host cells of interest by replacing at least one codon (e.g., about or more than about 1, 2, 3, 4, 5, 10, 15, 20, 25, 50, or more codons) of the native sequence with codons that are more frequently or most frequently used in the genes of that host cell while maintaining the native amino acid sequence. Various species exhibit particular bias for certain codons of a particular amino acid. Codon bias (differences in codon usage between organisms) often correlates with the efficiency of translation of messenger RNA (mRNA), which is in turn believed to be dependent on, among other things, the properties of the codons being translated and the availability of particular transfer RNA (tRNA) molecules. The predominance of selected tRNAs in a cell is generally a reflection of the codons used most frequently in peptide synthesis. Accordingly, genes can be tailored for optimal gene expression in a given organism based on codon optimization. Codon usage tables are readily available, for example, at the “Codon Usage Database” available at www.kazusa.orjp/codon/ and these tables can be adapted in a number of ways. See Nakamura, Y., et al. “Codon usage tabulated from the international DNA sequence databases: status for the year 2000” Nucl. Acids Res. 28:292 (2000). Computer algorithms for codon optimizing a particular sequence for expression in a particular host cell are also available, such as Gene Forge (Aptagen; Jacobus, PA), are also available. In one embodiment, one or more codons (e.g., 1, 2, 3, 4, 5, 10, 15, 20, 25, 50, or more, or all codons) in a sequence encoding a Fanzor polypeptide corresponds to the most frequently used codon for a particular amino acid.

### Vectors and Delivery

[0542] The present disclosure also provides delivery systems for introducing components of the systems and compositions herein to cells, tissues, organs, or organisms. A delivery system may comprise one or more delivery vehicles and/or cargos. Exemplary delivery systems and methods include those described in paragraphs [00117] to [00278] of Feng Zhang et al., (WO2016106236A1), and pages 1241-1251 and Table 1 of Lino C A et al., Delivering CRISPR: a review of the challenges and approaches, DRUG DELIVERY, 2018, VOL. 25, NO. 1, 1234-1257, which are incorporated by reference herein in their entireties and can be adapted for use with the Fanzor proteins disclosed herein.

[0543] In one embodiment, the delivery systems may be used to introduce the components of the systems and compositions to plant cells. For example, the components may be delivered to plant using electroporation, microinjection, aerosol beam injection of plant cell protoplasts, biolistic methods, DNA particle bombardment, and/or Agrobacterium-mediated transformation. Examples of methods and delivery systems for plants include those described in Fu et al., Transgenic Res. 2000 February; 9(1):11-9; Klein R M, et al., Biotechnology. 1992; 24:384-6; Casas A M et al., Proc Natl Acad Sci USA. 1993 Dec. 1; 90(23): 11212-11216; and U.S. Pat. No. 5,563,055, Davey M R et al., Plant Mol Biol. 1989 September; 13(3):273-85, which are incorporated by reference herein in their entireties.

[0544] The example delivery compositions, systems, and methods described herein related to composition or Fanzor polypeptide also apply to functional domains and other components (e.g., other proteins and polynucleotides related to the Fanzor polypeptide, such as reverse transcriptase, nucleotide deaminase, retrotransposon, donor polynucleotide, etc.).

### Cargos

[0545] The delivery systems may comprise one or more cargos. The cargos may comprise one or more components of the systems and compositions herein. A cargo may comprise one or more of the following: i) a plasmid encoding one or more proteins components in the compositions and systems such as the Fanzor polypeptide and/or functional domains; ii) a plasmid encoding one or more nucleic acid components, iii) mRNA of one or more one or more proteins components in the compositions and systems such as the Fanzor polypeptide and/or functional domains; iv) one or more nucleic acid component molecules; v) one or more proteins components in the compositions and systems such as the Fanzor polypeptide and/or functional domains; vi) any combination thereof. The one or more protein components may include the nuclei acid-guided nuclease (e.g., Cas), reverse transcriptase, nucleotide deaminase, retrotransposon protein, other functional domain, or any combination thereof.

[0546] In some examples, a cargo may comprise a plasmid encoding one or more proteins components in the compositions and systems such as the Fanzor polypeptide and/or functional domains and one or more (e.g., a plurality of) nucleic acid component molecules. In some cases, the plasmid may also encode a recombination template (e.g., for HDR). In one embodiment, a cargo may comprise mRNA encoding one or more protein components and one or more nucleic acid component molecules.

[0547] In some examples, a cargo may comprise one or more protein components and one or more nucleic acid component molecules, e.g., in the form of ribonucleoprotein complexes (RNP). The ribonucleoprotein complexes may be delivered by methods and systems herein. In some cases, the ribonucleoprotein may be delivered by way of a polypeptide-based shuttle agent. In one example, the ribonucleoprotein may be delivered using synthetic peptides comprising an endosome leakage domain (ELD) operably linked to a cell penetrating domain (CPD), to a histidine-rich domain and a CPD, e.g., as describe in WO2016161516. RNP may also be used for delivering the compositions and systems to plant cells, e.g., as described in Wu J W, et al., Nat Biotechnol. 2015 November; 33(11):1162-4.

### Physical Delivery

[0548] In one embodiment, the cargos may be introduced to cells by physical delivery methods. Examples of physical methods include microinjection, electroporation, and hydrodynamic delivery. Both nucleic acid and proteins may be delivered using such methods. For example, one or more protein components may be prepared in vitro, isolated, (refolded, purified if needed), and introduced to cells.

### Microinjection

[0549] Microinjection of the cargo directly to cells can achieve high efficiency, e.g., above 90% or about 100%. In one embodiment, microinjection may be performed using a microscope and a needle (e.g., with 0.5-5.0 μm in diameter) to pierce a cell membrane and deliver the cargo directly to a target site within the cell. Microinjection may be used for in vitro and ex vivo delivery.

[0550] Plasmids comprising coding sequences for one or more protein components and/or nucleic acid components, mRNAs, and/or nucleic acid component molecules, may be microinjected. In some cases, microinjection may be used i) to deliver DNA directly to a cell nucleus, and/or ii) to deliver mRNA (e.g., in vitro transcribed) to a cell nucleus or cytoplasm. In certain examples, microinjection may be used to delivery nucleic acid component directly to the nucleus and mRNA to the cytoplasm, e.g., facilitating translation and shuttling of one or more protein components to the nucleus.

[0551] Microinjection may be used to generate genetically modified animals. For example, gene editing cargos may be injected into zygotes to allow for efficient germline modification. Such approach can yield normal embryos and full-term mouse pups harboring the desired modification(s). Microinjection can also be used to provide transiently up- or down-regulate a specific gene within the genome of a cell, e.g., using Fanzor polypeptide or system.

### Electroporation

[0552] In one embodiment, the cargos and/or delivery vehicles may be delivered by electroporation. Electroporation may use pulsed high-voltage electrical currents to transiently open nanometer-sized pores within the cellular membrane of cells suspended in buffer, allowing for components with hydrodynamic diameters of tens of nanometers to flow into the cell. In some cases, electroporation may be used on various cell types and efficiently transfer cargo into cells. Electroporation may be used for in vitro and ex vivo delivery.

[0553] Electroporation may also be used to deliver the cargo to into the nuclei of mammalian cells by applying specific voltage and reagents, e.g., by nucleofection. Such approaches include those described in Wu Y, et al. (2015). Cell Res 25:67-79; Ye L, et al. (2014). Proc Natl Acad Sci USA 111:9591-6; Choi P S, Meyerson M. (2014). Nat Commun 5:3728; Wang J, Quake S R. (2014). Proc Natl Acad Sci 111:13157-62. Electroporation may also be used to deliver the cargo in vivo, e.g., with methods described in Zuckermann M, et al. (2015). Nat Commun 6:7391.

### Hydrodynamic Delivery

[0554] Hydrodynamic delivery may also be used for delivering the cargos, e.g., for in vivo delivery. In some examples, hydrodynamic delivery may be performed by rapidly pushing a large volume (8-10% body weight) solution containing the gene editing cargo into the bloodstream of a subject (e.g., an animal or human), e.g., for mice, via the tail vein. As blood is incompressible, the large bolus of liquid may result in an increase in hydrodynamic pressure that temporarily enhances permeability into endothelial and parenchymal cells, allowing for cargo not normally capable of crossing a cellular membrane to pass into cells. This approach may be used for delivering naked DNA plasmids and proteins. The delivered cargos may be enriched in liver, kidney, lung, muscle, and/or heart.

### Transfection

[0555] The cargos, e.g., nucleic acids, may be introduced to cells by transfection methods for introducing nucleic acids into cells. Examples of transfection methods include calcium phosphate-mediated transfection, cationic transfection, liposome transfection, dendrimer transfection, heat shock transfection, magnetofection, lipofection, impalefection, optical transfection, proprietary agent-enhanced uptake of nucleic acid.

### Delivery Vehicles

[0556] The delivery systems may comprise one or more delivery vehicles. The delivery vehicles may deliver the cargo into cells, tissues, organs, or organisms (e.g., animals or plants). The cargos may be packaged, carried, or otherwise associated with the delivery vehicles. The delivery vehicles may be selected based on the types of cargo to be delivered, and/or the delivery is in vitro and/or in vivo. Examples of delivery vehicles include vectors, viruses, non-viral vehicles, and other delivery reagents described herein.

[0557] The delivery vehicles in accordance with the present invention may have a greatest dimension (e.g., diameter) of less than 100 microns (μm). In one embodiment, the delivery vehicles have a greatest dimension of less than 10 μm. In one embodiment, the delivery vehicles may have a greatest dimension of less than 2000 nanometers (nm). In one embodiment, the delivery vehicles may have a greatest dimension of less than 1000 nanometers (nm). In one embodiment, the delivery vehicles may have a greatest dimension (e.g., diameter) of less than 900 nm, less than 800 nm, less than 700 nm, less than 600 nm, less than 500 nm, less than 400 nm, less than 300 nm, less than 200 nm, less than 150 nm, or less than 100 nm, less than 50 nm. In one embodiment, the delivery vehicles may have a greatest dimension ranging between 25 nm and 200 nm.

[0558] In one embodiment, the delivery vehicles may be or comprise particles. For example, the delivery vehicle may be or comprise nanoparticles (e.g., particles with a greatest dimension (e.g., diameter) no greater than 1000 nm. The particles may be provided in different forms, e.g., as solid particles (e.g., metal such as silver, gold, iron, titanium), non-metal, lipid-based solids, polymers), suspensions of particles, or combinations thereof. Metal, dielectric, and semiconductor particles may be prepared, as well as hybrid structures (e.g., core-shell particles). Nanoparticles may also be used to deliver the compositions and systems to plant cells, e.g., as described in International Patent Publication No. WO 2008042156, US Publication Application No. US 20130185823, and International Patent Publication No WO 2015/089419.

### Vectors

[0559] The systems, compositions, and/or delivery systems may comprise one or more vectors. The present disclosure also includes vector systems. A vector system may comprise one or more vectors. In one embodiment, a vector refers to a nucleic acid molecule capable of transporting another nucleic acid to which it has been linked. Vectors include nucleic acid molecules that are single-stranded, double-stranded, or partially double-stranded; nucleic acid molecules that comprise one or more free ends, no free ends (e.g., circular); nucleic acid molecules that comprise DNA, RNA, or both; and other varieties of polynucleotides known in the art. A vector may be a plasmid, e.g., a circular double stranded DNA loop into which additional DNA segments can be inserted, such as by standard molecular cloning techniques. Certain vectors may be capable of autonomous replication in a host cell into which they are introduced (e.g., bacterial vectors having a bacterial origin of replication and episomal mammalian vectors). Some vectors (e.g., non-episomal mammalian vectors) are integrated into the genome of a host cell upon introduction into the host cell, and thereby are replicated along with the host genome. In certain examples, vectors may be expression vectors, e.g., capable of directing the expression of genes to which they are operatively-linked. In some cases, the expression vectors may be for expression in eukaryotic cells. Common expression vectors of utility in recombinant DNA techniques are often in the form of plasmids.

[0560] Examples of vectors include pGEX, pMAL, pRIT5, E. coli expression vectors (e.g., pTrc, pET 11d, yeast expression vectors (e.g., pYepSec1, pMFa, pJRY88, pYES2, and picZ, Baculovirus vectors (e.g., for expression in insect cells such as SF9 cells) (e.g., pAc series and the pVL series), mammalian expression vectors (e.g., pCDM8 and pMT2PC.

[0561] A vector may comprise i) one or more protein components encoding sequence(s), and/or ii) a single, or at least 2, at least 3, at least 4, at least 5, at least 6, at least 7, at least 8, at least 9, at least 10, at least 12, at least 14, at least 16, at least 32, at least 48, at least 50 nucleic acid component molecule(s) encoding sequences. In a single vector there can be a promoter for each RNA coding sequence. Alternatively or additionally, in a single vector, there may be a promoter controlling (e.g., driving transcription and/or expression) multiple RNA encoding sequences.

[0562] Furthermore, that compositions or systems may be delivered via a vector, e.g., a separate vector or the same vector that is encoding the complex. When provided by a separate vector, the RNA that targets Fanzor polypeptide expression can be administered sequentially or simultaneously. When administered sequentially, the RNA that targets Fanzor polypeptide expression is to be delivered after the RNA that is intended for e.g., gene editing or gene engineering. This period may be a period of minutes (e.g., 5 minutes, 10 minutes, 20 minutes, 30 minutes, 45 minutes, 60 minutes). This period may be a period of hours (e.g., 2 hours, 4 hours, 6 hours, 8 hours, 12 hours, 24 hours). This period may be a period of days (e.g., 2 days, 3 days, 4 days, 7 days). This period may be a period of weeks (e.g., 2 weeks, 3 weeks, 4 weeks). This period may be a period of months (e.g., 2 months, 4 months, 8 months, 12 months). This period may be a period of years (2 years, 3 years, 4 years). In this fashion, the Fanzor polypeptide associates with a first nucleic acid component molecule capable of hybridizing to a first target, such as a genomic locus or loci of interest and undertakes the function(s) desired of the system (e.g., gene engineering); and subsequently the Fanzor polypeptide may then associate with the second nucleic acid component molecule capable of hybridizing to the sequence comprising at least part of the Fanzor polypeptide. Where the nucleic acid component molecule targets the sequences encoding expression of the Fanzor polypeptide, the enzyme becomes impeded, and the system becomes self-inactivating. In the same manner, RNA that targets Fanzor polypeptide expression applied via, for example liposome, lipofection, particles, microvesicles as explained herein, may be administered sequentially or simultaneously. Similarly, self-inactivation may be used for inactivation of one or more nucleic acid component molecule used to target one or more targets.

### Regulatory Elements

[0563] A vector may comprise one or more regulatory elements. The regulatory element(s) may be operably linked to coding sequences of Fanzor polypeptide, accessory proteins, nucleic acid component scaffold and/or nucleic acid component molecule or combination thereof. The term “operably linked” is intended to mean that the nucleotide sequence of interest is linked to the regulatory element(s) in a manner that allows for expression of the nucleotide sequence (e.g., in an in vitro transcription/translation system or in a host cell when the vector is introduced into the host cell). In certain examples, a vector may comprise: a first regulatory element operably linked to a nucleotide sequence encoding a Fanzor polypeptide, and a second regulatory element operably linked to a nucleotide sequence encoding a nucleic acid component molecule.

[0564] Examples of regulatory elements include promoters, enhancers, internal ribosomal entry sites (IRES), and other expression control elements (e.g., transcription termination signals, such as polyadenylation signals and poly-U sequences). Such regulatory elements are described, for example, in Goeddel, GENE EXPRESSION TECHNOLOGY: METHODS IN ENZYMOLOGY 185, Academic Press, San Diego, Calif (1990). Regulatory elements include those that direct constitutive expression of a nucleotide sequence in many types of host cell and those that direct expression of the nucleotide sequence only in certain host cells (e.g., tissue-specific regulatory sequences). A tissue-specific promoter may direct expression primarily in a desired tissue of interest, such as muscle, neuron, bone, skin, blood, specific organs (e.g., liver, pancreas), or particular cell types (e.g., lymphocytes). Regulatory elements may also direct expression in a temporal-dependent manner, such as in a cell-cycle dependent or developmental stage-dependent manner, which may or may not also be tissue or cell-type specific.

[0565] Examples of promoters include one or more pol III promoter (e.g., 1, 2, 3, 4, 5, or more pol III promoters), one or more pol II promoters (e.g., 1, 2, 3, 4, 5, or more pol II promoters), one or more pol I promoters (e.g., 1, 2, 3, 4, 5, or more pol I promoters), or combinations thereof. Examples of pol III promoters include, but are not limited to, U6 and H1 promoters. Examples of pol II promoters include, but are not limited to, the retroviral Rous sarcoma virus (RSV) LTR promoter (optionally with the RSV enhancer), the cytomegalovirus (CMV) promoter (optionally with the CMV enhancer), the SV40 promoter, the dihydrofolate reductase promoter, the β-actin promoter, the phosphoglycerol kinase (PGK) promoter, and the EF1α promoter.

### Viral Vectors

[0566] The cargos may be delivered by viruses. In one embodiment, viral vectors are used. A viral vector may comprise virally-derived DNA or RNA sequences for packaging into a virus (e.g., retroviruses, replication defective retroviruses, adenoviruses, replication defective adenoviruses, and adeno-associated viruses). Viral vectors also include polynucleotides carried by a virus for transfection into a host cell. Viruses and viral vectors may be used for in vitro, ex vivo, and/or in vivo deliveries.

### Adeno Associated Virus (AAV)

[0567] The systems and compositions herein may be delivered by adeno associated virus (AAV). AAV vectors may be used for such delivery. AAV, of the Dependovirus genus and Parvoviridae family, is a single stranded DNA virus. In one embodiment, AAV may provide a persistent source of the provided DNA, as AAV delivered genomic material can exist indefinitely in cells, e.g., either as exogenous DNA or, with some modification, be directly integrated into the host DNA. In one embodiment, AAV do not cause or relate with any diseases in humans. The virus itself is able to efficiently infect cells while provoking little to no innate or adaptive immune response or associated toxicity.

[0568] Examples of AAV that can be used herein include AAV-1, AAV-2, AAV-3, AAV-4, AAV-5, AAV-6, AAV-8, and AAV-9. The type of AAV may be selected with regard to the cells to be targeted; e.g., one can select AAV serotypes 1, 2, 5 or a hybrid capsid AAV1, AAV2, AAV5 or any combination thereof for targeting brain or neuronal cells; and one can select AAV4 for targeting cardiac tissue. AAV8 is useful for delivery to the liver. AAV-2-based vectors were originally proposed for CFTR delivery to CF airways, other serotypes such as AAV-1, AAV-5, AAV-6, and AAV-9 exhibit improved gene transfer efficiency in a variety of models of the lung epithelium. Examples of cell types targeted by AAV are described in Grimm, D. et al, J. Virol. 82: 5887-5911 (2008)), and shown as follows in Table 3.

TABLE 3

| Cell Line | AAV-1 | AAV-2 | AAV-3 | AAV-4 | AAV-5 | AAV-6 | AAV-8 | AAV-9 |
|---|---|---|---|---|---|---|---|---|
| Huh-7 | 13 | 100 | 2.5 | 0.0 | 0.1 | 10 | 0.7 | 0.0 |
| HEK293 | 25 | 100 | 2.5 | 0.1 | 0.1 | 5 | 0.7 | 0.1 |
| HeLa | 3 | 100 | 2.0 | 0.1 | 6.7 | 1 | 0.2 | 0.1 |
| HepG2 | 3 | 100 | 16.7 | 0.3 | 1.7 | 5 | 0.3 | ND |
| Hep1A | 20 | 100 | 0.2 | 1.0 | 0.1 | 1 | 0.2 | 0.0 |
| 911 | 17 | 100 | 11 | 0.2 | 0.1 | 17 | 0.1 | ND |
| CHO | 100 | 100 | 14 | 1.4 | 333 | 50 | 10 | 1.0 |
| COS | 33 | 100 | 33 | 3.3 | 5.0 | 14 | 2.0 | 0.5 |
| MeWo | 10 | 100 | 20 | 0.3 | 6.7 | 10 | 1.0 | 0.2 |
| NIH3T3 | 10 | 100 | 2.9 | 2.9 | 0.3 | 10 | 0.3 | ND |
| A549 | 14 | 100 | 20 | ND | 0.5 | 10 | 0.5 | 0.1 |
| HT1180 | 20 | 100 | 10 | 0.1 | 0.3 | 33 | 0.5 | 0.1 |
| Monocytes | 1111 | 100 | ND | ND | 125 | 1429 | ND | ND |
| Immature DC | 2500 | 100 | ND | ND | 222 | 2857 | ND | ND |
| Mature DC | 2222 | 100 | ND | ND | 333 | 3333 | ND | ND |

[0569] The AAV particles may be created in HEK 293 T cells. Once particles with specific tropism have been created, they are used to infect the target cell line much in the same way that native viral particles do. This may allow for persistent presence of the components in the infected cell type, and what makes this version of delivery particularly suited to cases where long-term expression is desirable. Examples of doses and formulations for AAV that can be used include those describe in U.S. Pat. Nos. 8,454,972 and 8,404,658.

[0570] Various strategies may be used for delivery the systems and compositions herein with AAVs. In some examples, coding sequences of Fanzor polypeptide and nucleic acid component may be packaged directly onto one DNA plasmid vector and delivered via one AAV particle. In some examples, AAVs may be used to deliver nucleic acid components into cells that have been previously engineered to express Fanzor polypeptide. In some examples, coding sequences of Fanzor polypeptide and nucleic acid component may be made into two separate AAV particles, which are used for co-transfection of target cells. In some examples, markers, tags, and other sequences may be packaged in the same AAV particles as coding sequences of Fanzor polypeptide and/or nucleic acid components.

### Lentiviruses

[0571] The systems and compositions herein may be delivered by lentiviruses. Lentiviral vectors may be used for such delivery. Lentiviruses are complex retroviruses that have the ability to infect and express their genes in both mitotic and post-mitotic cells.

[0572] Examples of lentiviruses include human immunodeficiency virus (HIV), which may use its envelope glycoproteins of other viruses to target a broad range of cell types; minimal non-primate lentiviral vectors based on the equine infectious anemia virus (EIAV), which may be used for ocular therapies. In one embodiment, self-inactivating lentiviral vectors with an siRNA targeting a common exon shared by HIV tat/rev, a nucleolar-localizing TAR decoy, and an anti-CCR5-specific hammerhead ribozyme (see, e.g., DiGiusto et al. (2010) Sci Transl Med 2:36ra43) may be used/and or adapted to the nucleic acid-targeting system herein.

[0573] Lentiviruses may be pseudo-typed with other viral proteins, such as the G protein of vesicular stomatitis virus. In doing so, the cellular tropism of the lentiviruses can be altered to be as broad or narrow as desired. In some cases, to improve safety, second- and third-generation lentiviral systems may split essential genes across three plasmids, which may reduce the likelihood of accidental reconstitution of viable viral particles within cells.

[0574] In some examples, leveraging the integration ability, lentiviruses may be used to create libraries of cells comprising various genetic modifications, e.g., for screening and/or studying genes and signaling pathways.

### Adenoviruses

[0575] The systems and compositions herein may be delivered by adenoviruses. Adenoviral vectors may be used for such delivery. Adenoviruses include nonenveloped viruses with an icosahedral nucleocapsid containing a double stranded DNA genome. Adenoviruses may infect dividing and non-dividing cells. In one embodiment, adenoviruses do not integrate into the genome of host cells, which may be used for limiting off-target effects of systems in gene editing applications.

### Viral Vehicles for Delivery to Plants

[0576] The systems and compositions may be delivered to plant cells using viral vehicles. In particular embodiments, the compositions and systems may be introduced in the plant cells using a plant viral vector (e.g., as described in Scholthof et al. 1996, Annu Rev Phytopathol. 1996; 34:299-323). Such viral vector may be a vector from a DNA virus, e.g., geminivirus (e.g., cabbage leaf curl virus, bean yellow dwarf virus, wheat dwarf virus, tomato leaf curl virus, maize streak virus, tobacco leaf curl virus, or tomato golden mosaic virus) or nanovirus (e.g., Faba bean necrotic yellow virus). The viral vector may be a vector from an RNA virus, e.g., tobravirus (e.g., tobacco rattle virus, tobacco mosaic virus), potexvirus (e.g., potato virus X), or hordeivirus (e.g., barley stripe mosaic virus). The replicating genomes of plant viruses may be non-integrative vectors.

### Non-Viral Vehicles

[0577] The delivery vehicles may comprise non-viral vehicles. In general, methods and vehicles capable of delivering nucleic acids and/or proteins may be used for delivering the systems compositions herein. Examples of non-viral vehicles include lipid nanoparticles, cell-penetrating peptides (CPPs), DNA nanoclews, gold nanoparticles, streptolysin O, multifunctional envelope-type nanodevices (MENDs), lipid-coated mesoporous silica particles, and other inorganic nanoparticles.

### Lipid Particles

[0578] The delivery vehicles may comprise lipid particles, e.g., lipid nanoparticles (LNPs) and liposomes.

### Lipid Nanoparticles (LNPs)

[0579] LNPs may encapsulate nucleic acids within cationic lipid particles (e.g., liposomes), and may be delivered to cells with relative ease. In some examples, lipid nanoparticles do not contain any viral components, which helps minimize safety and immunogenicity concerns. Lipid particles may be used for in vitro, ex vivo, and in vivo deliveries. Lipid particles may be used for various scales of cell populations.

[0580] In some examples. LNPs may be used for delivering DNA molecules (e.g., those comprising coding sequences of Fanzor polypeptide and/or nucleic acid component) and/or RNA molecules (e.g., mRNA of Fanzor polypeptide, nucleic acid component molecules). In certain cases, LNPs may be use for delivering RNP complexes of Fanzor polypeptide/nucleic acid component.

[0581] Components in LNPs may comprise cationic lipids 1,2-dilineoyl-3-dimethylammonium-propane (DLinDAP), 1,2-dilinoleyloxy-3-N,N-dimethylaminopropane (DLinDMA), 1,2-dilinoleyloxyketo-N,N-dimethyl-3-aminopropane (DLinK-DMA), 1,2-dilinoleyl-4-(2-dimethylaminoethyl)-[1,3]-dioxolane (DLinKC2-DMA), (3-o-[2″-(methoxypolyethyleneglycol 2000) succinoyl]-1,2-dimyristoyl-sn-glycol (PEG-S-DMG), R-3-[(ro-methoxy-poly(ethylene glycol)2000) carbamoyl]-1,2-dimyristyloxlpropyl-3-amine (PEG-C-DOMG, and any combination thereof. Preparation of LNPs and encapsulation may be adapted from Rosin et al, Molecular Therapy, vol. 19, no. 12, pages 1286-2200, December 2011).

### Liposomes

[0582] In one embodiment, a lipid particle may be liposome. Liposomes are spherical vesicle structures composed of a uni- or multilamellar lipid bilayer surrounding internal aqueous compartments and a relatively impermeable outer lipophilic phospholipid bilayer. In one embodiment, liposomes are biocompatible, nontoxic, can deliver both hydrophilic and lipophilic drug molecules, protect their cargo from degradation by plasma enzymes, and transport their load across biological membranes and the blood brain barrier (BBB).

[0583] Liposomes can be made from several different types of lipids, e.g., phospholipids. A liposome may comprise natural phospholipids and lipids such as 1,2-distearoryl-sn-glycero-3-phosphatidyl choline (DSPC), sphingomyelin, egg phosphatidylcholines, monosialoganglioside, or any combination thereof.

[0584] Several other additives may be added to liposomes in order to modify their structure and properties. For instance, liposomes may further comprise cholesterol, sphingomyelin, and/or 1,2-dioleoyl-sn-glycero-3-phosphoethanolamine (DOPE), e.g., to increase stability and/or to prevent the leakage of the liposomal inner cargo.

### Stable Nucleic-Acid-Lipid Particles (SNALPs)

[0585] In one embodiment, the lipid particles may be stable nucleic acid lipid particles (SNALPs). SNALPs may comprise an ionizable lipid (DLinDMA) (e.g., cationic at low pH), a neutral helper lipid, cholesterol, a diffusible polyethylene glycol (PEG)-lipid, or any combination thereof. In some examples, SNALPs may comprise synthetic cholesterol, dipalmitoylphosphatidylcholine, 3-N-[(w-methoxy polyethylene glycol)2000)carbamoyl]-1,2-dimyrestyloxypropylamine, and cationic 1,2-dilinoleyloxy-3-N,Ndimethylaminopropane. In some examples, SNALPs may comprise synthetic cholesterol, 1,2-distearoyl-sn-glycero-3-phosphocholine, PEG-cDMA, and 1,2-dilinoleyloxy-3-(N;N-dimethyl)aminopropane (DLinDMA).

### Other Lipids

[0586] The lipid particles may also comprise one or more other types of lipids, e.g., cationic lipids, such as amino lipid 2,2-dilinoleyl-4-dimethylaminoethyl-[1,3]-dioxolane (DLin-KC2-DMA), DLin-KC2-DMA4, C12-200 and colipids disteroylphosphatidyl choline, cholesterol, and PEG-DMG.

### Lipoplexes/Polyplexes

[0587] In one embodiment, the delivery vehicles comprise lipoplexes and/or polyplexes. Lipoplexes may bind to negatively charged cell membrane and induce endocytosis into the cells. Examples of lipoplexes may be complexes comprising lipid(s) and non-lipid components. Examples of lipoplexes and polyplexes include FuGENE-6 reagent, a non-liposomal solution containing lipids and other components, zwitterionic amino lipids (ZALs), Ca2b (e.g., forming DNA/Ca²⁺ microcomplexes), polyethenimine (PEI) (e.g., branched PEI), and poly(L-lysine) (PLL).

### Cell Penetrating Peptides

[0588] In one embodiment, the delivery vehicles comprise cell penetrating peptides (CPPs). CPPs are short peptides that facilitate cellular uptake of various molecular cargo (e.g., from nanosized particles to small chemical molecules and large fragments of DNA).

[0589] CPPs may be of different sizes, amino acid sequences, and charges. In some examples, CPPs can translocate the plasma membrane and facilitate the delivery of various molecular cargoes to the cytoplasm or an organelle. CPPs may be introduced into cells via different mechanisms, e.g., direct penetration in the membrane, endocytosis-mediated entry, and translocation through the formation of a transitory structure.

[0590] CPPs may have an amino acid composition that either contains a high relative abundance of positively charged amino acids such as lysine or arginine or has sequences that contain an alternating pattern of polar/charged amino acids and non-polar, hydrophobic amino acids. These two types of structures are referred to as polycationic or amphipathic, respectively. A third class of CPPs are the hydrophobic peptides, containing only apolar residues, with low net charge or have hydrophobic amino acid groups that are crucial for cellular uptake. Another type of CPPs is the trans-activating transcriptional activator (Tat) from Human Immunodeficiency Virus 1 (HIV-1). Examples of CPPs include to Penetratin, Tat (48-60), Transportan, and (R-AhX-R4) (Ahx refers to aminohexanoyl), Kaposi fibroblast growth factor (FGF) signal peptide sequence, integrin 03 signal peptide sequence, polyarginine peptide Args sequence, Guanine rich-molecular transporters, and sweet arrow peptide. Examples of CPPs and related applications also include those described in U.S. Pat. No. 8,372,951.

[0591] CPPs can be used for in vitro and ex vivo work quite readily, and extensive optimization for each cargo and cell type is usually required. In some examples, CPPs may be covalently attached to the Fanzor polypeptide directly, which is then complexed with the nucleic acid component and delivered to cells. In some examples, separate delivery of CPP-Fanzor and CPP-nucleic acid component to multiple cells may be performed. CPP may also be used to delivery RNPs.

[0592] CPPs may be used to deliver the compositions and systems to plants. In some examples, CPPs may be used to deliver the components to plant protoplasts, which are then regenerated to plant cells and further to plants.

### DNA Nanoclews

[0593] In one embodiment, the delivery vehicles comprise DNA nanoclews. A DNA nanoclew refers to a sphere-like structure of DNA (e.g., with a shape of a ball of yarn). The nanoclew may be synthesized by rolling circle amplification with palindromic sequences that aide in the self-assembly of the structure. The sphere may then be loaded with a payload. An example of DNA nanoclew is described in Sun W et al, J Am Chem Soc. 2014 Oct. 22; 136(42):14722-5; and Sun W et al, Angew Chem Int Ed Engl. 2015 Oct. 5; 54(41):12029-33. DNA nanoclew may have a palindromic sequences to be partially complementary to the nucleic acid component molecule within the Fanzor polypeptide:nucleic acid component ribonucleoprotein complex. A DNA nanoclew may be coated, e.g., coated with PEI to induce endosomal escape.

### Gold Nanoparticles

[0594] In one embodiment, the delivery vehicles comprise gold nanoparticles (also referred to AuNPs or colloidal gold). Gold nanoparticles may form complex with cargos, e.g., Fanzor polypeptide:nucleic acid component RNP. Gold nanoparticles may be coated, e.g., coated in a silicate and an endosomal disruptive polymer, PAsp(DET). Examples of gold nanoparticles include AuraSense Therapeutics' Spherical Nucleic Acid (SNA™) constructs, and those described in Mout R, et al. (2017). ACS Nano 11:2452-8; Lee K, et al. (2017). Nat Biomed Eng 1:889-901.

iTOP

[0595] In one embodiment, the delivery vehicles comprise iTOP. iTOP refers to a combination of small molecules drives the highly efficient intracellular delivery of native proteins, independent of any transduction peptide. iTOP may be used for induced transduction by osmocytosis and propanebetaine, using NaCl-mediated hyperosmolality together with a transduction compound (propanebetaine) to trigger macropinocytotic uptake into cells of extracellular macromolecules. Examples of iTOP methods and reagents include those described in D'Astolfo D S, Pagliero R J, Pras A, et al. (2015). Cell 161:674-690.

### Polymer-Based Particles

[0596] In one embodiment, the delivery vehicles may comprise polymer-based particles (e.g., nanoparticles). In one embodiment, the polymer-based particles may mimic a viral mechanism of membrane fusion. The polymer-based particles may be a synthetic copy of Influenza virus machinery and form transfection complexes with various types of nucleic acids ((siRNA, miRNA, plasmid DNA or snucleic acid component, mRNA) that cells take up via the endocytosis pathway, a process that involves the formation of an acidic compartment. The low pH in late endosomes acts as a chemical switch that renders the particle surface hydrophobic and facilitates membrane crossing. Once in the cytosol, the particle releases its payload for cellular action. This Active Endosome Escape technology is safe and maximizes transfection efficiency as it is using a natural uptake pathway. In one embodiment, the polymer-based particles may comprise alkylated and carboxyalkylated branched polyethylenimine. In some examples, the polymer-based particles are VIROMER, e.g., VIROMER RNAi, VIROMER RED, VIROMER mRNA. Example methods of delivering the systems and compositions herein include those described in Bawage S S et al., Synthetic mRNA expressed Cas13a mitigates RNA virus infections, www.biorxiv.org/content/10.1101/370460v1.full doi: doi.org/10.1101/370460, Viromer® RED, a powerful tool for transfection of keratinocytes. doi: 10.13140/RG.2.2.16993.61281, Viromer® Transfection—Factbook 2018: technology, product overview, users' data., doi: 10.13140/RG.2.2.23912.16642.

### Streptolysin O (SLO)

[0597] The delivery vehicles may be streptolysin O (SLO). SLO is a toxin produced by Group A streptococci that works by creating pores in mammalian cell membranes. SLO may act in a reversible manner, which allows for the delivery of proteins (e.g., up to 100 kDa) to the cytosol of cells without compromising overall viability. Examples of SLO include those described in Sierig G, et al. (2003). Infect Immun 71:446-55; Walev I, et al. (2001). Proc Natl Acad Sci USA 98:3185-90; Teng K W, et al. (2017). Elife 6:e25460.

### Multifunctional Envelope-Type Nanodevice (MEND)

[0598] The delivery vehicles may comprise multifunctional envelope-type nanodevice (MENDs). MENDs may comprise condensed plasmid DNA, a PLL core, and a lipid film shell. A MEND may further comprise cell-penetrating peptide (e.g., stearyl octaarginine). The cell penetrating peptide may be in the lipid shell. The lipid envelope may be modified with one or more functional components, e.g., one or more of: polyethylene glycol (e.g., to increase vascular circulation time), ligands for targeting of specific tissues/cells, additional cell-penetrating peptides (e.g., for greater cellular delivery), lipids to enhance endosomal escape, and nuclear delivery tags. In some examples, the MEND may be a tetra-lamellar MEND (T-MEND), which may target the cellular nucleus and mitochondria. In certain examples, a MEND may be a PEG-peptide-DOPE-conjugated MEND (PPD-MEND), which may target bladder cancer cells. Examples of MENDs include those described in Kogure K, et al. (2004). J Control Release 98:317-23; Nakamura T, et al. (2012). Ace Chem Res 45:1113-21.

### Lipid-Coated Mesoporous Silica Particles

[0599] The delivery vehicles may comprise lipid-coated mesoporous silica particles. Lipid-coated mesoporous silica particles may comprise a mesoporous silica nanoparticle core and a lipid membrane shell. The silica core may have a large internal surface area, leading to high cargo loading capacities. In one embodiment, pore sizes, pore chemistry, and overall particle sizes may be modified for loading different types of cargos. The lipid coating of the particle may also be modified to maximize cargo loading, increase circulation times, and provide precise targeting and cargo release. Examples of lipid-coated mesoporous silica particles include those described in Du X, et al. (2014). Biomaterials 35:5580-90; Durfee P N, et al. (2016). ACS Nano 10:8325-45.

### Inorganic Nanoparticles

[0600] The delivery vehicles may comprise inorganic nanoparticles. Examples of inorganic nanoparticles include carbon nanotubes (CNTs) (e.g., as described in Bates K and Kostarelos K. (2013). Adv Drug Deliv Rev 65:2023-33.), bare mesoporous silica nanoparticles (MSNPs) (e.g., as described in Luo G F, et al. (2014). Sci Rep 4:6064), and dense silica nanoparticles (SiNPs) (as described in Luo D and Saltzman W M. (2000). Nat Biotechnol 18:893-5).

### Exosomes

[0601] The delivery vehicles may comprise exosomes. Exosomes include membrane bound extracellular vesicles, which can be used to contain and delivery various types of biomolecules, such as proteins, carbohydrates, lipids, and nucleic acids, and complexes thereof (e.g., RNPs). Examples of exosomes include those described in Schroeder A, et al., J Intern Med. 2010 January; 267(1):9-21; El-Andaloussi S, et al., Nat Protoc. 2012 December; 7(12):2112-26; Uno Y, et al., Hum Gene Ther. 2011 June; 22(6):711-9; Zou W, et al., Hum Gene Ther. 2011 April; 22(4):465-75.

[0602] In some examples, the exosome may form a complex (e.g., by binding directly or indirectly) to one or more components of the cargo. In certain examples, a molecule of an exosome may be fused with first adapter protein and a component of the cargo may be fused with a second adapter protein. The first and the second adapter protein may specifically bind each other, thus associating the cargo with the exosome. Examples of such exosomes include those described in Ye Y, et al., Biomater Sci. 2020 Apr. 28. doi: 10.1039/d0bm00427h.

### Retrovirus Like Delivery Systems

[0603] The delivery vehicle may comprise a retro-virus like protein, such as PEG10, which is capable of incorporating a cargo into a virus-like particle. As such systems can be re-programmed to package specific cargos, polynucleotides encoding components of the Fanzor systems disclosed herein may be further modified with a recognition sequence that leads to selective packaging of the Fanzor components into such retro-virus like VLPs. Said VLPs may be further modified with fusogenic proteins that impart tissue or cell specificity. Example systems are disclosed in Segal et al. Mammalian retrovirus-like protein PEG10 packages its own mRNA and can be pseudotyped for mRNA delivery. 373 Science, 882-889 (2021), which is incorporated herein by reference.

### Genetically Modified Cells and Organisms

[0604] The present disclosure further provides cells comprising one or more components of the compositions and systems herein, e.g., the Fanzor polypeptide and/or nucleic acid component(s). Also provided include cells modified by the systems and methods herein, and cell cultures, tissues, organs, organism comprising such cells or progeny thereof. In one embodiment, the present disclosure provides a method of modifying a cell or organism. The cell may be a prokaryotic cell or a eukaryotic cell. The cell may be a mammalian cell. The mammalian cell many be a non-human primate, bovine, porcine, rodent or mouse cell. The cell may be a non-mammalian eukaryotic cell such as poultry, fish or shrimp. The cell may be a therapeutic T cell or antibody-producing B-cell. The cell may also be a plant cell. The plant cell may be of a crop plant such as cassava, corn, sorghum, wheat, or rice. The plant cell may also be of an algae, tree or vegetable. The modification introduced to the cell by the present invention may be such that the cell and progeny of the cell are altered for improved production of biologic products such as an antibody, starch, alcohol or other desired cellular output. The modification introduced to the cell by the present invention may be such that the cell and progeny of the cell include an alteration that changes the biologic product produced.

[0605] In one embodiment, one or more polynucleotide molecules, vectors, or vector systems driving expression of one or more elements of the compositions, systems, or delivery systems comprising one or more elements of the nucleic acid-targeting system are introduced into a host cell such that expression of the elements of the nucleic acid-targeting system direct formation of a nucleic acid-targeting complex at one or more target sites. In one embodiment of the invention the host cell may be a eukaryotic cell, a prokaryotic cell, or a plant cell.

[0606] In particular embodiments, the host cell is a cell of a cell line. Cell lines are available from a variety of sources known to those with skill in the art (see, e.g., the American Type Culture Collection (ATCC) (Manassas, Va.)). In one embodiment, a cell transfected with one or more vectors described herein is used to establish a new cell line comprising one or more vector-derived sequences. In one embodiment, a cell transiently transfected with the components of a system as described herein (such as by transient transfection of one or more vectors, or transfection with RNA), and modified through the activity of a complex, is used to establish a new cell line comprising cells containing the modification but lacking any other exogenous sequence. In one embodiment, cells transiently or non-transiently transfected with one or more vectors described herein, or cell lines derived from such cells are used in assessing one or more test compounds.

[0607] Further intended are isolated human cells or tissues, plants or non-human animals comprising one or more of the polynucleotide molecules, vectors, vector systems, or cells described in any of the embodiments herein. In an aspect, host cells and cell lines modified by or comprising the compositions, systems or modified enzymes of present invention are provided, including (isolated) stem cells, and progeny thereof.

[0608] In one embodiment, the plants or non-human animals comprise at least one of the system components, polynucleotide molecules, vectors, vector systems, or cells described in any of the embodiments herein at least one tissue type of the plant or non-human animal. In one embodiment, non-human animals comprise at least one of the system components, polynucleotide molecules, vectors, vector systems, or cells described in any of the embodiments herein in at least one tissue type. In one embodiment, the presence of the system components is transient, in that they are degraded over time. In one embodiment, expression of the components of the systems and compositions described in any of the embodiments comprised in polynucleotide molecules, vectors, vector systems, or cells is limited to certain tissue types or regions in the plant or non-human animal. In one embodiment, the expression of the components of the systems and compositions described in any of the embodiments comprised in polynucleotide molecules, vectors, vector systems, or cells is dependent of a physiological cue. In one embodiment, expression of the components of the systems and compositions described in any of the embodiments comprised in polynucleotide molecules, vectors, vector systems, or cells may be triggered by an exogenous molecule. In one embodiment, expression of the components of the systems and compositions described in any of the embodiments comprised in polynucleotide molecules, vectors, vector systems, or cells is dependent on the expression of a non-Fanzor molecule in the plant or non-human animal.

### Pharmaceutical Formulations

[0609] Also described herein are pharmaceutical formulations that can contain an amount, effective amount, and/or least effective amount, and/or therapeutically effective amount of one or more compounds, molecules, compositions, vectors, vector systems, cells, or a combination thereof (which are also referred to as the primary active agent or ingredient elsewhere herein) described in greater detail elsewhere herein and a pharmaceutically acceptable carrier or excipient. As used herein, “pharmaceutical formulation” refers to the combination of an active agent, compound, or ingredient with a pharmaceutically acceptable carrier or excipient, making the composition suitable for diagnostic, therapeutic, or preventive use in vitro, in vivo, or ex vivo. As used herein, “pharmaceutically acceptable carrier or excipient” refers to a carrier or excipient that is useful in preparing a pharmaceutical formulation that is generally safe, non-toxic, and is neither biologically or otherwise undesirable, and includes a carrier or excipient that is acceptable for veterinary use as well as human pharmaceutical use. A “pharmaceutically acceptable carrier or excipient” as used in the specification and claims includes both one and more than one such carrier or excipient. When present, the compound can optionally be present in the pharmaceutical formulation as a pharmaceutically acceptable salt. In some embodiments, the pharmaceutical formulation can include, such as an active ingredient, a Fanzor system or component thereof described in greater detail elsewhere herein. In some embodiments, the pharmaceutical formulation can include, such as an active ingredient, a Fanzor polynucleotide described in greater detail elsewhere herein. In some embodiments, the pharmaceutical formulation can include, such as an active ingredient one or more modified cells, such as one or more modified cells described in greater detail elsewhere herein.

[0610] In some embodiments, the active ingredient is present as a pharmaceutically acceptable salt of the active ingredient. As used herein, “pharmaceutically acceptable salt” refers to any acid or base addition salt whose counter-ions are non-toxic to the subject to which they are administered in pharmaceutical doses of the salts. Suitable salts include, hydrobromide, iodide, nitrate, bisulfate, phosphate, isonicotinate, lactate, salicylate, acid citrate, tartrate, oleate, tannate, pantothenate, bitartrate, ascorbate, succinate, maleate, gentisinate, fumarate, gluconate, glucaronate, saccharate, formate, benzoate, glutamate, methanesulfonate, ethanesulfonate, benzenesulfonate, p-toluenesulfonate, camphorsulfonate, napthalenesulfonate, propionate, malonate, mandelate, malate, phthalate, and pamoate.

[0611] The pharmaceutical formulations described herein can be administered to a subject in need thereof via any suitable method or route to a subject in need thereof. Suitable administration routes can include, but are not limited to auricular (otic), buccal, conjunctival, cutaneous, dental, electro-osmosis, endocervical, endosinusial, endotracheal, enteral, epidural, extra-amniotic, extracorporeal, hemodialysis, infiltration, interstitial, intra-abdominal, intra-amniotic, intra-arterial, intra-articular, intrabiliary, intrabronchial, intrabursal, intracardiac, intracartilaginous, intracaudal, intracavernous, intracavitary, intracerebral, intracisternal, intracorneal, intracoronal (dental), intracoronary, intracorporus cavemosum, intradermal, intradiscal, intraductal, intraduodenal, intradural, intraepidermal, intraesophageal, intragastric, intragingival, intraileal, intralesional, intraluminal, intralymphatic, intramedullary, intrameningeal, intramuscular, intraocular, intraovarian, intrapericardial, intraperitoneal, intrapleural, intraprostatic, intrapulmonary, intrasinal, intraspinal, intrasynovial, intratendinous, intratesticular, intrathecal, intrathoracic, intratubular, intratumor, intratympanic, intrauterine, intravascular, intravenous, intravenous bolus, intravenous drip, intraventricular, intravesical, intravitreal, iontophoresis, irrigation, laryngeal, nasal, nasogastric, occlusive dressing technique, ophthalmic, oral, oropharyngeal, other, parenteral, percutaneous, periarticular, peridural, perineural, periodontal, rectal, respiratory (inhalation), retrobulbar, soft tissue, subarachnoid, subconjunctival, subcutaneous, sublingual, submucosal, topical, transdermal, transmucosal, transplacental, transtracheal, transtympanic, ureteral, urethral, and/or vaginal administration, and/or any combination of the above administration routes, which typically depends on the disease to be treated and/or the active ingredient(s).

[0612] Where appropriate, compounds, molecules, compositions, vectors, vector systems, cells, or a combination thereof described in greater detail elsewhere herein can be provided to a subject in need thereof as an ingredient, such as an active ingredient or agent, in a pharmaceutical formulation. As such, also described are pharmaceutical formulations containing one or more of the compounds and salts thereof, or pharmaceutically acceptable salts thereof described herein. Suitable salts include, hydrobromide, iodide, nitrate, bisulfate, phosphate, isonicotinate, lactate, salicylate, acid citrate, tartrate, oleate, tannate, pantothenate, bitartrate, ascorbate, succinate, maleate, gentisinate, fumarate, gluconate, glucaronate, saccharate, formate, benzoate, glutamate, methanesulfonate, ethanesulfonate, benzenesulfonate, p-toluenesulfonate, camphorsulfonate, napthalenesulfonate, propionate, malonate, mandelate, malate, phthalate, and pamoate.

[0613] In some embodiments, the subject in need thereof has or is suspected of having a genetic or epigenetic disease or condition. In some embodiments, the subject in need thereof has or is suspected of having a hematopoietic disease or a symptom thereof. In some embodiments, the subject in need thereof has or is suspected of having, a neurobiological disease or disorder, a psychiatric disease or disorder, a cancer, an autoimmune or immune disease or disorder, a thrombosis disease, a heart disease, a kidney disease, a lung disease, a brain disease, a musculoskeletal disease, a bone disease, a muscle disease, a pancreatic disease, a liver disease, an intestinal disease, a stomach disease, an esophageal disease, an ear disease, an oral disease, a skin disease, a nose or sinus disease, or a blood vessel disease, or any combination thereof. Exemplary diseases are described elsewhere herein. As used herein, “agent” refers to any substance, compound, molecule, and the like, which can be biologically active or otherwise can induce a biological and/or physiological effect on a subject to which it is administered to. As used herein, “active agent” or “active ingredient” refers to a substance, compound, or molecule, which is biologically active or otherwise, induces a biological or physiological effect on a subject to which it is administered to. In other words, “active agent” or “active ingredient” refers to a component or components of a composition to which the whole or part of the effect of the composition is attributed. An agent can be a primary active agent, or in other words, the component(s) of a composition to which the whole or part of the effect of the composition is attributed. An agent can be a secondary agent, or in other words, the component(s) of a composition to which an additional part and/or other effect of the composition is attributed.

### Pharmaceutically Acceptable Carriers and Secondary Ingredients and Agents

[0614] The pharmaceutical formulation can include a pharmaceutically acceptable carrier. Suitable pharmaceutically acceptable carriers include, but are not limited to water, salt solutions, alcohols, gum arabic, vegetable oils, benzyl alcohols, polyethylene glycols, gelatin, carbohydrates such as lactose, amylose or starch, magnesium stearate, talc, silicic acid, viscous paraffin, perfume oil, fatty acid esters, hydroxy methylcellulose, and polyvinyl pyrrolidone, which do not deleteriously react with the active composition.

[0615] The pharmaceutical formulations can be sterilized, and if desired, mixed with agents, such as lubricants, preservatives, stabilizers, wetting agents, emulsifiers, salts for influencing osmotic pressure, buffers, coloring, flavoring and/or aromatic substances, and the like which do not deleteriously react with the active compound.

[0616] In some embodiments, the pharmaceutical formulation can also include an effective amount of secondary active agents, including but not limited to, biologic agents or molecules including, but not limited to, e.g., polynucleotides, amino acids, peptides, polypeptides, antibodies, aptamers, ribozymes, hormones, immunomodulators, antipyretics, anxiolytics, antipsychotics, analgesics, antispasmodics, anti-inflammatories, anti-histamines, anti-infectives, chemotherapeutics, and combinations thereof.

### Effective Amounts

[0617] In some embodiments, the amount of the primary active agent and/or optional secondary agent can be an effective amount, least effective amount, and/or therapeutically effective amount. As used herein, “effective amount” refers to the amount of the primary and/or optional secondary agent included in the pharmaceutical formulation that achieve one or more therapeutic effects or desired effect. As used herein, “least effective” amount refers to the lowest amount of the primary and/or optional secondary agent that achieves the one or more therapeutic or other desired effects. As used herein, “therapeutically effective amount” refers to the amount of the primary and/or optional secondary agent included in the pharmaceutical formulation that achieves one or more therapeutic effects. In some embodiments, the one or more therapeutic effects are to modify one or more polynucleotides.

[0618] The effective amount, least effective amount, and/or therapeutically effective amount of the primary and optional secondary active agent described elsewhere herein contained in the pharmaceutical formulation can be any non-zero amount ranging from about Oto 10, 20, 30, 40, 50, 60, 70, 80, 90, 100, 110, 120, 130, 140, 150, 160, 170, 180, 190, 200, 210, 220, 230, 240, 250, 260, 270, 280, 290, 300, 310, 320, 330, 340, 350, 360, 370, 380, 390, 400, 410, 420, 430, 440, 450, 460, 470, 480, 490, 500, 510, 520, 530, 540, 550, 560, 570, 580, 590, 600, 610, 620, 630, 640, 650, 660, 670, 680, 690, 700, 710, 720, 730, 740, 750, 760, 770, 780, 790, 800, 810, 820, 830, 840, 850, 860, 870, 880, 890, 900, 910, 920, 930, 940, 950, 960, 970, 980, 990, 1000 pg, ng, g, mg, or g or be any numerical value or subrange within any of these ranges.

[0619] In some embodiments, the effective amount, least effective amount, and/or therapeutically effective amount can be an effective concentration, least effective concentration, and/or therapeutically effective concentration, which can each be any non-zero amount ranging from about 0 to 10, 20, 30, 40, 50, 60, 70, 80, 90, 100, 110, 120, 130, 140, 150, 160, 170, 180, 190, 200, 210, 220, 230, 240, 250, 260, 270, 280, 290, 300, 310, 320, 330, 340, 350, 360, 370, 380, 390, 400, 410, 420, 430, 440, 450, 460, 470, 480, 490, 500, 510, 520, 530, 540, 550, 560, 570, 580, 590, 600, 610, 620, 630, 640, 650, 660, 670, 680, 690, 700, 710, 720, 730, 740, 750, 760, 770, 780, 790, 800, 810, 820, 830, 840, 850, 860, 870, 880, 890, 900, 910, 920, 930, 940, 950, 960, 970, 980, 990, 1000 pM, nM, μM, mM, or M or be any numerical value or subrange within any of these ranges.

[0620] In other embodiments, the effective amount, least effective amount, and/or therapeutically effective amount of the primary and optional secondary active agent be any non-zero amount ranging from about 0 to 10, 20, 30, 40, 50, 60, 70, 80, 90, 100, 110, 120, 130, 140, 150, 160, 170, 180, 190, 200, 210, 220, 230, 240, 250, 260, 270, 280, 290, 300, 310, 320, 330, 340, 350, 360, 370, 380, 390, 400, 410, 420, 430, 440, 450, 460, 470, 480, 490, 500, 510, 520, 530, 540, 550, 560, 570, 580, 590, 600, 610, 620, 630, 640, 650, 660, 670, 680, 690, 700, 710, 720, 730, 740, 750, 760, 770, 780, 790, 800, 810, 820, 830, 840, 850, 860, 870, 880, 890, 900, 910, 920, 930, 940, 950, 960, 970, 980, 990, 1000 IU or be any numerical value or subrange within any of these ranges.

[0621] In some embodiments, the primary and/or the optional secondary active agent present in the pharmaceutical formulation can be any non-zero amount ranging from about 0 to 0.001, 0.002, 0.003, 0.004, 0.005, 0.006, 0.007, 0.008, 0.009, 0.01, 0.02, 0.03, 0.04, 0.05, 0.06, 0.07, 0.08, 0.09, 0.1, 0.11, 0.12, 0.13, 0.14, 0.15, 0.16, 0.17, 0.18, 0.19, 0.2, 0.21, 0.22, 0.23, 0.24, 0.25, 0.26, 0.27, 0.28, 0.29, 0.3, 0.31, 0.32, 0.33, 0.34, 0.35, 0.36, 0.37, 0.38, 0.39, 0.4, 0.41, 0.42, 0.43, 0.44, 0.45, 0.46, 0.47, 0.48, 0.49, 0.5, 0.51, 0.52, 0.53, 0.54, 0.55, 0.56, 0.57, 0.58, 0.59, 0.6, 0.61, 0.62, 0.63, 0.64, 0.65, 0.66, 0.67, 0.68, 0.69, 0.7, 0.71, 0.72, 0.73, 0.74, 0.75, 0.76, 0.77, 0.78, 0.79, 0.8, 0.81, 0.82, 0.83, 0.84, 0.85, 0.86, 0.87, 0.88, 0.89, 0.9, 0.91, 0.92, 0.93, 0.94, 0.95, 0.96, 0.97, 0.98, 0.9, to 1, 2, 3, 4, 5, 6, 7, 8, 9, 10, 11, 12, 13, 14, 15, 16, 17, 18, 19, 20, 21, 22, 23, 24, 25, 26, 27, 28, 29, 30, 31, 32, 33, 34, 35, 36, 37, 38, 39, 40, 41, 42, 43, 44, 45, 46, 47, 48, 49, 50, 51, 52, 53, 54, 55, 56, 57, 58, 59, 60, 61, 62, 63, 64, 65, 66, 67, 68, 69, 70, 71, 72, 73, 74, 75, 76, 77, 78, 79, 80, 81, 82, 83, 84, 85, 86, 87, 88, 89, 90, 91, 92, 93, 94, 95, 96, 97, 98, 99, 99.1, 99.2, 99.3, 99.4, 99.5, 99.6, 99.7, 99.8, 99.9% w/w, v/v, or w/v of the pharmaceutical formulation or be any numerical value or subrange within any of these ranges.

[0622] In some embodiments where a cell or cell population is present in the pharmaceutical formulation (e.g., as a primary and/or or secondary active agent), the effective amount of cells can be any amount ranging from about 1 or 2 cells to 1×10¹/mL, 1×10²⁰/mL or more, such as about 1×10¹/mL, 1×10²/mL, 1×10³/mL, 1×10⁴/mL, 1×10⁵/mL, 1×10⁶/mL, 1×10⁷/mL, 1×10⁸/mL, 1×10⁹/mL, 1×10¹⁰/mL, 1×10¹¹/mL, 1×10¹²/mL, 1×10¹³/mL, 1×10¹⁴/mL, 1×10¹⁵/mL, 1×10¹⁶/mL, 1×10¹⁷/mL, 1×10¹⁸/mL, 1×10¹⁹/mL, to/or about 1×10²⁰/mL or any numerical value or subrange within any of these ranges.

[0623] In some embodiments, the amount or effective amount, particularly where an infective particle is being delivered (e.g., a virus particle having the primary or secondary agent as a cargo), the effective amount of virus particles can be expressed as a titer (plaque forming units per unit of volume) or as a MOI (multiplicity of infection). In some embodiments, the effective amount can be about 1×10¹ particles per pL, nL, μL, mL, or L to 1×10²⁰/particles per pL, nL, μL, mL, or L or more, such as about 1×10¹, 1×10², 1×10³, 1×10⁴, 1×10⁵, 1×10⁶, 1×10⁷, 1×10⁸, 1×10⁹, 1×10¹⁰, 1×10¹¹, 1×10¹², 1×10¹³, 1×10¹⁴, 1×10¹⁵, 1×10¹⁶, 1×10¹⁷, 1×10¹⁸, 1×10¹⁹, to/or about 1×10²⁰ particles per pL, nL, μL, mL, or L. In some embodiments, the effective titer can be about 1×10¹ transforming units per pL, nL, μL, mL, or L to 1×10²⁰/transforming units per pL, nL, μL, mL, or L or more, such as about 1×10¹, 1×10², 1×10³, 1×10⁴, 1×10⁵, 1×10⁶, 1×10⁷, 1×10⁸, 1×10⁹, 1×10¹⁰, 1×10¹¹, 1×10¹², 1×10¹³, 1×10¹⁴, 1×10¹⁵, 1×10¹⁶, 1×10¹⁷, 1×10¹⁸, 1×10¹⁹, to/or about 1×10²⁰ transforming units per pL, nL, μL, mL, or L or any numerical value or subrange within these ranges. In some embodiments, the MOI of the pharmaceutical formulation can range from about 0.1 to 10 or more, such as 0.1, 0.2, 0.3, 0.4, 0.5, 0.6, 0.7, 0.8, 0.9, 1, 1.1, 1.2, 1.3, 1.4, 1.5, 1.6, 1.7, 1.8, 1.9, 2, 2.1, 2.2, 2.3, 2.4, 2.5, 2.6, 2.7, 2.8, 2.9, 3, 3.1, 3.2, 3.3, 3.4, 3.5, 3.6, 3.7, 3.8, 3.9, 4, 4.1, 4.2, 4.3, 4.4, 4.5, 4.6, 4.7, 4.8, 4.9, 5, 5.1, 5.2, 5.3, 5.4, 5.5, 5.6, 5.7, 5.8, 5.9, 6, 6.1, 6.2, 6.3, 6.4, 6.5, 6.6, 6.7, 6.8, 6.9, 7, 7.1, 7.2, 7.3, 7.4, 7.5, 7.6, 7.7, 7.8, 7.9, 8, 8.1, 8.2, 8.3, 8.4, 8.5, 8.6, 8.7, 8.8, 8.9, 9, 9.1, 9.2, 9.3, 9.4, 9.5, 9.6, 9.7, 9.8, 9.9, 10 or more or any numerical value or subrange within these ranges.

[0624] In some embodiments, the amount or effective amount of the one or more of the active agent(s) described herein contained in the pharmaceutical formulation can range from about 1 pg/kg to about 10 mg/kg based upon the bodyweight of the subject in need thereof or average bodyweight of the specific patient population to which the pharmaceutical formulation can be administered.

[0625] In embodiments where there is a secondary agent contained in the pharmaceutical formulation, the effective amount of the secondary active agent will vary depending on the secondary agent, the primary agent, the administration route, subject age, disease, stage of disease, among other things, which will be one of ordinary skill in the art.

[0626] When optionally present in the pharmaceutical formulation, the secondary active agent can be included in the pharmaceutical formulation or can exist as a stand-alone compound or pharmaceutical formulation that can be administered contemporaneously or sequentially with the compound, derivative thereof, or pharmaceutical formulation thereof.

[0627] In some embodiments, the effective amount of the secondary active agent, when optionally present, is any non-zero amount ranging from about 0 to 1, 2, 3, 4, 5, 6, 7, 8, 9, 10, 11, 12, 13, 14, 15, 16, 17, 18, 19, 20, 21, 22, 23, 24, 25, 26, 27, 28, 29, 30, 31, 32, 33, 34, 35, 36, 37, 38, 39, 40, 41, 42, 43, 44, 45, 46, 47, 48, 49, 50, 51, 52, 53, 54, 55, 56, 57, 58, 59, 60, 61, 62, 63, 64, 65, 66, 67, 68, 69, 70, 71, 72, 73, 74, 75, 76, 77, 78, 79, 80, 81, 82, 83, 84, 85, 86, 87, 88, 89, 90, 91, 92, 93, 94, 95, 96, 97, 98, 99, 99.1, 99.2, 99.3, 99.4, 99.5, 99.6, 99.7, 99.8, 99.9% w/w, v/v, or w/v of the total active agents present in the pharmaceutical formulation or any numerical value or subrange within these ranges. In additional embodiments, the effective amount of the secondary active agent is any non-zero amount ranging from about 0 to 1, 2, 3, 4, 5, 6, 7, 8, 9, 10, 11, 12, 13, 14, 15, 16, 17, 18, 19, 20, 21, 22, 23, 24, 25, 26, 27, 28, 29, 30, 31, 32, 33, 34, 35, 36, 37, 38, 39, 40, 41, 42, 43, 44, 45, 46, 47, 48, 49, 50, 51, 52, 53, 54, 55, 56, 57, 58, 59, 60, 61, 62, 63, 64, 65, 66, 67, 68, 69, 70, 71, 72, 73, 74, 75, 76, 77, 78, 79, 80, 81, 82, 83, 84, 85, 86, 87, 88, 89, 90, 91, 92, 93, 94, 95, 96, 97, 98, 99, 99.1, 99.2, 99.3, 99.4, 99.5, 99.6, 99.7, 99.8, 99.9% w/w, v/v, or w/v of the total pharmaceutical formulation or any numerical value or subrange within these ranges.

### Dosage Forms

[0628] In some embodiments, the pharmaceutical formulations described herein can be provided in a dosage form. The dosage form can be administered to a subject in need thereof. The dosage form can be effective generate specific concentration, such as an effective concentration, at a given site in the subject in need thereof. As used herein, “dose,” “unit dose,” or “dosage” can refer to physically discrete units suitable for use in a subject, each unit containing a predetermined quantity of the primary active agent, and optionally present secondary active ingredient, and/or a pharmaceutical formulation thereof calculated to produce the desired response or responses in association with its administration. In some embodiments, the given site is proximal to the administration site. In some embodiments, the given site is distal to the administration site. In some cases, the dosage form contains a greater amount of one or more of the active ingredients present in the pharmaceutical formulation than the final intended amount needed to reach a specific region or location within the subject to account for loss of the active components such as via first and second pass metabolism.

[0629] The dosage forms can be adapted for administration by any appropriate route. Appropriate routes include, but are not limited to, oral (including buccal or sublingual), rectal, intraocular, inhaled, intranasal, topical (including buccal, sublingual, or transdermal), vaginal, parenteral, subcutaneous, intramuscular, intravenous, internasal, and intradermal. Other appropriate routes are described elsewhere herein. Such formulations can be prepared by any method known in the art.

[0630] Dosage forms adapted for oral administration can discrete dosage units such as capsules, pellets or tablets, powders or granules, solutions, or suspensions in aqueous or non-aqueous liquids; edible foams or whips, or in oil-in-water liquid emulsions or water-in-oil liquid emulsions. In some embodiments, the pharmaceutical formulations adapted for oral administration also include one or more agents which flavor, preserve, color, or help disperse the pharmaceutical formulation. Dosage forms prepared for oral administration can also be in the form of a liquid solution that can be delivered as a foam, spray, or liquid solution. The oral dosage form can be administered to a subject in need thereof. Where appropriate, the dosage forms described herein can be microencapsulated.

[0631] The dosage form can also be prepared to prolong or sustain the release of any ingredient. In some embodiments, compounds, molecules, compositions, vectors, vector systems, cells, or a combination thereof described herein can be the ingredient whose release is delayed. In some embodiments the primary active agent is the ingredient whose release is delayed. In some embodiments, an optional secondary agent can be the ingredient whose release is delayed. Suitable methods for delaying the release of an ingredient include, but are not limited to, coating or embedding the ingredients in material in polymers, wax, gels, and the like. Delayed release dosage formulations can be prepared as described in standard references such as “Pharmaceutical dosage form tablets,” eds. Liberman et. al. (New York, Marcel Dekker, Inc., 1989), “Remington—The science and practice of pharmacy”, 20th ed., Lippincott Williams & Wilkins, Baltimore, MD, 2000, and “Pharmaceutical dosage forms and drug delivery systems”, 6th Edition, Ansel et al., (Media, PA: Williams and Wilkins, 1995). These references provide information on excipients, materials, equipment, and processes for preparing tablets and capsules and delayed release dosage forms of tablets and pellets, capsules, and granules. The delayed release can be anywhere from about an hour to about 3 months or more.

[0632] Examples of suitable coating materials include, but are not limited to, cellulose polymers such as cellulose acetate phthalate, hydroxypropyl cellulose, hydroxypropyl methylcellulose, hydroxypropyl methylcellulose phthalate, and hydroxypropyl methylcellulose acetate succinate; polyvinyl acetate phthalate, acrylic acid polymers and copolymers, and methacrylic resins that are commercially available under the trade name EUDRAGIT® (Roth Pharma, Westerstadt, Germany), zein, shellac, and polysaccharides.

[0633] Coatings may be formed with a different ratio of water-soluble polymer, water insoluble polymers, and/or pH dependent polymers, with or without water insoluble/water soluble non-polymeric excipient, to produce the desired release profile. The coating is either performed on the dosage form (matrix or simple) which includes, but is not limited to, tablets (compressed with or without coated beads), capsules (with or without coated beads), beads, particle compositions, “ingredient as is” formulated as, but not limited to, suspension form or as a sprinkle dosage form.

[0634] Where appropriate, the dosage forms described herein can be a liposome. In these embodiments, primary active ingredient(s), and/or optional secondary active ingredient(s), and/or pharmaceutically acceptable salt thereof where appropriate are incorporated into a liposome. In embodiments where the dosage form is a liposome, the pharmaceutical formulation is thus a liposomal formulation. The liposomal formulation can be administered to a subject in need thereof.

[0635] Dosage forms adapted for topical administration can be formulated as ointments, creams, suspensions, lotions, powders, solutions, pastes, gels, sprays, aerosols, or oils. In some embodiments for treatments of the eye or other external tissues, for example the mouth or the skin, the pharmaceutical formulations are applied as a topical ointment or cream. When formulated in an ointment, a primary active ingredient, optional secondary active ingredient, and/or pharmaceutically acceptable salt thereof where appropriate can be formulated with a paraffinic or water-miscible ointment base. In other embodiments, the primary and/or secondary active ingredient can be formulated in a cream with an oil-in-water cream base or a water-in-oil base. Dosage forms adapted for topical administration in the mouth include lozenges, pastilles, and mouth washes.

[0636] Dosage forms adapted for nasal or inhalation administration include aerosols, solutions, suspension drops, gels, or dry powders. In some embodiments, a primary active ingredient, optional secondary active ingredient, and/or pharmaceutically acceptable salt thereof where appropriate can be in a dosage form adapted for inhalation is in a particle-size-reduced form that is obtained or obtainable by micronization. In some embodiments, the particle size of the size reduced (e.g., micronized) compound or salt or solvate thereof, is defined by a D₅₀ value of about 0.5 to about 10 microns as measured by an appropriate method known in the art. Dosage forms adapted for administration by inhalation also include particle dusts or mists. Suitable dosage forms wherein the carrier or excipient is a liquid for administration as a nasal spray or drops include aqueous or oil solutions/suspensions of an active (primary and/or secondary) ingredient, which may be generated by various types of metered dose pressurized aerosols, nebulizers, or insufflators. The nasal/inhalation formulations can be administered to a subject in need thereof.

[0637] In some embodiments, the dosage forms are aerosol formulations suitable for administration by inhalation. In some of these embodiments, the aerosol formulation contains a solution or fine suspension of a primary active ingredient, secondary active ingredient, and/or pharmaceutically acceptable salt thereof where appropriate and a pharmaceutically acceptable aqueous or non-aqueous solvent. Aerosol formulations can be presented in single or multi-dose quantities in sterile form in a sealed container. For some of these embodiments, the sealed container is a single dose or multi-dose nasal or an aerosol dispenser fitted with a metering valve (e.g., metered dose inhaler), which is intended for disposal once the contents of the container have been exhausted.

[0638] Where the aerosol dosage form is contained in an aerosol dispenser, the dispenser contains a suitable propellant under pressure, such as compressed air, carbon dioxide, or an organic propellant, including but not limited to a hydrofluorocarbon. The aerosol formulation dosage forms in other embodiments are contained in a pump-atomizer. The pressurized aerosol formulation can also contain a solution or a suspension of a primary active ingredient, optional secondary active ingredient, and/or pharmaceutically acceptable salt thereof. In further embodiments, the aerosol formulation also contains co-solvents and/or modifiers incorporated to improve, for example, the stability and/or taste and/or fine particle mass characteristics (amount and/or profile) of the formulation. Administration of the aerosol formulation can be once daily or several times daily, for example 2, 3, 4, or 8 times daily, in which 1, 2, 3 or more doses are delivered each time. The aerosol formulations can be administered to a subject in need thereof.

[0639] For some dosage forms suitable and/or adapted for inhaled administration, the pharmaceutical formulation is a dry powder inhalable-formulations. In addition to a primary active agent, optional secondary active ingredient, and/or pharmaceutically acceptable salt thereof where appropriate, such a dosage form can contain a powder base such as lactose, glucose, trehalose, mannitol, and/or starch. In some of these embodiments, a primary active agent, secondary active ingredient, and/or pharmaceutically acceptable salt thereof where appropriate is in a particle-size reduced form. In further embodiments, a performance modifier, such as L-leucine or another amino acid, cellobiose octaacetate, and/or metals salts of stearic acid, such as magnesium or calcium stearate. In some embodiments, the aerosol formulations are arranged so that each metered dose of aerosol contains a predetermined amount of an active ingredient, such as the one or more of the compositions, compounds, vector(s), molecules, cells, and combinations thereof described herein.

[0640] Dosage forms adapted for vaginal administration can be presented as pessaries, tampons, creams, gels, pastes, foams, or spray formulations. Dosage forms adapted for rectal administration include suppositories or enemas. The vaginal formulations can be administered to a subject in need thereof.

[0641] Dosage forms adapted for parenteral administration and/or adapted for injection can include aqueous and/or non-aqueous sterile injection solutions, which can contain antioxidants, buffers, bacteriostats, solutes that render the composition isotonic with the blood of the subject, and aqueous and non-aqueous sterile suspensions, which can include suspending agents and thickening agents. The dosage forms adapted for parenteral administration can be presented in a single-unit dose or multi-unit dose containers, including but not limited to sealed ampoules or vials. The doses can be lyophilized and re-suspended in a sterile carrier to reconstitute the dose prior to administration. Extemporaneous injection solutions and suspensions can be prepared in some embodiments, from sterile powders, granules, and tablets. The parenteral formulations can be administered to a subject in need thereof.

[0642] For some embodiments, the dosage form contains a predetermined amount of a primary active agent, secondary active ingredient, and/or pharmaceutically acceptable salt thereof where appropriate per unit dose. In an embodiment, the predetermined amount of primary active agent, secondary active ingredient, and/or pharmaceutically acceptable salt thereof where appropriate can be an effective amount, a least effect amount, and/or a therapeutically effective amount. In other embodiments, the predetermined amount of a primary active agent, secondary active agent, and/or pharmaceutically acceptable salt thereof where appropriate, can be an appropriate fraction of the effective amount of the active ingredient.

### Co-Therapies and Combination Therapies

[0643] In some embodiments, the pharmaceutical formulation(s) described herein are part of a combination treatment or combination therapy. The combination treatment can include the pharmaceutical formulation described herein and an additional treatment modality. The additional treatment modality can be a chemotherapeutic, a biological therapeutic, surgery, radiation, diet modulation, environmental modulation, a physical activity modulation, and combinations thereof.

[0644] In some embodiments, the co-therapy or combination therapy can additionally include but not limited to, polynucleotides, amino acids, peptides, polypeptides, antibodies, aptamers, ribozymes, hormones, immunomodulators, antipyretics, anxiolytics, antipsychotics, analgesics, antispasmodics, anti-inflammatories, anti-histamines, anti-infectives, chemotherapeutics, and combinations thereof.

### Administration of the Pharmaceutical Formulations

[0645] The pharmaceutical formulations or dosage forms thereof described herein can be administered one or more times hourly, daily, monthly, or yearly (e.g., 1, 2, 3, 4, 5, 6, 7, 8, 9, 10, 11, 12, 13, 14, 15, 16, 17, 18, 19, 20, or more times hourly, daily, monthly, or yearly). In some embodiments, the pharmaceutical formulations or dosage forms thereof described herein can be administered continuously over a period of time ranging from minutes to hours to days. Devices and dosages forms are known in the art and described herein that are effective to provide continuous administration of the pharmaceutical formulations described herein. In some embodiments, the first one or a few initial amount(s) administered can be a higher dose than subsequent doses. This is typically referred to in the art as a loading dose or doses and a maintenance dose, respectively. In some embodiments, the pharmaceutical formulations can be administered such that the doses over time are tapered (increased or decreased) overtime so as to wean a subject gradually off of a pharmaceutical formulation or gradually introduce a subject to the pharmaceutical formulation.

[0646] As previously discussed, the pharmaceutical formulation can contain a predetermined amount of a primary active agent, secondary active agent, and/or pharmaceutically acceptable salt thereof where appropriate. In some of these embodiments, the predetermined amount can be an appropriate fraction of the effective amount of the active ingredient. Such unit doses may therefore be administered once or more than once a day, month, or year (e.g., 1, 2, 3, 4, 5, 6, or more times per day, month, or year). Such pharmaceutical formulations may be prepared by any of the methods well known in the art.

[0647] Where co-therapies or multiple pharmaceutical formulations are to be delivered to a subject, the different therapies or formulations can be administered sequentially or simultaneously. Sequential administration is administration where an appreciable amount of time occurs between administrations, such as more than about 15, 20, 30, 45, 60 minutes or more. The time between administrations in sequential administration can be on the order of hours, days, months, or even years, depending on the active agent present in each administration. Simultaneous administration refers to administration of two or more formulations at the same time or substantially at the same time (e.g., within seconds or just a few minutes apart), where the intent is that the formulations be administered together at the same time.

### Applications and Methods of Use in General

[0648] The systems, the vector systems, the vectors and the compositions described herein may be used in various nucleic acids-targeting applications, altering or modifying synthesis of a gene product, such as a protein, nucleic acids cleavage, nucleic acids editing, nucleic acids splicing; trafficking of target nucleic acids, tracing of target nucleic acids, isolation of target nucleic acids, visualization of target nucleic acids, etc.

[0649] Aspects of the invention thus also encompass methods and uses of the compositions and systems described herein in genome engineering, e.g., for altering or manipulating the expression of one or more genes or the one or more gene products, in prokaryotic or eukaryotic cells, in vitro, in vivo or ex vivo. In some examples, the target polynucleotides are target sequences within genomic DNA, including nuclear genomic DNA, mitochondrial DNA, or chloroplast DNA.

[0650] Typically, in the context of a nucleic acid-targeting system, formation of a nucleic acid-targeting complex (comprising a nucleic acid component molecule hybridized to a target sequence and complexed with one or more nucleic acid-targeting effector proteins) results in cleavage of one or both DNA or RNA strands in or near (e.g., within 1, 2, 3, 4, 5, 6, 7, 8, 9, 10, 20, 50, or more base pairs from) the target sequence. As used herein the term “sequence(s) associated with a target locus of interest” refers to sequences near the vicinity of the target sequence (e.g., within 1, 2, 3, 4, 5, 6, 7, 8, 9, 10, 20, 50, or more base pairs from the target sequence, wherein the target sequence is comprised within a target locus of interest).

[0651] In one embodiment, the present disclosure provides a method of targeting a polynucleotide, comprising contacting a sample (such as cell, population of cells, tissue, organ, or an organism) that comprises a target polynucleotide with the composition, systems, polynucleotide(s), or vector(s). The contacting may result in modification of a gene product or modification of the amount or expression of a gene product. In some examples, the target sequence of the polynucleotide is a disease-associated target sequence.

[0652] In one embodiment, the present disclosure provides a method of modifying target polynucleotides comprising delivering the composition, the one or more polynucleotides of 2, or one or more vectors to a cell or population of cells comprising the target polynucleotides, wherein the complex directs the reverse transcriptase to the target sequence and the reverse transcriptase facilitates insertion of the donor sequence from the nucleic acid component into the target polynucleotide.

[0653] Examples of target polynucleotides include a sequence associated with a signaling biochemical pathway, e.g., a signaling biochemical pathway-associated gene or polynucleotide. Examples of target polynucleotides include a disease associated gene or polynucleotide. A “disease-associated” gene or polynucleotide refers to any gene or polynucleotide which is yielding transcription or translation products at an abnormal level or in an abnormal form in cells derived from a disease-affected tissues compared with tissues or cells of a non-disease control. It may be a gene that becomes expressed at an abnormally high level; it may be a gene that becomes expressed at an abnormally low level, where the altered expression correlates with the occurrence and/or progression of the disease. A disease-associated gene also refers to a gene possessing mutation(s) or genetic variation that is directly responsible or is in linkage disequilibrium with a gene(s) that is responsible for the etiology of a disease. The transcribed or translated products may be known or unknown, and may be at a normal or abnormal level.

[0654] The target polynucleotide of a complex can be any polynucleotide endogenous or exogenous to the eukaryotic cell. For example, the target polynucleotide can be a polynucleotide residing in the nucleus of the eukaryotic cell. The target polynucleotide can be a sequence coding a gene product (e.g., a protein) or a non-coding sequence (e.g., a regulatory polynucleotide or a junk DNA). Without wishing to be bound by theory, it is believed that the target sequence should be associated with a TAM (targeted adjacent motif); that is, a short sequence recognized by the complex. The precise sequence and length requirements for the TAMdiffer depending on the Fanzor polypeptide used, but TAMs are typically 2-5 base pair sequences adjacent the protospacer (that is, the target sequence). TAM specificity can be determined, for example according to the experimental setyp described in FIG. 8. In one embodiment, the TAMsequence comprises TCA. In embodiments, the TAMsequence is TCAN, wherein N may comprise any nucleotide. In one embodiment the TAMsequence comprises TCAG or TCAT. A skilled person will be able to identify further TAMsequences for use with a given Fanzor polypeptide. Further, engineering of the TAMInteracting (PI) domain may allow programing of TAMspecificity, improve target site recognition fidelity, and increase the versatility of the Fanzor polypeptide, genome engineering platform. Fanzor polypeptide may be engineered to alter their TAMspecificity, for example as described in Kleinstiver B P et al. Engineered CRISPR-Cas9 nucleases with altered TAMspecificities. Nature. 2015 Jul. 23; 523(7561):481-5. doi: 10.1038/nature14592.

[0655] Examples of target polynucleotides include a sequence associated with a signaling biochemical pathway, e.g., a signaling biochemical pathway-associated gene or polynucleotide. Examples of target polynucleotides include a disease associated gene or polynucleotide. A “disease-associated” gene or polynucleotide refers to any gene or polynucleotide which is yielding transcription or translation products at an abnormal level or in an abnormal form in cells derived from a disease-affected tissues compared with tissues or cells of a non-disease control. It may be a gene that becomes expressed at an abnormally high level; it may be a gene that becomes expressed at an abnormally low level, where the altered expression correlates with the occurrence and/or progression of the disease. A disease-associated gene also refers to a gene possessing mutation(s) or genetic variation that is directly responsible or is in linkage disequilibrium with a gene(s) that is responsible for the etiology of a disease. The transcribed or translated products may be known or unknown, and may be at a normal or abnormal level.

[0656] Aspects of the invention relate to a method of targeting a polynucleotide, comprising contacting a sample that comprises the polynucleotide with a composition, system or Fanzor polypeptide as described in any embodiment herein, a delivery system comprising a composition, system or Fanzor polypeptide as described in any embodiment herein, a polynucleotide comprising a composition, system or Fanzor polypeptide as described in any embodiment herein, a vector comprising a composition, system or Fanzor polypeptide as described in any embodiment herein, or a vector system comprising a composition, system or Fanzor polypeptide as described in any embodiment herein. In one embodiment, a target polynucleotide is contacted with at least two different composition, system or Fanzor polypeptides. In further embodiments, the two different Fanzor polypeptides have different target polynucleotide specificities, or degrees of specificity. In one embodiment, the two different Fanzor polypeptides have a different TAM specificity.

[0657] Also envisaged are methods of targeting a polynucleotide, comprising contacting a sample that comprises the polynucleotide with the composition and systems, vectors, polynucleotides, herein wherein contacting results in modification of a gene product or modification of the amount or expression of a gene product. In one embodiment, the expression of the targeted gene product is increased by the method. In one embodiment, the expression of the targeted gene product is increased by at least 10%, at least 15%, at least 20%, at least 25%, at least 30%, at least 35%, at least 40%, at least 45%, at least 50%, at least 55%, at least 60%, at least 65%, at least 70%, at least 75%, at least 80%, at least 85%, at least 90%, at least 95%, 100%. In one embodiment, the expression of the targeted gene product is increased at least 1.5-fold, at least 2-fold, at least 2.5-fold, at least 3-fold, at least 3.5-fold, at least 3.5-fold, at least 4-fold, at least 4.5-fold, at least 5-fold, at least 10-fold, at least 10-fold, at least 15-fold, at least 20-fold, at least 25-fold, at least 50-fold, at least 100-fold. In one embodiment, the expression of the targeted gene product is reduced by at least 10%, by at least 15%, by at least 20%, by at least 25%, by at least 30%, by at least 35%, by at least 40%, by at least 45%, by at least 50%, by at least 55%, by at least 60%, by at least 65%, by at least 70%, by at least 75%, by at least 80%, by at least 85%, by at least 90%, by at least 95%, by at least 100%. In one embodiment, the expression of the targeted gene product is reduced at least 1.5-fold, at least 2-fold, at least 2.5-fold, at least 3-fold, at least 3.5-fold, at least 3.5-fold, at least 4-fold, at least 4.5-fold, at least 5-fold, at least 10-fold, at least 10-fold, at least 15-fold, at least 20-fold, at least 25-fold, at least 50-fold, at least 100-fold. In alternative embodiments, the expression of the targeted gene product is reduced by the method. In further embodiments, expression of the targeted gene may be completely eliminated, or may be considered eliminated as remnant expression levels of the targeted gene fall below the detection limit of methods known in the art that are used to quantify, detect, or monitor expression levels of genes.

[0658] In one embodiment, one or more polynucleotide molecules, vectors, or vector systems driving expression of one or more elements of a nucleic acid-targeting system or delivery systems comprising one or more elements of the nucleic acid-targeting system are introduced into a host cell such that expression of the elements of the nucleic acid-targeting system direct formation of a nucleic acid-targeting complex at one or more target sites. In one embodiment of the invention the host cell may be a eukaryotic cell, a prokaryotic cell, or a plant cell.

[0659] In particular embodiments, the host cell is a cell of a cell line. Cell lines are available from a variety of sources known to those with skill in the art (see, e.g., the American Type Culture Collection (ATCC) (Manassas, Va.)). In one embodiment, a cell transfected with one or more vectors described herein is used to establish a new cell line comprising one or more vector-derived sequences. In one embodiment, a cell transiently transfected with the components of a composition or system as described herein (such as by transient transfection of one or more vectors, or transfection with RNA), and modified through the activity of a complex, is used to establish a new cell line comprising cells containing the modification but lacking any other exogenous sequence. In one embodiment, cells transiently or non-transiently transfected with one or more vectors described herein, or cell lines derived from such cells are used in assessing one or more test compounds.

[0660] Further intended are isolated human cells or tissues, plants or non-human animals comprising one or more of the polynucleotide molecules, vectors, vector systems, or cells described in any of the embodiments herein. In an aspect, host cells and cell lines modified by or comprising the compositions, systems or modified enzymes of present invention are provided, including (isolated) stem cells, and progeny thereof.

[0661] In one embodiment, the plants or non-human animals comprise at least one of the compositions, polynucleotide molecules, vectors, vector systems, or cells described in any of the embodiments herein at least one tissue type of the plant or non-human animal. In certain embodiment, non-human animals comprise at least one of the compositions, polynucleotide molecules, vectors, vector systems, or cells described in any of the embodiments herein in at least one tissue type. In one embodiment, the presence of the compositions is transient, in that they are degraded over time. In one embodiment, expression of the compositions described in any of the embodiments comprised in polynucleotide molecules, vectors, vector systems, or cells is limited to certain tissue types or regions in the plant or non-human animal. In one embodiment, the expression of the compositions described in any of the embodiments comprised in polynucleotide molecules, vectors, vector systems, or cells is dependent of a physiological cue. In one embodiment, expression of the compositions described in any of the embodiments comprised in polynucleotide molecules, vectors, vector systems, or cells may be triggered by an exogenous molecule. In one embodiment, expression of the compositions described in any of the embodiments comprised in polynucleotide molecules, vectors, vector systems, or cells is dependent on the expression of a non-Cas molecule in the plant or non-human animal.

[0662] In one aspect, the invention provides methods for using one or more elements of a nucleic acid-targeting system. The nucleic acid-targeting complex of the invention provides an effective means for modifying a target DNA or RNA (single or double stranded, linear or super-coiled). The nucleic acid-targeting complex of the invention has a wide variety of utility including modifying (e.g., deleting, inserting, translocating, inactivating, activating) a target DNA or RNA in a multiplicity of cell types. As such, the nucleic acid-targeting complex of the invention has a broad spectrum of applications in, e.g., gene therapy, drug screening, disease diagnosis, and prognosis. An exemplary nucleic acid-targeting complex comprises a DNA or RNA-targeting effector protein complexed with a nucleic acid component molecule hybridized to a target sequence within the target locus of interest.

[0663] In one embodiment, this invention provides a method of cleaving a target polynucleotide. The method may comprise modifying a target polynucleotide using a nucleic acid-targeting complex that binds to the target polynucleotide and effect cleavage of said target polynucleotide. In an embodiment, the nucleic acid-targeting complex of the invention, when introduced into a cell, may create a break (e.g., a single or a double strand break) in the polynucleotide sequence. For example, the method can be used to cleave a disease polynucleotide in a cell. For example, an exogenous template comprising a sequence to be integrated flanked by an upstream sequence and a downstream sequence may be introduced into a cell. The upstream and downstream sequences share sequence similarity with either side of the site of integration in the polynucleotide. The exogenous template comprises a sequence to be integrated (e.g., a mutated RNA). The sequence for integration may be a sequence endogenous or exogenous to the cell. Examples of a sequence to be integrated include polynucleotide encoding a protein or a non-coding RNA (e.g., a microRNA). Thus, the sequence for integration may be operably linked to an appropriate control sequence or sequences. Alternatively, the sequence to be integrated may provide a regulatory function. The upstream and downstream sequences in the recombination template are selected to promote recombination between the RNA sequence of interest and the recombination. The upstream sequence is a polynucleotide sequence that shares sequence similarity with the sequence upstream of the targeted site for integration. Similarly, the downstream sequence is a polynucleotide sequence that shares sequence similarity with the polynucleotide sequence downstream of the targeted site of integration. The upstream and downstream sequences in the recombination template can have 75%, 80%, 85%, 90%, 95%, or 100% sequence identity with the targeted sequence. Preferably, the upstream and downstream sequences in the recombination template have about 95%, 96%, 97%, 98%, 99%, or 100% sequence identity with the targeted sequence. In some methods, the upstream and downstream sequences in the recombination template have about 99% or 100% sequence identity with the targeted sequence. An upstream or downstream sequence may comprise from about 20 bp to about 2500 bp, for example, about 50, 100, 200, 300, 400, 500, 600, 700, 800, 900, 1000, 1100, 1200, 1300, 1400, 1500, 1600, 1700, 1800, 1900, 2000, 2100, 2200, 2300, 2400, or 2500 bp. In some methods, the exemplary upstream or downstream sequence have about 200 bp to about 2000 bp, about 600 bp to about 1000 bp, or more particularly about 700 bp to about 1000 bp. In some methods, the recombination template may further comprise a marker. Such a marker may make it easy to screen for targeted integrations. Examples of suitable markers include restriction sites, fluorescent proteins, or selectable markers. The recombination template of the invention can be constructed using recombinant techniques (see, for example, Sambrook et al., 2001 and Ausubel et al., 1996). In a method for modifying a target sequence by integrating a recombination template, a break (e.g., double or single stranded break in double or single stranded DNA or RNA) is introduced into the DNA or RNA sequence by the nucleic acid-targeting complex, the break is repaired via homologous recombination with a recombination template such that the template is integrated into the target. The presence of a double-stranded break facilitates integration of the template. In other embodiments, this invention provides a method of modifying expression of an RNA in a eukaryotic cell. The method comprises increasing or decreasing expression of a target polynucleotide by using a nucleic acid-targeting complex that binds to the DNA or RNA (e.g., mRNA or pre-mRNA). In some methods, a target can be inactivated to affect the modification of the expression in a cell. For example, upon the binding of a nucleic acid-targeting complex to a target sequence in a cell, the target is inactivated such that the sequence is not translated, the coded protein is not produced, or the sequence does not function as the wild-type sequence does. For example, a protein or microRNA coding sequence may be inactivated such that the protein or microRNA or pre-microRNA transcript is not produced. The target of a nucleic acid-targeting complex can be any polynucleotide endogenous or exogenous to the eukaryotic cell. For example, the target polynucleotide can be a polynucleotide residing in the nucleus of the eukaryotic cell. The target polynucleotide can be a sequence coding a gene product (e.g., a protein) or a non-coding sequence (e.g., ncRNA, lncRNA, tRNA, or rRNA). Examples of target RNA include a sequence associated with a signaling biochemical pathway, e.g., a signaling biochemical pathway-associated polynucleotide. Examples of target polynucleotide include a disease associated polynucleotide. A “disease-associated” polynucleotide refers to any polynucleotide which is yielding translation products at an abnormal level or in an abnormal form in cells derived from a disease-affected tissues compared with tissues or cells of a non-disease control. It may be a gene that becomes expressed at an abnormally high level; it may be a gene that becomes expressed at an abnormally low level, where the altered expression correlates with the occurrence and/or progression of the disease. A disease-associated polynucleotide also refers to a gene possessing mutation(s) or genetic variation that is directly responsible or is in linkage disequilibrium with a gene(s) that is responsible for the etiology of a disease. The translated products may be known or unknown, and may be at a normal or abnormal level. The target RNA of a nucleic acid-targeting complex can be any polynucleotide endogenous or exogenous to the eukaryotic cell. For example, the target RNA can be a RNA residing in the nucleus of the eukaryotic cell. The target polynucleotide can be a sequence coding a gene product (e.g., a protein) or a non-coding sequence (e.g., ncRNA, lncRNA, tRNA, or rRNA).

[0664] In one embodiment, the method may comprise allowing compositions to bind to the target DNA or RNA to effect cleavage of said target DNA or RNA thereby modifying the target DNA or RNA, wherein the nucleic acid-targeting complex comprises a nucleic acid-targeting effector protein complexed with a nucleic acid component molecule hybridized to a target sequence within said target DNA or RNA. In one aspect, the invention provides a method of modifying expression of DNA or RNA in a eukaryotic cell. In one embodiment, the method comprises allowing a nucleic acid-targeting complex to bind to the DNA or RNA such that said binding results in increased or decreased expression of said DNA or RNA; wherein the nucleic acid-targeting complex comprises a nucleic acid-targeting effector protein complexed with a nucleic acid component molecule. Similar considerations and conditions apply as above for methods of modifying a target DNA or RNA. In fact, these sampling, culturing and re-introduction options apply across the aspects of the present invention. In one aspect, the invention provides for methods of modifying a target DNA or RNA in a eukaryotic cell, which may be in vivo, ex vivo or in vitro. In one embodiment, the method comprises sampling a cell or population of cells from a human or non-human animal, and modifying the cell or cells. Culturing may occur at any stage ex vivo. The cell or cells may even be re-introduced into the non-human animal or plant. For re-introduced cells it is particularly preferred that the cells are stem cells. The compositions as described in any embodiment herein may be used to detect nucleic acid identifiers. Nucleic acid identifiers are non-coding nucleic acids that may be used to identify a particular article. Example nucleic acid identifiers, such as DNA watermarks, are described in Heider and Barnekow. “DNA watermarks: A proof of concept” BMC Molecular Biology 9:40 (2008). The nucleic acid identifiers may also be a nucleic acid barcode. A nucleic-acid based barcode is a short sequence of nucleotides (for example, DNA, RNA, or combinations thereof) that is used as an identifier for an associated molecule, such as a target molecule and/or target nucleic acid. A nucleic acid barcode can have a length of at least, for example, 4, 5, 6, 7, 8, 9, 10, 11, 12, 13, 14, 15, 16, 17, 18, 19, 20, 21, 22, 23, 24, 25, 26, 27, 28, 29, 30, 35, 40, 45, 50, 60, 70, 80, 90, or 100 nucleotides, and can be in single- or double-stranded form. One or more nucleic acid barcodes can be attached, or “tagged,” to a target molecule and/or target nucleic acid. This attachment can be direct (for example, covalent or non-covalent binding of the barcode to the target molecule) or indirect (for example, via an additional molecule, for example, a specific binding agent, such as an antibody (or other protein) or a barcode receiving adaptor (or other nucleic acid molecule). Target molecule and/or target nucleic acids can be labeled with multiple nucleic acid barcodes in combinatorial fashion, such as a nucleic acid barcode concatemer. Typically, a nucleic acid barcode is used to identify target molecules and/or target nucleic acids as being from a particular compartment (for example a discrete volume), having a particular physical property (for example, affinity, length, sequence, etc.), or having been subject to certain treatment conditions. Target molecule and/or target nucleic acid can be associated with multiple nucleic acid barcodes to provide information about all of these features (and more). Methods of generating nucleic acid-barcodes are disclosed, for example, in International Patent Application Publication No. WO/2014/047561.

[0665] In an embodiment, compositions induce a double strand break for the purpose of inducing HDR-mediated correction. In a further embodiment, two or more nucleic acid component molecules complexing with Fanzor polypeptide or an ortholog or homolog thereof, may be used to induce multiplexed breaks for purpose of inducing HDR-mediated correction.

[0666] A recombination template nucleic acid, as that term is used herein, refers to a nucleic acid sequence which can be used in conjunction with compositions discloser herein to alter the structure of a target position. In an embodiment, the target nucleic acid is modified to have some or all of the sequence of the recombination template nucleic acid, typically at or near cleavage site(s). In an embodiment, the recombination template nucleic acid is single stranded. In an alternate embodiment, the recombination template nucleic acid is double stranded. In an embodiment, the recombination template nucleic acid is DNA, e.g., double stranded DNA. In an alternate embodiment, the recombination template nucleic acid is single stranded DNA.

[0667] In one embodiment, a recombination template is provided to serve as a template in homologous recombination, such as within or near a target sequence nicked or cleaved by a nucleic acid-targeting effector protein as a part of a nucleic acid-targeting complex.

[0668] A recombination template may be a component of another vector as described herein, contained in a separate vector, or provided as a separate polynucleotide. A recombination template polynucleotide may be of any suitable length, such as about or more than about 10, 15, 20, 25, 50, 75, 100, 150, 200, 500, 1000, or more nucleotides in length. In one embodiment, the recombination template polynucleotide is complementary to a portion of a polynucleotide comprising the target sequence. When optimally aligned, a recombination template polynucleotide might overlap with one or more nucleotides of a target sequences (e.g., about or more than about 1, 5, 10, 15, 20, 25, 30, 35, 40, 45, 50, 60, 70, 80, 90, 100 or more nucleotides). In one embodiment, when a recombination template sequence and a polynucleotide comprising a target sequence are optimally aligned, the nearest nucleotide of the recombination template polynucleotide is within about 1, 5, 10, 15, 20, 25, 50, 75, 100, 200, 300, 400, 500, 1000, 5000, 10000, or more nucleotides from the target sequence.

[0669] In an embodiment, the recombination template nucleic acid alters the structure of the target position by participating in homologous recombination. In an embodiment, the recombination template nucleic acid alters the sequence of the target position. In an embodiment, the recombination template nucleic acid results in the incorporation of a modified, or non-naturally occurring base into the target nucleic acid.

[0670] The recombination template sequence may undergo a breakage mediated or catalyzed recombination with the target sequence. In an embodiment, the recombination template nucleic acid may include sequence that corresponds to a site on the target sequence that is cleaved by an Fanzor polypeptide mediated cleavage event. In an embodiment, the recombination template nucleic acid may include sequence that corresponds to both, a first site on the target sequence that is cleaved in a first Fanzor polypeptide mediated event and a second site on the target sequence that is cleaved in a second Fanzor polypeptide mediated event.

[0671] In one embodiment, the recombination template nucleic acid can include sequence which results in an alteration in the coding sequence of a translated sequence, e.g., one which results in the substitution of one amino acid for another in a protein product, e.g., transforming a mutant allele into a wild type allele, transforming a wild type allele into a mutant allele, and/or introducing a stop codon, insertion of an amino acid residue, deletion of an amino acid residue, or a nonsense mutation. In one embodiment, the recombination template nucleic acid can include sequence which results in an alteration in a non-coding sequence, e.g., an alteration in an exon or in a 5′ or 3′ non-translated or non-transcribed region. Such alterations include an alteration in a control element, e.g., a promoter, enhancer, and an alteration in a cis-acting or trans-acting control element.

[0672] A recombination template nucleic acid having homology with a target position in a target gene may be used to alter the structure of a target sequence. The recombination template sequence may be used to alter an unwanted structure, e.g., an unwanted or mutant nucleotide. The recombination template nucleic acid may include sequence which, when integrated, results in: decreasing the activity of a positive control element; increasing the activity of a positive control element; decreasing the activity of a negative control element; increasing the activity of a negative control element; decreasing the expression of a gene; increasing the expression of a gene; increasing resistance to a disorder or disease; increasing resistance to viral entry; correcting a mutation or altering an unwanted amino acid residue conferring, increasing, abolishing or decreasing a biological property of a gene product, e.g., increasing the enzymatic activity of an enzyme, or increasing the ability of a gene product to interact with another molecule.

[0673] The recombination template nucleic acid may include sequence which results in: a change in sequence of 1, 2, 3, 4, 5, 6, 7, 8, 9, 10, 11, 12 or more nucleotides of the target sequence. In an embodiment, the recombination template nucleic acid may be 20+/−10, 30+/−10, 40+/−10, 50+/−10, 60+/−10, 70+/−10, 80+/−10, 90+/−10, 100+/−10, 110+/−10, 120+/−10, 130+/−10, 140+/−10, 150+/−10, 160+/−10, 170+/−10, 180+/−10, 190+/−10, 200+/−10, 210+/−10, or 220+/−10 nucleotides in length. In an embodiment, the recombination template nucleic acid may be 30+/−20, 40+/−20, 50+/−20, 60+/−20, 70+/−20, 80+/−20, 90+/−20, 100+/−20, 110+/−20, 120+/−20, 130+/−20, 140+/−20, I 50+/−20, 160+/−20, 170+/−20, 180+/−20, 190+/−20, 200+/−20, 210+/−20, or 220+/−20 nucleotides in length. In an embodiment, the recombination template nucleic acid is 10 to 1,000, 20 to 900, 30 to 800, 40 to 700, 50 to 600, 50 to 500, 50 to 400, 50 to 300, 50 to 200, or 50 to 100 nucleotides in length.

[0674] A recombination template nucleic acid comprises the following components: [5′ homology arm]-[replacement sequence]-[3′ homology arm]. The homology arms provide for recombination into the chromosome, thus replacing the undesired element, e.g., a mutation or signature, with the replacement sequence. In an embodiment, the homology arms flank the most distal cleavage sites. In an embodiment, the 3′ end of the 5′ homology arm is the position next to the 5′ end of the replacement sequence. In an embodiment, the 5′ homology arm can extend at least 10, 20, 30, 40, 50, 100, 200, 300, 400, 500, 600, 700, 800, 900, 1000, 1500, or 2000 nucleotides 5′ from the 5′ end of the replacement sequence. In an embodiment, the 5′ end of the 3′ homology arm is the position next to the 3′ end of the replacement sequence. In an embodiment, the 3′ homology arm can extend at least 10, 20, 30, 40, 50, 100, 200, 300, 400, 500, 600, 700, 800, 900, 1000, 1500, or 2000 nucleotides 3′ from the 3′ end of the replacement sequence.

[0675] In one embodiment, one or both homology arms may be shortened to avoid including certain sequence repeat elements. For example, a 5′ homology arm may be shortened to avoid a sequence repeat element. In other embodiments, a 3′ homology arm may be shortened to avoid a sequence repeat element. In one embodiment, both the 5′ and the 3′ homology arms may be shortened to avoid including certain sequence repeat elements.

[0676] In one embodiment, a recombination template nucleic acids for correcting a mutation may designed for use as a single-stranded oligonucleotide. When using a single-stranded oligonucleotide, 5′ and 3′ homology arms may range up to about 200 base pairs (bp) in length, e.g., at least 25, 50, 75, 100, 125, 150, 175, or 200 bp in length.

[0677] Unlike Fanzor polypeptide-mediated gene knockout, which permanently eliminates expression by mutating the gene at the DNA level, Fanzor polypeptide knockdown allows for temporary reduction of gene expression through the use of artificial transcription factors. Mutating key residues in both DNA cleavage domains of the Fanzor polypeptide, results in the generation of a catalytically inactive Fanzor polypeptide. A catalytically inactive Fanzor polypeptide complexes with a nucleic acid component molecule and localizes to the DNA sequence specified by that nucleic acid component molecule's targeting domain, however, it does not cleave the target DNA. Fusion of the inactive Fanzor polypeptide protein to an effector domain, e.g., a transcription repression domain, enables recruitment of the effector to any DNA site specified by the nucleic acid component molecule. In one embodiment, Fanzor polypeptide may be fused to a transcriptional repression domain and recruited to the promoter region of a gene. Especially for gene repression, it is contemplated herein that blocking the binding site of an endogenous transcription factor would aid in downregulating gene expression. In another embodiment, an inactive Fanzor polypeptide can be fused to a chromatin modifying protein. Altering chromatin status can result in decreased expression of the target gene.

[0678] In an embodiment, a nucleic acid component molecule can be targeted to a known transcription response element (e.g., promoters, enhancers, etc.), a known upstream activating sequence, and/or sequences of unknown or known function that are suspected of being able to control expression of the target DNA.

[0679] In some methods, a target polynucleotide can be inactivated to affect the modification of the expression in a cell. For example, upon the binding of a composition to a target sequence in a cell, the target polynucleotide is inactivated such that the sequence is not transcribed, the coded protein is not produced, or the sequence does not function as the wild-type sequence does. For example, a protein or microRNA coding sequence may be inactivated such that the protein is not produced.

### Non-Homologous End-Joining

[0680] In one embodiment, nuclease-induced non-homologous end-joining (NHEJ) can be used to target gene-specific knockouts. Nuclease-induced NHEJ can also be used to remove (e.g., delete) sequence in a gene of interest. Generally, NHEJ repairs a double-strand break in the DNA by joining together the two ends; however, generally, the original sequence is restored only if two compatible ends, exactly as they were formed by the double-strand break, are perfectly ligated. The DNA ends of the double-strand break are frequently the subject of enzymatic processing, resulting in the addition or removal of nucleotides, at one or both strands, prior to rejoining of the ends. This results in the presence of insertion and/or deletion (indel) mutations in the DNA sequence at the site of the NHEJ repair. Two-thirds of these mutations typically alter the reading frame and, therefore, produce a non-functional protein. Additionally, mutations that maintain the reading frame, but which insert or delete a significant amount of sequence, can destroy functionality of the protein. This is locus dependent as mutations in critical functional domains are likely less tolerable than mutations in non-critical regions of the protein. The indel mutations generated by NHEJ are unpredictable in nature; however, at a given break site certain indel sequences are favored and are over represented in the population, likely due to small regions of microhomology. The lengths of deletions can vary widely; most commonly in the 1-50 bp range, but they can easily be greater than 50 bp, e.g., they can easily reach greater than about 100-200 bp. Insertions tend to be shorter and often include short duplications of the sequence immediately surrounding the break site. However, it is possible to obtain large insertions, and in these cases, the inserted sequence has often been traced to other regions of the genome or to plasmid DNA present in the cells.

[0681] Because NHEJ is a mutagenic process, it may also be used to delete small sequence motifs as long as the generation of a specific final sequence is not required. If a double-strand break is targeted near to a short target sequence, the deletion mutations caused by the NHEJ repair often span, and therefore remove, the unwanted nucleotides. For the deletion of larger DNA segments, introducing two double-strand breaks, one on each side of the sequence, can result in NHEJ between the ends with removal of the entire intervening sequence. Both of these approaches can be used to delete specific DNA sequences; however, the error-prone nature of NHEJ may still produce indel mutations at the site of repair.

[0682] Both double strand cleaving Fanzor polypeptide, or an ortholog or homolog thereof, and single strand, or nickase, Fanzor polypeptide, or an ortholog or homolog thereof, molecules can be used in the methods and compositions described herein to generate NHEJ-mediated indels. NHEJ-mediated indels targeted to the gene, e.g., a coding region, e.g., an early coding region of a gene of interest can be used to knockout (i.e., eliminate expression of) a gene of interest. For example, early coding region of a gene of interest includes sequence immediately following a transcription start site, within a first exon of the coding sequence, or within 500 bp of the transcription start site (e.g., less than 500, 450, 400, 350, 300, 250, 200, 150, 100 or 50 bp).

[0683] In an embodiment, in which a nucleic acid component molecule and Fanzor polypeptide, or an ortholog or homolog thereof, generate a double strand break for the purpose of inducing NHEJ-mediated indels, an RNA component molecule may be configured to position one double-strand break in close proximity to a nucleotide of the target position. In an embodiment, the cleavage site may be between 0-500 bp away from the target position (e.g., less than 500, 400, 300, 200, 100, 50, 40, 30, 25, 20, 15, 10, 9, 8, 7, 6, 5, 4, 3, 2 or 1 bp from the target position).

[0684] In an embodiment, in which two nucleic acid component molecules complexing with Fanzor polypeptide, or an ortholog or homolog thereof, e.g., Fanzor polypeptide nickases induce two single strand breaks for the purpose of inducing NHEJ-mediated indels, two nucleic acid component molecules may be configured to position two single-strand breaks to provide for NHEJ repair a nucleotide of the target position.

[0685] In some examples, the systems herein may introduce one or more indels via NHEJ pathway and insert sequence from a combination template via HDR.

### Samples in General

[0686] It will be appreciated that in many applications of the compositions, formulations, and systems descried herein utilize samples, such as biological samples, that can be obtained from a human or non-human animal subject, plant, prokaryote, and/or environment (e.g., air, soil, and water).

[0687] A sample for use with the invention may be a biological or environmental sample, such as a surface sample, a fluid sample, or a food sample (fresh fruits or vegetables, meats). Food samples may include a beverage sample, a paper surface, a fabric surface, a metal surface, a wood surface, a plastic surface, a soil sample, a freshwater sample, a wastewater sample, a saline water sample, exposure to atmospheric air or other gas sample, or a combination thereof. For example, household/commercial/industrial surfaces made of any materials including, but not limited to, metal, wood, plastic, rubber, or the like, may be swabbed and tested for contaminants. Soil samples may be tested for the presence of pathogenic bacteria or parasites, or other microbes, both for environmental purposes and/or for human, animal, or plant disease testing. Water samples such as freshwater samples, wastewater samples, or saline water samples can be evaluated for cleanliness and safety, and/or potability, to detect the presence of, for example, Cryptosporidium parvum, Giardia lamblia, or other microbial contamination. In further embodiments, a biological sample may be obtained from a source including, but not limited to, a tissue sample, saliva, blood, plasma, sera, stool, urine, sputum, mucous, lymph, synovial fluid, spinal fluid, cerebrospinal fluid, ascites, pleural effusion, seroma, pus, bile, aqueous or vitreous humor, transudate, exudate, or swab of skin or a mucosal membrane surface. In some particular embodiments, an environmental sample or biological samples may be crude samples and/or the one or more target molecules may not be purified or amplified from the sample prior to application of the method. Identification of microbes may be useful and/or needed for any number of applications, and thus any type of sample from any source deemed appropriate by one of skill in the art may be used in accordance with the invention.

[0688] Any suitable sample collection method may be employed. Such techniques are generally known to the skilled artisan and/or are described herein.

[0689] In some embodiments, samples are processed in one or more steps after initial collection. This processing can, for example, purify, clean, filter, isolate, one or more components in the sample for downstream analysis, long term storage, short term storage, and/or the like. Samples can be aliquoted in to replicates.

[0690] A sample for use with the invention may be a biological or environmental sample, such as a food sample (fresh fruits or vegetables, meats), a beverage sample, a paper surface, a fabric surface, a metal surface, a wood surface, a plastic surface, a soil sample, a freshwater sample, a wastewater sample, a saline water sample, exposure to atmospheric air or other gas sample, or a combination thereof. For example, household/commercial/industrial surfaces made of any materials including, but not limited to, metal, wood, plastic, rubber, or the like, may be swabbed and tested for contaminants. Soil samples may be tested for the presence of pathogenic bacteria or parasites, or other microbes, both for environmental purposes and/or for human, animal, or plant disease testing. Water samples such as freshwater samples, wastewater samples, or saline water samples can be evaluated for cleanliness and safety, and/or potability, to detect the presence of, for example, Cryptosporidium parvum, Giardia lamblia, or other microbial contamination. In further embodiments, a biological sample may be obtained from a source including, but not limited to, a tissue sample, saliva, blood, plasma, sera, stool, urine, sputum, mucous, lymph, synovial fluid, cerebrospinal fluid, ascites, pleural effusion, seroma, pus, bile, aqueous or vitreous humor, transudate, exudate, or swab of skin or a mucosal membrane surface. In some particular embodiments, an environmental sample or biological samples may be crude samples and/or the one or more target molecules may not be purified or amplified from the sample prior to application of the method. Identification of microbes may be useful and/or needed for any number of applications, and thus any type of sample from any source deemed appropriate by one of skill in the art may be used in accordance with the invention.

### Exemplary Applications and Methods of Use

[0691] The invention provides a non-naturally occurring or engineered composition, or one or more polynucleotides encoding components of said composition, or vector or delivery systems comprising one or more polynucleotides encoding components of said composition for use in a modifying a target cell in vivo, ex vivo or in vitro and, may be conducted in a manner alters the cell such that once modified the progeny or cell line of the Fanzor polypeptide modified cell retains the altered phenotype. The modified cells and progeny may be part of a multi-cellular organism such as a plant or animal with ex vivo or in vivo application of composition to desired cell types. The methods herein include a therapeutic method of treatment. The therapeutic method of treatment may comprise gene or genome editing, or gene therapy.

[0692] In one embodiment, one or more vectors described herein are used to produce a non-human transgenic animal or transgenic plant. In one embodiment, the transgenic animal is a mammal, such as a mouse, rat, or rabbit. Methods for producing transgenic animals and plants are known in the art, and generally begin with a method of cell transfection, such as described herein.

### Use of Orthogonal Catalytically Inactive Fanzor Polypeptides

[0693] In particular embodiments, the Fanzor polypeptide nickase is used in combination with an orthogonal catalytically inactive Fanzor polypeptide to increase efficiency of said nickase (e.g., as described in Chen et al. 2017, Nature Communications 8:14958; doi:10.1038/ncomms14958). More particularly, the orthogonal catalytically inactive Fanzor polypeptide is characterized by a different TAM recognition site than the Fanzor nickase used in the AD-functionalized composition and the corresponding nucleic acid component molecule sequence is selected to bind to a target sequence proximal to that of the nickase of the functionalized Fanzor polypeptide. The orthogonal catalytically inactive Fanzor polypeptide as used in the context of the present invention does not form part of the functionalized composition but merely functions to increase the efficiency of said nickase and is used in combination with a standard nucleic acid component as described in the art for said Fanzor polypeptide. In particular embodiments, said orthogonal catalytically inactive Fanzor polypeptide is a dead Fanzor polypeptide, i.e., comprising one or more mutations which abolishes the nuclease activity of said Fanzor polypeptide. In particular embodiments, the catalytically inactive orthogonal Fanzor polypeptide is provided with two or more nucleic acid components which are capable of hybridizing to target sequences which are proximal to the target sequence of the nickase. In particular embodiments, at least two nucleic acid components are used to target said catalytically inactive Fanzor polypeptide, of which at least one nucleic acid component is capable of hybridizing to a target sequence 5″ of the target sequence of the nickase and at least one nucleic acid component is capable of hybridizing to a target sequence 3′ of the target sequence of the nickase of the functionalized composition, whereby said one or more target sequences may be on the same or the opposite DNA strand as the target sequence of the Fanzor nickase. In particular embodiments, the guide sequences of the one or more ωnucleic acid components of the orthogonal catalytically inactive Fanzor polypeptide are selected such that the target sequences are proximal to that of the nucleic acid component for the targeting of the functionalized composition, e.g. for the targeting of the nickase. In particular embodiments, the one or more target sequences of the orthogonal catalytically inactive Fanzor polypeptide are each separated from the target sequence of the nickase by more than 5 but less than 450 base pairs. Optimal distances between the target sequences of the nucleic acid component molecules for use with the orthogonal catalytically inactive Fanzor polypeptide and the target sequence of the functionalized composition can be determined by the skilled person. In particular embodiments, the catalytically inactive orthogonal Fanzor polypeptide has been modified to alter its TAM specificity as described elsewhere herein. In particular embodiments, the Fanzor polypeptide nickase is a nickase which, by itself has limited activity in human cells, but which, in combination with an inactive orthogonal Fanzor polypeptide and one or more corresponding proximal nucleic acid component molecules ensures the required nickase activity.

### Models of Diseases and Conditions

[0694] In an aspect, the invention provides a method of modeling a disease associated with a genomic locus in a eukaryotic organism or a non-human organism comprising manipulation of a target sequence within a coding, non-coding or regulatory element of said genomic locus comprising delivering a non-naturally occurring or engineered composition comprising a viral vector system comprising one or more viral vectors operably encoding a composition for expression thereof, wherein the composition comprises particle delivery system or the delivery system or the virus particle of any one of the above embodiments or the cell of any one of the above embodiment.

[0695] In one aspect, the invention provides a method of generating a model eukaryotic cell that can include one or more of a mutated disease genes and/or infectious microorganisms. In one embodiment, a disease gene is any gene associated an increase in the risk of having or developing a disease. In one embodiment, the method includes (a) introducing one or more vectors into a eukaryotic cell, wherein the one or more vectors comprise a composition, system, and/or component thereof and/or a vector or vector system that is capable of driving expression of a composition, system, and/or component thereof including, but not limited to: a nucleic acid component molecule sequence, one or more Fanzor polypeptides, and combinations thereof and (b) allowing a composition, system, or complex to bind to one or more target polynucleotides, e.g., to effect cleavage, nicking, or other modification of the target polynucleotide within said disease gene, wherein the composition, system, or complex is composed of one or more Fanzor polypeptide complexed with (1) one or more nucleic acid component molecule sequences that is/are hybridized to the target sequence(s) within the target polynucleotide(s), and optionally (2) the nucleic acid component scaffold sequence(s), thereby generating a model eukaryotic cell comprising one or more mutated disease gene(s). Thus, in one embodiment the composition and system, contains nucleic acid molecules for and drives expression of one or more of: a Fanzor polypeptide, a nucleic acid component molecule sequence and/or a Homologous Recombination template and/or a stabilizing ligand if the Fanzor polypeptide has a destabilization domain. In one embodiment, said cleavage comprises cleaving one or two strands at the location of the target sequence by the Fanzor polypeptide. In one embodiment, nicking comprises nicking one or two strands at the location of the target sequence by the Fanzor polypeptide. In one embodiment, said cleavage or nicking results in modified transcription of a target polynucleotide. In one embodiment, modification results in decreased transcription of the target polynucleotide. In one embodiment, the method further comprises repairing said cleaved or nicked target polynucleotide by homologous recombination with a recombination template polynucleotide, wherein said repair results in a mutation comprising an insertion, deletion, or substitution of one or more nucleotides of said target polynucleotide. In one embodiment, said mutation results in one or more amino acid changes in a protein expression from a gene comprising the target sequence.

[0696] The disease modeled can be any disease with a genetic or epigenetic component. In one embodiment, the disease modeled can be any as discussed elsewhere herein.

### Models of Genetic and Epigenetic Conditions

[0697] A method of the invention may be used to create a plant, an animal or cell that may be used to model and/or study genetic or epigenetic conditions of interest, such as a through a model of mutations of interest or a disease model. As used herein, “disease” refers to a disease, disorder, or indication in a subject. For example, a method of the invention may be used to create an animal or cell that comprises a modification in one or more nucleic acid sequences associated with a disease, or a plant, animal or cell in which the expression of one or more nucleic acid sequences associated with a disease are altered. Such a nucleic acid sequence may encode a disease associated protein sequence or may be a disease associated control sequence. Accordingly, it is understood that in embodiments of the invention, a plant, subject, patient, organism or cell can be a non-human subject, patient, organism or cell. Thus, the invention provides a plant, animal or cell, produced by the present methods, or a progeny thereof. The progeny may be a clone of the produced plant or animal, or may result from sexual reproduction by crossing with other individuals of the same species to introgress further desirable traits into their offspring. The cell may be in vivo or ex vivo in the cases of multicellular organisms, particularly animals or plants. In the instance where the cell is in cultured, a cell line may be established if appropriate culturing conditions are met and preferably if the cell is suitably adapted for this purpose (for instance a stem cell). Bacterial cell lines produced by the invention are also envisaged. Hence, cell lines are also envisaged.

[0698] In some methods, the disease model can be used to study the effects of mutations on the animal or cell and development and/or progression of the disease using measures commonly used in the study of the disease. Alternatively, such a disease model is useful for studying the effect of a pharmaceutically active compound on the disease.

[0699] In some methods, the disease model can be used to assess the efficacy of a potential gene therapy strategy. That is, a disease-associated gene or polynucleotide can be modified such that the disease development and/or progression is inhibited or reduced. In particular, the method comprises modifying a disease-associated gene or polynucleotide such that an altered protein is produced and, as a result, the animal or cell has an altered response. Accordingly, in some methods, a genetically modified animal may be compared with an animal predisposed to development of the disease such that the effect of the gene therapy event may be assessed.

[0700] In another embodiment, this invention provides a method of developing a biologically active agent that modulates a cell signaling event associated with a disease gene. The method comprises contacting a test compound with a cell comprising one or more vectors that drive expression of one or more of a Fanzor polypeptide, and a conserved nucleotide sequence linked to a guide/spacer sequence; and detecting a change in a readout that is indicative of a reduction or an augmentation of a cell signaling event associated with, e.g., a mutation in a disease gene contained in the cell.

[0701] A cell model or animal model can be constructed in combination with the method of the invention for screening a cellular function change. Such a model may be used to study the effects of a genome sequence modified by the complex of the invention on a cellular function of interest. For example, a cellular function model may be used to study the effect of a modified genome sequence on intracellular signaling or extracellular signaling. Alternatively, a cellular function model may be used to study the effects of a modified genome sequence on sensory perception. In some such models, one or more genome sequences associated with a signaling biochemical pathway in the model are modified.

[0702] Several disease models have been specifically investigated. These include de novo autism risk genes CHD8, KATNAL2, and SCN2A; and the syndromic autism (Angelman Syndrome) gene UBE3A. These genes and resulting autism models are of course preferred, but serve to show the broad applicability of the invention across genes and corresponding models. An altered expression of one or more genome sequences associated with a signaling biochemical pathway can be determined by assaying for a difference in the mRNA levels of the corresponding genes between the test model cell and a control cell, when they are contacted with a candidate agent. Alternatively, the differential expression of the sequences associated with a signaling biochemical pathway is determined by detecting a difference in the level of the encoded polypeptide or gene product.

[0703] To assay for an agent-induced alteration in the level of mRNA transcripts or corresponding polynucleotides, nucleic acid contained in a sample is first extracted according to standard methods in the art. For instance, mRNA can be isolated using various lytic enzymes or chemical solutions according to the procedures set forth in Sambrook et al. (1989), or extracted by nucleic-acid-binding resins following the accompanying instructions provided by the manufacturers. The mRNA contained in the extracted nucleic acid sample is then detected by amplification procedures or conventional hybridization assays (e.g., Northern blot analysis) according to methods widely known in the art or based on the methods exemplified herein.

[0704] For purpose of this invention, amplification means any method employing a primer and a polymerase capable of replicating a target sequence with reasonable fidelity. Amplification may be carried out by natural or recombinant DNA polymerases such as TaqGold™, T7 DNA polymerase, Klenow fragment of E. coli DNA polymerase, and reverse transcriptase. A preferred amplification method is PCR. In particular, the isolated RNA can be subjected to a reverse transcription assay that is coupled with a quantitative polymerase chain reaction (RT-PCR) in order to quantify the expression level of a sequence associated with a signaling biochemical pathway.

[0705] Detection of the gene expression level can be conducted in real time in an amplification assay. In one aspect, the amplified products can be directly visualized with fluorescent DNA-binding agents including but not limited to DNA intercalators and DNA groove binders. Because the amount of the intercalators incorporated into the double-stranded DNA molecules is typically proportional to the amount of the amplified DNA products, one can conveniently determine the amount of the amplified products by quantifying the fluorescence of the intercalated dye using conventional optical systems in the art. DNA-binding dye suitable for this application include SYBR green, SYBR blue, DAPI, propidium iodine, Hoeste, SYBR gold, ethidium bromide, acridines, proflavine, acridine orange, acriflavine, fluorcoumanin, ellipticine, daunomycin, chloroquine, distamycin D, chromomycin, homidium, mithramycin, ruthenium polypyridyls, anthramycin, and the like.

[0706] In another aspect, other fluorescent labels such as sequence specific probes can be employed in the amplification reaction to facilitate the detection and quantification of the amplified products. Probe-based quantitative amplification relies on the sequence-specific detection of a desired amplified product. It utilizes fluorescent, target-specific probes (e.g., TaqMan® probes) resulting in increased specificity and sensitivity. Methods for performing probe-based quantitative amplification are well established in the art and are taught in U.S. Pat. No. 5,210,015.

[0707] In yet another aspect, conventional hybridization assays using hybridization probes that share sequence homology with sequences associated with a signaling biochemical pathway can be performed. Typically, probes are allowed to form stable complexes with the sequences associated with a signaling biochemical pathway contained within the biological sample derived from the test subject in a hybridization reaction. It will be appreciated by one of skill in the art that where antisense is used as the probe nucleic acid, the target polynucleotides provided in the sample are chosen to be complementary to sequences of the antisense nucleic acids. Conversely, where the nucleotide probe is a sense nucleic acid, the target polynucleotide is selected to be complementary to sequences of the sense nucleic acid.

[0708] Hybridization can be performed under conditions of various stringency. Suitable hybridization conditions for the practice of the present invention are such that the recognition interaction between the probe and sequences associated with a signaling biochemical pathway is both sufficiently specific and sufficiently stable. Conditions that increase the stringency of a hybridization reaction are widely known and published in the art. See, for example, (Sambrook, et al., (1989); Nonradioactive In Situ Hybridization Application Manual, Boehringer Mannheim, second edition). The hybridization assay can be formed using probes immobilized on any solid support, including but are not limited to nitrocellulose, glass, silicon, and a variety of gene arrays. A preferred hybridization assay is conducted on high-density gene chips as described in U.S. Pat. No. 5,445,934.

[0709] For a convenient detection of the probe-target complexes formed during the hybridization assay, the nucleotide probes are conjugated to a detectable label. Detectable labels suitable for use in the present invention include any composition detectable by photochemical, biochemical, spectroscopic, immunochemical, electrical, optical or chemical means. A wide variety of appropriate detectable labels are known in the art, which include fluorescent or chemiluminescent labels, radioactive isotope labels, enzymatic or other ligands. In preferred embodiments, one will likely desire to employ a fluorescent label or an enzyme tag, such as digoxigenin, ß-galactosidase, urease, alkaline phosphatase or peroxidase, avidin/biotin complex.

[0710] The detection methods used to detect or quantify the hybridization intensity will typically depend upon the label selected above. For example, radiolabels may be detected using photographic film or a phosphoimager. Fluorescent markers may be detected and quantified using a photodetector to detect emitted light. Enzymatic labels are typically detected by providing the enzyme with a substrate and measuring the reaction product produced by the action of the enzyme on the substrate; and finally colorimetric labels are detected by simply visualizing the colored label.

[0711] An agent-induced change in expression of sequences associated with a signaling biochemical pathway can also be determined by examining the corresponding gene products. Determining the protein level typically involves a) contacting the protein contained in a biological sample with an agent that specifically bind to a protein associated with a signaling biochemical pathway; and (b) identifying any agent:protein complex so formed. In one aspect of this embodiment, the agent that specifically binds a protein associated with a signaling biochemical pathway is an antibody, preferably a monoclonal antibody.

[0712] The reaction is performed by contacting the agent with a sample of the proteins associated with a signaling biochemical pathway derived from the test samples under conditions that will allow a complex to form between the agent and the proteins associated with a signaling biochemical pathway. The formation of the complex can be detected directly or indirectly according to standard procedures in the art. In the direct detection method, the agents are supplied with a detectable label and unreacted agents may be removed from the complex; the amount of remaining label thereby indicating the amount of complex formed. For such method, it is preferable to select labels that remain attached to the agents even during stringent washing conditions. It is preferable that the label does not interfere with the binding reaction. In the alternative, an indirect detection procedure may use an agent that contains a label introduced either chemically or enzymatically. A desirable label generally does not interfere with binding or the stability of the resulting agent:polypeptide complex. However, the label is typically designed to be accessible to an antibody for an effective binding and hence generating a detectable signal.

[0713] A wide variety of labels suitable for detecting protein levels are known in the art. Non-limiting examples include radioisotopes, enzymes, colloidal metals, fluorescent compounds, bioluminescent compounds, and chemiluminescent compounds.

[0714] The amount of agent:polypeptide complexes formed during the binding reaction can be quantified by standard quantitative assays. As illustrated above, the formation of agent:polypeptide complex can be measured directly by the amount of label remained at the site of binding. In an alternative, the protein associated with a signaling biochemical pathway is tested for its ability to compete with a labeled analog for binding sites on the specific agent. In this competitive assay, the amount of label captured is inversely proportional to the amount of protein sequences associated with a signaling biochemical pathway present in a test sample.

[0715] A number of techniques for protein analysis based on the general principles outlined above are available in the art. They include but are not limited to radioimmunoassay, ELISA (enzyme linked immunoradiometric assays), “sandwich” immunoassays, immunoradiometric assays, in situ immunoassays (using e.g., colloidal gold, enzyme or radioisotope labels), western blot analysis, immunoprecipitation assays, immunofluorescent assays, and SDS-PAGE.

[0716] Antibodies that specifically recognize or bind to proteins associated with a signaling biochemical pathway are preferable for conducting the aforementioned protein analyses. Where desired, antibodies that recognize a specific type of post-translational modifications (e.g., signaling biochemical pathway inducible modifications) can be used. Post-translational modifications include but are not limited to glycosylation, lipidation, acetylation, and phosphorylation. These antibodies may be purchased from commercial vendors. For example, anti-phosphotyrosine antibodies that specifically recognize tyrosine-phosphorylated proteins are available from a number of vendors including Invitrogen and Perkin Elmer. Anti-phosphotyrosine antibodies are particularly useful in detecting proteins that are differentially phosphorylated on their tyrosine residues in response to an ER stress. Such proteins include but are not limited to eukaryotic translation initiation factor 2 alpha (eIF-2α). Alternatively, these antibodies can be generated using conventional polyclonal or monoclonal antibody technologies by immunizing a host animal or an antibody-producing cell with a target protein that exhibits the desired post-translational modification.

### Modification of a Cell or Organism

[0717] The present disclosure further provides cells comprising one or more components of the systems herein, e.g., the Fanzor polypeptide and/or nucleic acid component(s). Also provided include cells modified by the systems and methods herein, and cell cultures, tissues, organs, organism comprising such cells or progeny thereof. The invention comprehends a method of modifying a cell or organism. The cell may be a prokaryotic cell or a eukaryotic cell. The cell may be a mammalian cell. The mammalian cell many be a non-human primate, bovine, porcine, rodent or mouse cell. The cell may be a non-mammalian eukaryotic cell such as poultry, fish or shrimp. The cell may also be a plant cell. The plant cell may be of a crop plant such as cassava, corn, sorghum, wheat, or rice. The plant cell may also be of an algae, tree or vegetable. The modification introduced to the cell by the present invention may be such that the cell and progeny of the cell are altered for improved production of biologic products such as an antibody, starch, alcohol or other desired cellular output. The modification introduced to the cell by the present invention may be such that the cell and progeny of the cell include an alteration that changes the biologic product produced.

### Therapeutic Uses and Methods of Treatment

[0718] The systems, compositions, and formulations described herein can be used for diagnosing, prognosing, treating and/or preventing a disease, condition, disorder, or a symptom thereof. As such, also provided herein are methods of diagnosing, prognosing, treating, and/or preventing a disease, state, or condition in or of a subject. Generally, the methods of diagnosing, prognosing, treating, and/or preventing a disease, state, or condition in or of a subject can include modifying a polynucleotide in a subject or cell thereof using a composition, system, or component thereof described herein and/or include detecting a diseased or healthy polynucleotide in a subject or cell thereof using a composition, system, or component thereof described herein. In one embodiment, the method of treatment or prevention can include using a composition, system, or component thereof to modify a polynucleotide of an infectious organism (e.g., bacterial or virus) within a subject or cell thereof. In one embodiment, the method of treatment or prevention can include using a composition, system, or component thereof to modify a polynucleotide of an infectious organism or symbiotic organism within a subject. The composition, system, and components thereof can be used to develop models of diseases, states, or conditions. The composition, system, and components thereof can be used to detect a disease state or correction thereof, such as by a method of treatment or prevention described herein. The composition, system, and components thereof can be used to screen and select cells that can be used, for example, as treatments or preventions described herein. The composition, system, and components thereof can be used to develop biologically active agents that can be used to modify one or more biologic functions or activities in a subject or a cell thereof.

[0719] In general, the method can include delivering a composition, system, and/or component thereof to a subject or cell thereof, or to an infectious or symbiotic organism by a suitable delivery technique and/or composition. Once administered the components can operate as described elsewhere herein to elicit a nucleic acid modification event. In some aspects, the nucleic acid modification event can occur at the genomic, epigenomic, and/or transcriptomic level. DNA and/or RNA cleavage, gene activation, and/or gene deactivation can occur. Additional features, uses, and advantages are described in greater detail below. On the basis of this concept, several variations are appropriate to elicit a genomic locus event, including DNA cleavage, gene activation, or gene deactivation. Using the provided compositions, the person skilled in the art can advantageously and specifically target single or multiple loci with the same or different functional domains to elicit one or more genomic locus events. In addition to treating and/or preventing a disease in a subject, the compositions may be applied in a wide variety of methods for screening in libraries in cells and functional modeling in vivo (e.g., gene activation of lincRNA and identification of function; gain-of-function modeling; loss-of-function modeling; the use the compositions of the invention to establish cell lines and transgenic animals for optimization and screening purposes).

[0720] The composition, system, and components thereof described elsewhere herein can be used to treat and/or prevent a disease, such as a genetic and/or epigenetic disease, in a subject. The composition, system, and components thereof described elsewhere herein can be used to treat and/or prevent genetic infectious diseases in a subject, such as bacterial infections, viral infections, fungal infections, parasite infections, and combinations thereof. The composition, system, and components thereof described elsewhere herein can be used to modify the composition or profile of a microbiome in a subject, which can in turn modify the health status of the subject. The composition, system, described herein can be used to modify cells ex vivo, which can then be administered to the subject whereby the modified cells can treat or prevent a disease or symptom thereof. This is also referred to in some contexts as adoptive therapy. The composition, system, described herein can be used to treat mitochondrial diseases, where the mitochondrial disease etiology involves a mutation in the mitochondrial DNA.

[0721] Also provided is a method of treating a subject, e.g., a subject in need thereof, comprising inducing gene editing by transforming the subject with the polynucleotide encoding one or more components of the composition, system, or complex or any of polynucleotides or vectors described herein and administering them to the subject. A suitable repair template may also be provided, for example delivered by a vector comprising said repair template. The repair template may be a recombination template herein. Also provided is a method of treating a subject, e.g., a subject in need thereof, comprising inducing transcriptional activation or repression of multiple target gene loci by transforming the subject with the polynucleotides or vectors described herein, wherein said polynucleotide or vector encodes or comprises one or more components of composition, system, complex or component thereof comprising multiple Fanzor polypeptides. Where any treatment is occurring ex vivo, for example in a cell culture, then it will be appreciated that the term ‘subject’ may be replaced by the phrase “cell or cell culture.”

[0722] Also provided is a method of treating a subject, e.g., a subject in need thereof, comprising inducing gene editing by transforming the subject with the Fanzor polypeptide(s), advantageously encoding and expressing in vivo the remaining portions of the composition, system, (e.g., RNA). A suitable repair template may also be provided, for example delivered by a vector comprising said repair template. Also provided is a method of treating a subject, e.g., a subject in need thereof, comprising inducing transcriptional activation or repression by transforming the subject with the Fanzor polypeptide(s) advantageously encoding and expressing in vivo the remaining portions of the composition, system, (e.g., nucleic acid component molecule); advantageously in one embodiment the Fanzor polypeptide is a catalytically inactive Fanzor polypeptide and includes one or more associated functional domains. Where any treatment is occurring ex vivo, for example in a cell culture, then it will be appreciated that the term ‘subject’ may be replaced by the phrase “cell or cell culture.”

[0723] One or more components of the composition and system described herein can be included in a composition, such as a pharmaceutical composition, and administered to a host individually or collectively. Alternatively, these components may be provided in a single composition for administration to a host. Administration to a host may be performed via viral vectors known to the skilled person or described herein for delivery to a host (e.g., lentiviral vector, adenoviral vector, AAV vector). As explained herein, use of different selection markers (e.g., for lentiviral nucleic acid component selection) and concentration of nucleic acid component (e.g., dependent on whether multiple nucleic acid components are used) may be advantageous for eliciting an improved effect.

[0724] Thus, also described herein are methods of inducing one or more polynucleotide modifications in a eukaryotic or prokaryotic cell or component thereof (e.g., a mitochondria) of a subject, infectious organism, and/or organism of the microbiome of the subject. The modification can include the introduction, deletion, or substitution of one or more nucleotides at a target sequence of a polynucleotide of one or more cell(s). The modification can occur in vitro, ex vivo, in situ, or in vivo.

[0725] In one embodiment, the method of treating or inhibiting a condition or a disease caused by one or more mutations in a genomic locus in a eukaryotic organism or a non-human organism can include manipulation of a target sequence within a coding, non-coding or regulatory element of said genomic locus in a target sequence in a subject or a non-human subject in need thereof comprising modifying the subject or a non-human subject by manipulation of the target sequence and wherein the condition or disease is susceptible to treatment or inhibition by manipulation of the target sequence including providing treatment comprising delivering a composition comprising the particle delivery system or the delivery system or the virus particle of any one of the above embodiment or the cell of any one of the above embodiment.

[0726] Also provided herein is the use of the particle delivery system or the delivery system or the virus particle of any one of the above embodiments or the cell of any one of the above embodiments in ex vivo or in vivo gene or genome editing; or for use in in vitro, ex vivo or in vivo gene therapy. Also provided herein are particle delivery systems, non-viral delivery systems, and/or the virus particle of any one of the above embodiments or the cell of any one of the above embodiments used in the manufacture of a medicament for in vitro, ex vivo or in vivo gene or genome editing or for use in in vitro, ex vivo or in vivo gene therapy or for use in a method of modifying an organism or a non-human organism by manipulation of a target sequence in a genomic locus associated with a disease or in a method of treating or inhibiting a condition or disease caused by one or more mutations in a genomic locus in a eukaryotic organism or a non-human organism.

[0727] In one embodiment, polynucleotide modification can include the introduction, deletion, or substitution of 1-75 nucleotides at each target sequence of said polynucleotide of said cell(s). The modification can include the introduction, deletion, or substitution of at least 1, 5, 10, 11, 12, 13, 14, 15, 16, 17, 18, 19, 20, 21, 22, 23, 24, 25, 26, 27, 28, 29, 30, 35, 40, 45, 50, or 75 nucleotides at each target sequence. The modification can include the introduction, deletion, or substitution of at least 5, 10, 11, 12, 13, 14, 15, 16, 17, 18, 19, 20, 21, 22, 23, 24, 25, 26, 27, 28, 29, 30, 35, 40, 45, 50, or 75 nucleotides at each target sequence of said cell(s). The modification can include the introduction, deletion, or substitution of at least 10, 11, 12, 13, 14, 15, 16, 17, 18, 19, 20, 21, 22, 23, 24, 25, 26, 27, 28, 29, 30, 35, 40, 45, 50, or 75 nucleotides at each target sequence of said cell(s). The modification can include the introduction, deletion, or substitution of at least 20, 21, 22, 23, 24, 25, 26, 27, 28, 29, 30, 35, 40, 45, 50, or 75 nucleotides at each target sequence of said cell(s). The modification can include the introduction, deletion, or substitution of at least 40, 45, 50, 75, 100, 200, 300, 400 or 500 nucleotides at each target sequence of said cell(s). The modification can include the introduction, deletion, or substitution of at least 500, 600, 700, 800, 900, 1000, 1100, 1200, 1300, 1400, 1500, 1600, 1700, 1800, 1900, 2000, 2100, 2200, 2300, 2400, 2500, 2600, 2700, 2800, 2900, 3000, 3100, 3200, 3300, 3400, 3500, 3600, 3700, 3800, 3900, 4000, 4100, 4200, 4300, 4400, 4500, 4600, 4700, 4800, 4900, 5000, 5100, 5200, 5300, 5400, 5500, 5600, 5700, 5800, 5900, 6000, 6100, 6200, 6300, 6400, 6500, 6600, 6700, 6800, 6900, 7000, 7100, 7200, 7300, 7400, 7500, 7600, 7700, 7800, 7900, 8000, 8100, 8200, 8300, 8400, 8500, 8600, 8700, 8800, 8900, 9000, 9100, 9200, 9300, 9400, 9500, 9600, 9700, 9800, or 9900 to 10000 nucleotides at each target sequence of said cell(s).

[0728] In one embodiment, the modifications can include the introduction, deletion, or substitution of nucleotides at each target sequence of said cell(s) via nucleic acid components (e.g. nucleic acid component molecule(s) RNA(s) or nucleic acid component(s)), such as those mediated by a composition, system, or a component thereof described elsewhere herein. In one embodiment, the modifications can include the introduction, deletion, or substitution of nucleotides at a target or random sequence of said cell(s) via a composition, system, or technique.

[0729] In one embodiment, the composition, system, or component thereof can promote Non-Homologous End-Joining (NHEJ). In one embodiment, modification of a polynucleotide by a composition, system, or a component thereof, such as a diseased polynucleotide, can include NHEJ. In one embodiment, promotion of this repair pathway by the composition, system, or a component thereof can be used to target gene or polynucleotide specific knock-outs and/or knock-ins. In one embodiment, promotion of this repair pathway by the composition, system, or a component thereof can be used to generate NHEJ-mediated indels. Nuclease-induced NHEJ can also be used to remove (e.g., delete) sequence in a gene of interest. Generally, NHEJ repairs a double-strand break in the DNA by joining together the two ends; however, generally, the original sequence is restored only if two compatible ends, exactly as they were formed by the double-strand break, are perfectly ligated. The DNA ends of the double-strand break are frequently the subject of enzymatic processing, resulting in the addition or removal of nucleotides, at one or both strands, prior to rejoining of the ends. This results in the presence of insertion and/or deletion (indel) mutations in the DNA sequence at the site of the NHEJ repair. The indel can range in size from 1-50 or more base pairs. In one embodiment thee indel can be 1, 2, 3, 4, 5, 6, 7, 8, 9, 10, 11, 12, 13, 14, 15, 16, 17, 18, 19, 20, 21, 22, 23, 24, 25, 26, 27, 28, 29, 30, 31, 32, 33, 34, 35, 36, 37, 38, 39, 40, 41, 42, 43, 44, 45, 46, 47, 48, 49, 50, 51, 52, 53, 54, 55, 56, 57, 58, 59, 60, 61, 62, 63, 64, 65, 66, 67, 68, 69, 70, 71, 72, 73, 74, 75, 76, 77, 78, 79, 80, 81, 82, 83, 84, 85, 86, 87, 88, 89, 90, 91, 92, 93, 94, 95, 96, 97, 98, 99, 100, 101, 102, 103, 104, 105, 106, 107, 108, 109, 110, 111, 112, 113, 114, 115, 116, 117, 118, 119, 120, 121, 122, 123, 124, 125, 126, 127, 128, 129, 130, 131, 132, 133, 134, 135, 136, 137, 138, 139, 140, 141, 142, 143, 144, 145, 146, 147, 148, 149, 150, 151, 152, 153, 154, 155, 156, 157, 158, 159, 160, 161, 162, 163, 164, 165, 166, 167, 168, 169, 170, 171, 172, 173, 174, 175, 176, 177, 178, 179, 180, 181, 182, 183, 184, 185, 186, 187, 188, 189, 190, 191, 192, 193, 194, 195, 196, 197, 198, 199, 200, 201, 202, 203, 204, 205, 206, 207, 208, 209, 210, 211, 212, 213, 214, 215, 216, 217, 218, 219, 220, 221, 222, 223, 224, 225, 226, 227, 228, 229, 230, 231, 232, 233, 234, 235, 236, 237, 238, 239, 240, 241, 242, 243, 244, 245, 246, 247, 248, 249, 250, 251, 252, 253, 254, 255, 256, 257, 258, 259, 260, 261, 262, 263, 264, 265, 266, 267, 268, 269, 270, 271, 272, 273, 274, 275, 276, 277, 278, 279, 280, 281, 282, 283, 284, 285, 286, 287, 288, 289, 290, 291, 292, 293, 294, 295, 296, 297, 298, 299, 300, 301, 302, 303, 304, 305, 306, 307, 308, 309, 310, 311, 312, 313, 314, 315, 316, 317, 318, 319, 320, 321, 322, 323, 324, 325, 326, 327, 328, 329, 330, 331, 332, 333, 334, 335, 336, 337, 338, 339, 340, 341, 342, 343, 344, 345, 346, 347, 348, 349, 350, 351, 352, 353, 354, 355, 356, 357, 358, 359, 360, 361, 362, 363, 364, 365, 366, 367, 368, 369, 370, 371, 372, 373, 374, 375, 376, 377, 378, 379, 380, 381, 382, 383, 384, 385, 386, 387, 388, 389, 390, 391, 392, 393, 394, 395, 396, 397, 398, 399, 400, 401, 402, 403, 404, 405, 406, 407, 408, 409, 410, 411, 412, 413, 414, 415, 416, 417, 418, 419, 420, 421, 422, 423, 424, 425, 426, 427, 428, 429, 430, 431, 432, 433, 434, 435, 436, 437, 438, 439, 440, 441, 442, 443, 444, 445, 446, 447, 448, 449, 450, 451, 452, 453, 454, 455, 456, 457, 458, 459, 460, 461, 462, 463, 464, 465, 466, 467, 468, 469, 470, 471, 472, 473, 474, 475, 476, 477, 478, 479, 480, 481, 482, 483, 484, 485, 486, 487, 488, 489, 490, 491, 492, 493, 494, 495, 496, 497, 498, 499, or 500 base pairs or more. If a double-strand break is targeted near to a short target sequence, the deletion mutations caused by the NHEJ repair often span, and therefore remove, the unwanted nucleotides. For the deletion of larger DNA segments, introducing two double-strand breaks, one on each side of the sequence, can result in NHEJ between the ends with removal of the entire intervening sequence. Both of these approaches can be used to delete specific DNA sequences.

[0730] In one embodiment, composition, system, mediated NHEJ can be used in the method to delete small sequence motifs. In one embodiment, composition, system, mediated NHEJ can be used in the method to generate NHEJ-mediate indels that can be targeted to the gene, e.g., a coding region, e.g., an early coding region of a gene of interest can be used to knockout (i.e., eliminate expression of) a gene of interest. For example, early coding region of a gene of interest includes sequence immediately following a transcription start site, within a first exon of the coding sequence, or within 500 bp of the transcription start site (e.g., less than 500, 450, 400, 350, 300, 250, 200, 150, 100 or 50 bp). In an embodiment, in which a nucleic acid component and Fanzor polypeptide generate a double strand break for the purpose of inducing NHEJ-mediated indels, a nucleic acid component may be configured to position one double-strand break in close proximity to a nucleotide of the target position. In an embodiment, the cleavage site may be between 0-500 bp away from the target position (e.g., less than 500, 400, 300, 200, 100, 50, 40, 30, 25, 20, 15, 10, 9, 8, 7, 6, 5, 4, 3, 2 or 1 bp from the target position). In an embodiment, in which two component RNAs complexing with one or more nickases induce two single strand breaks for the purpose of inducing NHEJ-mediated indels, two component RNAs may be configured to position two single-strand breaks to provide for NHEJ repair a nucleotide of the target position.

[0731] For minimization of toxicity and off-target effect, it may be important to control the concentration of Fanzor polypeptide mRNA and component RNA delivered. Optimal concentrations of Fanzor polypeptide mRNA and component RNA can be determined by testing different concentrations in a cellular or non-human eukaryote animal model and using deep sequencing the analyze the extent of modification at potential off-target genomic loci. Alternatively, to minimize the level of toxicity and off-target effect, nickase mRNA (for example a mutated Fanzor) can be delivered with a pair of nucleic acid components targeting a site of interest.

[0732] Typically, in the context of an endogenous Fanzor polypeptide, formation of a Fanzor polypeptide or complex (comprising a polynucleotide component sequence hybridized to a target sequence and complexed with one or more Fanzor polypeptides) results in cleavage, nicking, and/or another modification of one or both strands in or near (e.g., within 1, 2, 3, 4, 5, 6, 7, 8, 9, 10, 20, 50, or more base pairs from) the target sequence.

[0733] In one embodiment, a method of modifying a target polynucleotide in a cell to treat or prevent a disease can include allowing a composition, system, or component thereof to bind to the target polynucleotide, e.g., to effect cleavage, nicking, or other modification as the composition, system, is capable of said target polynucleotide, thereby modifying the target polynucleotide, wherein the composition, system, or component thereof, complex with a nucleic acid component molecule sequence, and hybridize said nucleic acid component molecule sequence to a target sequence within the target polynucleotide, wherein said nucleic acid component molecule sequence is optionally linked to a nucleic acid component scaffold sequence. In some of these embodiments, the composition, system, or component thereof can be or include a Fanzor polypeptide complexed with a nucleic acid component molecule sequence. In one embodiment, modification can include cleaving or nicking one or two strands at the location of the target sequence by one or more components of the composition, system, or component thereof.

[0734] The cleavage, nicking, or other modification capable of being performed by the composition, system, can modify transcription of a target polynucleotide. In one embodiment, modification of transcription can include decreasing transcription of a target polynucleotide. In one embodiment, modification can include increasing transcription of a target polynucleotide. In one embodiment, the method includes repairing said cleaved target polynucleotide by homologous recombination with a recombination template polynucleotide, wherein said repair results in a modification such as, but not limited to, an insertion, deletion, or substitution of one or more nucleotides of said target polynucleotide. In one embodiment, said modification results in one or more amino acid changes in a protein expressed from a gene comprising the target sequence. In one embodiment, the modification imparted by the composition, system, or component thereof provides a transcript and/or protein that can correct a disease or a symptom thereof, including but not limited to, any of those described in greater detail elsewhere herein.

[0735] In one embodiment, the method of treating or preventing a disease can include delivering one or more vectors or vector systems to a cell, such as a eukaryotic or prokaryotic cell, wherein one or more vectors or vector systems include the composition, system, or component thereof. In one embodiment, the vector(s) or vector system(s) can be a viral vector or vector system, such as an AAV or lentiviral vector system, which are described in greater detail elsewhere herein. In one embodiment, the method of treating or preventing a disease can include delivering one or more viral particles, such as an AAV or lentiviral particle, containing the composition, system, or component thereof. In one embodiment, the viral particle has a tissue specific tropism. In one embodiment, the viral particle has a liver, muscle, eye, heart, pancreas, kidney, neuron, epithelial cell, endothelial cell, astrocyte, glial cell, immune cell, or red blood cell specific tropism.

[0736] It will be understood that the composition and system, according to the invention as described herein, such as the composition and system, for use in the methods according to the invention as described herein, may be suitably used for any type of application known for composition, system, preferably in eukaryotes. In certain aspects, the application is therapeutic, preferably therapeutic in a eukaryote organism, such as including but not limited to animals (including human), plants, algae, fungi (including yeasts), etc. Alternatively, or in addition, in certain aspects, the application may involve accomplishing or inducing one or more particular traits or characteristics, such as genotypic and/or phenotypic traits or characteristics, as also described elsewhere herein.

### Exemplary Disease Treatments

[0737] The following discussion provides non-limiting exemplary uses of the systems and compositions of the present invention in the context of non-limiting exemplary diseases.

### Treating Diseases of the Circulatory System

[0738] In one embodiment, the composition, system, and/or component thereof described herein can be used to treat and/or prevent a circulatory system disease. Exemplary disease is provided, for example, in Tables 4A-4B. In one embodiment the plasma exosomes of Wahlgren et al. (Nucleic Acids Research, 2012, Vol. 40, No. 17 e130) can be used to deliver the composition, system, and/or component thereof described herein to the blood. In one embodiment, the circulatory system disease can be treated by using a lentivirus to deliver the composition, system, described herein to modify hematopoietic stem cells (HSCs) in vivo or ex vivo (see e.g. Drakopoulou, “Review Article, The Ongoing Challenge of Hematopoietic Stem Cell-Based Gene Therapy for β-Thalassemia,” Stem Cells International, Volume 2011, Article ID 987980, 10 pages, doi: 10.4061/2011/987980, which can be adapted for use with the composition, system, herein in view of the description herein). In one embodiment, the circulatory system disorder can be treated by correcting HSCs as to the disease using a composition, system, herein or a component thereof, wherein the composition, system, optionally includes a suitable HDR repair template (see e.g. Cavazzana, “Outcomes of Gene Therapy for β-Thalassemia Major via Transplantation of Autologous Hematopoietic Stem Cells Transduced Ex Vivo with a Lentiviral DA-T87Q-Globin Vector.”; Cavazzana-Calvo, “Transfusion independence and HMGA2 activation after gene therapy of human β-thalassaemia”, Nature 467, 318-322 (16 Sep. 2010) doi:10.1038/nature09328; Nienhuis, “Development of Gene Therapy for Thalassemia, Cold Spring Harbor Perspectives in Medicine, doi: 10.1101/cshperspect.a011833 (2012), LentiGlobin BB305, a lentiviral vector containing an engineered β-globin gene (βA-T87Q); and Xie et al., “Seamless gene correction of 0-thalassaemia mutations in patient-specific iPSCs using CRISPR/Cas9 and piggyback” Genome Research gr.173427.114 (2014) www.genome.org/cgi/doi/10.1101/gr.173427.114 (Cold Spring Harbor Laboratory Press; Watts, “Hematopoietic Stem Cell Expansion and Gene Therapy” Cytotherapy 13(10):1164-1171. doi:10.3109/14653249.2011.620748 (2011), which can be adapted for use with the composition, system, herein in view of the description herein). In one embodiment, iPSCs can be modified using a composition, system, described herein to correct a disease polynucleotide associated with a circulatory disease. In this regard, the teachings of Xu et al. (Sci Rep. 2015 Jul. 9; 5:12065. doi: 10.1038/srep12065) and Song et al. (Stem Cells Dev. 2015 May 1; 24(9):1053-65. doi: 10.1089/scd.2014.0347. Epub 2015 Feb. 5) with respect to modifying iPSCs can be adapted for use in view of the description herein with the composition, system, described herein.

[0739] The term “Hematopoietic Stem Cell” or “HSC” refers broadly those cells considered to be an HSC, e.g., blood cells that give rise to all the other blood cells and are derived from mesoderm; located in the red bone marrow, which is contained in the core of most bones. HSCs of the invention include cells having a phenotype of hematopoietic stem cells, identified by small size, lack of lineage (lin) markers, and markers that belong to the cluster of differentiation series, like: CD34, CD38, CD90, CD133, CD105, CD45, and also c-kit,—the receptor for stem cell factor. Hematopoietic stem cells are negative for the markers that are used for detection of lineage commitment, and are, thus, called Lin−; and, during their purification by FACS, a number of up to 14 different mature blood-lineage markers, e.g., CD13 & CD33 for myeloid, CD71 for erythroid, CD19 for B cells, CD61 for megakaryocytic, etc. for humans; and, B220 (murine CD45) for B cells, Mac-1 (CD11b/CD18) for monocytes, Gr-1 for Granulocytes, Ter119 for erythroid cells, Il7Ra, CD3, CD4, CD5, CD8 for T cells, etc. Mouse HSC markers: CD34lo/−, SCA-1+, Thy1.1+/lo, CD38+, C-kit+, lin−, and Human HSC markers: CD34+, CD59+, Thy1/CD90+, CD38lo/−, C-kit/CD117+, and lin−. HSCs are identified by markers. Hence in embodiments discussed herein, the HSCs can be CD34+ cells. HSCs can also be hematopoietic stem cells that are CD34−/CD38−. Stem cells that may lack c-kit on the cell surface that are considered in the art as HSCs are within the ambit of the invention, as well as CD133+ cells likewise considered HSCs in the art.

[0740] In one embodiment, the treatment or prevention for treating a circulatory system or blood disease can include modifying a human cord blood cell with any modification described herein. In one embodiment, the treatment or prevention for treating a circulatory system or blood disease can include modifying a granulocyte colony-stimulating factor-mobilized peripheral blood cell (mPB) with any modification described herein. In one embodiment, the human cord blood cell or mPB can be CD34+. In one embodiment, the cord blood cell(s) or mPB cell(s) modified can be autologous. In one embodiment, the cord blood cell(s) or mPB cell(s) can be allogenic. In addition to the modification of the disease gene(s), allogenic cells can be further modified using the composition, system, described herein to reduce the immunogenicity of the cells when delivered to the recipient. Such techniques are described elsewhere herein and e.g., Cartier, “MINI-SYMPOSIUM: X-Linked Adrenoleukodystrophypa, Hematopoietic Stem Cell Transplantation and Hematopoietic Stem Cell Gene Therapy in X-Linked Adrenoleukodystrophy,” Brain Pathology 20 (2010) 857-862, which can be adapted for use with the composition, system, herein. The modified cord blood cell(s) or mPB cell(s) can be optionally expanded in vitro. The modified cord blood cell(s) or mPB cell(s) can be derived to a subject in need thereof using any suitable delivery technique.

[0741] The compositions may be engineered to target genetic locus or loci in HSCs. In one embodiment, the Fanzor polypeptide(s) can be codon-optimized for a eukaryotic cell and especially a mammalian cell, e.g., a human cell, for instance, HSC, or iPSC and nucleic acid component targeting a locus or loci in HSC, such as circulatory disease, can be prepared. These may be delivered via particles. The particles may be formed by the Fanzor polypeptide and the nucleic acid component being admixed. The nucleic acid component and Fanzor polypeptide mixture can be, for example, admixed with a mixture comprising or consisting essentially of or consisting of surfactant, phospholipid, biodegradable polymer, lipoprotein and alcohol, whereby particles containing the nucleic acid component and Fanzor polypeptide may be formed. The invention comprehends so making particles and particles from such a method as well as uses thereof. Particles suitable delivery of the composition in the context of blood or circulatory system or HSC delivery to the blood or circulatory system are described in greater detail elsewhere herein.

[0742] In one embodiment, after ex vivo modification the HSCs or iPCS can be expanded prior to administration to the subject. Expansion of HSCs can be via any suitable method such as that described by, Lee, “Improved ex vivo expansion of adult hematopoietic stem cells by overcoming CUL4-mediated degradation of HOXB4.” Blood. 2013 May 16; 121(20):4082-9. doi: 10.1182/blood-2012-09-455204. Epub 2013 Mar. 21.

[0743] In one embodiment, the HSCs or iPSCs modified can be autologous. In one embodiment, the HSCs or iPSCs can be allogenic. In addition to the modification of the disease gene(s), allogenic cells can be further modified using the composition, system, described herein to reduce the immunogenicity of the cells when delivered to the recipient. Such techniques are described elsewhere herein and e.g., Cartier, “MINI-SYMPOSIUM: X-Linked Adrenoleukodystrophypa, Hematopoietic Stem Cell Transplantation and Hematopoietic Stem Cell Gene Therapy in X-Linked Adrenoleukodystrophy,” Brain Pathology 20 (2010) 857-862, which can be adapted for use with the composition, system, herein.

### Treating Neurological Diseases

[0744] In one embodiment, the compositions, systems, described herein can be used to treat diseases of the brain and CNS. Delivery options for the brain include encapsulation of Fanzor polypeptide and nucleic acid component molecule in the form of either DNA or RNA into liposomes and conjugating to molecular Trojan horses for trans-blood brain barrier (BBB) delivery. Molecular Trojan horses have been shown to be effective for delivery of B-gal expression vectors into the brain of non-human primates. The same approach can be used to delivery vectors containing Fanzor polypeptide and nucleic acid component molecule. For instance, Xia C F and Boado R J, Pardridge W M (“Antibody-mediated targeting of siRNA via the human insulin receptor using avidin-biotin technology.” Mol Pharm. 2009 May-June; 6(3):747-51. doi: 10.1021/mp800194) describes how delivery of short interfering RNA (siRNA) to cells in culture, and in vivo, is possible with combined use of a receptor-specific monoclonal antibody (mAb) and avidin-biotin technology. The authors also report that because the bond between the targeting mAb and the siRNA is stable with avidin-biotin technology, and RNAi effects at distant sites such as brain are observed in vivo following an intravenous administration of the targeted siRNA, the teachings of which can be adapted for use with the compositions, systems, herein. In other embodiments, an artificial virus can be generated for CNS and/or brain delivery. See e.g., Zhang et al. (Mol Ther. 2003 January; 7(1):11-8.)), the teachings of which can be adapted for use with the compositions, systems, herein.

### Treating Hearing Diseases

[0745] In one embodiment, the composition and system described herein can be used to treat a hearing disease or hearing loss in one or both ears. Deafness is often caused by lost or damaged hair cells that cannot relay signals to auditory neurons. In such cases, cochlear implants may be used to respond to sound and transmit electrical signals to the nerve cells. But these neurons often degenerate and retract from the cochlea as fewer growth factors are released by impaired hair cells.

[0746] In one embodiment, the composition, system, or modified cells can be delivered to one or both ears for treating or preventing hearing disease or loss by any suitable method or technique. Suitable methods and techniques include, but are not limited to, those set forth in US Patent Publication No. 20120328580 describes injection of a pharmaceutical composition into the ear (e.g., auricular administration), such as into the luminae of the cochlea (e.g., the Scala media, Sc vestibulae, and Sc tympani), e.g., using a syringe, e.g., a single-dose syringe. For example, one or more of the compounds described herein can be administered by intratympanic injection (e.g., into the middle ear), and/or injections into the outer, middle, and/or inner ear; administration in situ, via a catheter or pump (see e.g. McKenna et al., (U.S. Patent Publication No. 2006/0030837) and Jacobsen et al., (U.S. Pat. No. 7,206,639); administration in combination with a mechanical device such as a cochlear implant or a hearing aid, which is worn in the outer ear (see e.g. U.S. Patent Publication No. 2007/0093878, which provides an exemplary cochlear implant suitable for delivery of the compositions, systems, described herein to the ear). Such methods are routinely used in the art, for example, for the administration of steroids and antibiotics into human ears. Injection can be, for example, through the round window of the ear or through the cochlear capsule. Other inner ear administration methods are known in the art (see, e.g., Salt and Plontke, Drug Discovery Today, 10:1299-1306, 2005). In one embodiment, a catheter or pump can be positioned, e.g., in the ear (e.g., the outer, middle, and/or inner ear) of a patient during a surgical procedure. In one embodiment, a catheter or pump can be positioned, e.g., in the ear (e.g., the outer, middle, and/or inner ear) of a patient without the need for a surgical procedure.

[0747] In general, the cell therapy methods described in US Patent Publication No. 20120328580 can be used to promote complete or partial differentiation of a cell to or towards a mature cell type of the inner ear (e.g., a hair cell) in vitro. Cells resulting from such methods can then be transplanted or implanted into a patient in need of such treatment. The cell culture methods required to practice these methods, including methods for identifying and selecting suitable cell types, methods for promoting complete or partial differentiation of selected cells, methods for identifying complete or partially differentiated cell types, and methods for implanting complete or partially differentiated cells are described below.

[0748] Cells suitable for use in the present invention include, but are not limited to, cells that are capable of differentiating completely or partially into a mature cell of the inner ear, e.g., a hair cell (e.g., an inner and/or outer hair cell), when contacted, e.g., in vitro, with one or more of the compounds described herein. Exemplary cells that are capable of differentiating into a hair cell include, but are not limited to stem cells (e.g., inner ear stem cells, adult stem cells, bone marrow derived stem cells, embryonic stem cells, mesenchymal stem cells, skin stem cells, iPS cells, and fat derived stem cells), progenitor cells (e.g., inner ear progenitor cells), support cells (e.g., Deiters' cells, pillar cells, inner phalangeal cells, tectal cells and Hensen's cells), and/or germ cells. The use of stem cells for the replacement of inner ear sensory cells is described in Li et al., (U.S. Patent Publication No. 2005/0287127) and Li et al., (U.S. patent application Ser. No. 11/953,797). The use of bone marrow derived stem cells for the replacement of inner ear sensory cells is described in Edge et al., PCT/US2007/084654. iPS cells are described, e.g., at Takahashi et al., Cell, Volume 131, Issue 5, Pages 861-872 (2007); Takahashi and Yamanaka, Cell 126, 663-76 (2006); Okita et al., Nature 448, 260-262 (2007); Yu, J. et al., Science 318(5858):1917-1920 (2007); Nakagawa et al., Nat. Biotechnol. 26:101-106 (2008); and Zaehres and Scholer, Cell 131(5):834-835 (2007). Such suitable cells can be identified by analyzing (e.g., qualitatively or quantitatively) the presence of one or more tissue specific genes. For example, gene expression can be detected by detecting the protein product of one or more tissue-specific genes. Protein detection techniques involve staining proteins (e.g., using cell extracts or whole cells) using antibodies against the appropriate antigen. In this case, the appropriate antigen is the protein product of the tissue-specific gene expression. Although, in principle, a first antibody (i.e., the antibody that binds the antigen) can be labeled, it is more common (and improves the visualization) to use a second antibody directed against the first (e.g., an anti-IgG). This second antibody is conjugated either with fluorochromes, or appropriate enzymes for colorimetric reactions, or gold beads (for electron microscopy), or with the biotin-avidin system, so that the location of the primary antibody, and thus the antigen, can be recognized.

[0749] The composition and system may be delivered to the ear by direct application of pharmaceutical composition to the outer ear, with compositions modified from US Patent Publication No. 20110142917. In one embodiment the pharmaceutical composition is applied to the ear canal. Delivery to the ear may also be referred to as aural or otic delivery.

[0750] In one embodiment, the compositions, systems, or components thereof and/or vectors or vector systems can be delivered to ear via a transfection to the inner ear through the intact round window by a novel proteidic delivery technology which may be applied to the nucleic acid-targeting system of the present invention (see, e.g., Qi et al., Gene Therapy (2013), 1-9). About 40 μl of 10 mM RNA may be contemplated as the dosage for administration to the ear.

[0751] According to Rejali et al. (Hear Res. 2007 June; 228(1-2):180-7), cochlear implant function can be improved by good preservation of the spiral ganglion neurons, which are the target of electrical stimulation by the implant and brain derived neurotrophic factor (BDNF) has previously been shown to enhance spiral ganglion survival in experimentally deafened ears. Rejali et al. tested a modified design of the cochlear implant electrode that includes a coating of fibroblast cells transduced by a viral vector with a BDNF gene insert. To accomplish this type of ex vivo gene transfer, Rejali et al. transduced guinea pig fibroblasts with an adenovirus with a BDNF gene cassette insert, and determined that these cells secreted BDNF and then attached BDNF-secreting cells to the cochlear implant electrode via an agarose gel, and implanted the electrode in the scala tympani. Rejali et al. determined that the BDNF expressing electrodes were able to preserve significantly more spiral ganglion neurons in the basal turns of the cochlea after 48 days of implantation when compared to control electrodes and demonstrated the feasibility of combining cochlear implant therapy with ex vivo gene transfer for enhancing spiral ganglion neuron survival. Such a system may be applied to the nucleic acid-targeting system of the present invention for delivery to the ear.

[0752] In one embodiment, the system set forth in Mukherjea et al. (Antioxidants & Redox Signaling, Volume 13, Number 5, 2010) can be adapted for transtympanic administration of the composition, system, or component thereof to the ear. In one embodiment, a dosage of about 2 mg to about 4 mg of Fanzor polypeptide for administration to a human.

[0753] In one embodiment, the system set forth in [Jung et al. (Molecular Therapy, vol. 21 no. 4, 834-841 April 2013) can be adapted for vestibular epithelial delivery of the composition, system, or component thereof to the ear. In one embodiment, a dosage of about 1 to about 30 mg of Fanzor polypeptide for administration to a human.

### Treating Diseases in Non-Dividing Cells

[0754] In one embodiment, the gene or transcript to be corrected is in a non-dividing cell. Exemplary non-dividing cells are muscle cells or neurons. Non-dividing (especially non-dividing, fully differentiated) cell types present issues for gene targeting or genome engineering, for example because homologous recombination (HR) is generally suppressed in the G1 cell-cycle phase. However, while studying the mechanisms by which cells control normal DNA repair systems, Durocher discovered a previously unknown switch that keeps HR “off” in non-dividing cells and devised a strategy to toggle this switch back on. Orthwein et al. (Daniel Durocher's lab at the Mount Sinai Hospital in Ottawa, Canada) recently reported (Nature 16142, published online 9 Dec. 2015) have shown that the suppression of HR can be lifted and gene targeting successfully concluded in both kidney (293T) and osteosarcoma (U20S) cells. Tumor suppressors, BRCA1, PALB2 and BRAC2 are known to promote DNA DSB repair by HR. They found that formation of a complex of BRCA1 with PALB2-BRAC2 is governed by a ubiquitin site on PALB2, such that action on the site by an E3 ubiquitin ligase. This E3 ubiquitin ligase is composed of KEAP1 (a PALB2-interacting protein) in complex with cullin-3 (CUL3)-RBX1. PALB2 ubiquitylation suppresses its interaction with BRCA1 and is counteracted by the deubiquitylase USP11, which is itself under cell cycle control. Restoration of the BRCA1-PALB2 interaction combined with the activation of DNA-end resection is sufficient to induce homologous recombination in G1, as measured by a number of methods including a Cas polypeptide nuclease-based gene-targeting assay directed at USP11 or KEAP1 (expressed from a pX459 vector). However, when the BRCA1-PALB2 interaction was restored in resection-competent G1 cells using either KEAP1 depletion or expression of the PALB2-KR mutant, a robust increase in gene-targeting events was detected. These teachings can be adapted for and/or applied to the compositions, systems, described herein.

[0755] Thus, reactivation of HR in cells, especially non-dividing, fully differentiated cell types is preferred, In one embodiment. In one embodiment, promotion of the BRCA1-PALB2 interaction is preferred In one embodiment. In one embodiment, the target ell is a non-dividing cell. In one embodiment, the target cell is a neuron or muscle cell. In one embodiment, the target cell is targeted in vivo. In one embodiment, the cell is in G1 and HR is suppressed. In one embodiment, use of KEAP1 depletion, for example inhibition of expression of KEAP1 activity, is preferred. KEAP1 depletion may be achieved through siRNA, for example as shown in Orthwein et al. Alternatively, expression of the PALB2-KR mutant (lacking all eight Lys residues in the BRCA1-interaction domain is preferred, either in combination with KEAP1 depletion or alone. PALB2-KR interacts with BRCA1 irrespective of cell cycle position. Thus, promotion or restoration of the BRCA1-PALB2 interaction, especially in G1 cells, is preferred In one embodiment, especially where the target cells are non-dividing, or where removal and return (ex vivo gene targeting) is problematic, for example neuron or muscle cells. KEAP1 siRNA is available from ThermoFischer. In one embodiment, a BRCA1-PALB2 complex may be delivered to the G1 cell. In one embodiment, PALB2 deubiquitylation may be promoted for example by increased expression of the deubiquitylase USP 11, so it is envisaged that a construct may be provided to promote or up-regulate expression or activity of the deubiquitylase USP11.

### Treating Diseases of the Eye

[0756] In one embodiment, the disease to be treated is a disease that affects the eyes. Thus, In one embodiment, the composition, system, or component thereof described herein is delivered to one or both eyes.

[0757] The composition, system, can be used to correct ocular defects that arise from several genetic mutations further described in Genetic Diseases of the Eye, Second Edition, edited by Elias I. Traboulsi, Oxford University Press, 2012.

[0758] In one embodiment, the condition to be treated or targeted is an eye disorder. In one embodiment, the eye disorder may include glaucoma. In one embodiment, the eye disorder includes a retinal degenerative disease. In one embodiment, the retinal degenerative disease is selected from Stargardt disease, Bardet-Biedl Syndrome, Best disease, Blue Cone Monochromacy, Choroidermia, Cone-rod dystrophy, Congenital Stationary Night Blindness, Enhanced S-Cone Syndrome, Juvenile X-Linked Retinoschisis, Leber Congenital Amaurosis, Malattia Leventinesse, Norrie Disease or X-linked Familial Exudative Vitreoretinopathy, Pattern Dystrophy, Sorsby Dystrophy, Usher Syndrome, Retinitis Pigmentosa, Achromatopsia or Macular dystrophies or degeneration, Retinitis Pigmentosa, Achromatopsia, and age related macular degeneration. In one embodiment, the retinal degenerative disease is Leber Congenital Amaurosis (LCA) or Retinitis Pigmentosa. Other exemplary eye diseases are described in greater detail elsewhere herein.

[0759] In one embodiment, the composition, system, is delivered to the eye, optionally via intravitreal injection or subretinal injection. Intraocular injections may be performed with the aid of an operating microscope. For subretinal and intravitreal injections, eyes may be prolapsed by gentle digital pressure and fundi visualized using a contact lens system consisting of a drop of a coupling medium solution on the cornea covered with a glass microscope slide coverslip. For subretinal injections, the tip of a 10-mm 34-gauge needle, mounted on a 5-μl Hamilton syringe may be advanced under direct visualization through the superior equatorial sclera tangentially towards the posterior pole until the aperture of the needle was visible in the subretinal space. Then, 2 μl of vector suspension may be injected to produce a superior bullous retinal detachment, thus confirming subretinal vector administration. This approach creates a self-sealing sclerotomy allowing the vector suspension to be retained in the subretinal space until it is absorbed by the RPE, usually within 48 h of the procedure. This procedure may be repeated in the inferior hemisphere to produce an inferior retinal detachment. This technique results in the exposure of approximately 70% of neurosensory retina and RPE to the vector suspension. For intravitreal injections, the needle tip may be advanced through the sclera 1 mm posterior to the corneoscleral limbus and 2 μl of vector suspension injected into the vitreous cavity. For intracameral injections, the needle tip may be advanced through a corneoscleral limbal paracentesis, directed towards the central cornea, and 2 μl of vector suspension may be injected. For intracameral injections, the needle tip may be advanced through a corneoscleral limbal paracentesis, directed towards the central cornea, and 2 μl of vector suspension may be injected. These vectors may be injected at titers of either 1.0-1.4×10¹⁰ or 1.0-1.4×10⁹ transducing units (TU)/ml.

[0760] In one embodiment, for administration to the eye, lentiviral vectors. In one embodiment, the lentiviral vector is an equine infectious anemia virus (EIAV) vector. Exemplary EIAV vectors for eye delivery are described in Balagaan, J Gene Med 2006; 8: 275 285, Published online 21 Nov. 2005 in Wiley InterScience (www.interscience.wiley.com). DOI: 10.1002/jgm.845; Binley et al., HUMAN GENE THERAPY 23:980-991 (September 2012), which can be adapted for use with the composition, system, described herein. In one embodiment, the dosage can be 1.1×10⁵ transducing units per eye (TU/eye) in a total volume of 100 μl.

[0761] Other viral vectors can also be used for delivery to the eye, such as AAV vectors, such as those described in Campochiaro et al., Human Gene Therapy 17:167-176 (February 2006), Millington-Ward et al. (Molecular Therapy, vol. 19 no. 4, 642-649 April 2011; Dalkara et al. (Sci Transl Med 5, 189ra76 (2013)), which can be adapted for use with the composition, system, described herein. In one embodiment, the dose can range from about 106 to 109.5 particle units. In the context of the Millington-Ward AAV vectors, a dose of about 2×1011 to about 6×1013 virus particles can be administered. In the context of Dalkara vectors, a dose of about 1×1015 to about 1×1016 vg/ml administered to a human.

[0762] In one embodiment, the sd-rxRNA® system of RXi Pharmaceuticals may be used/and or adapted for delivering composition, system, to the eye. In this system, a single intravitreal administration of 3 μg of sd-rxRNA results in sequence-specific reduction of PPIB mRNA levels for 14 days. The sd-rxRNA® system may be applied to the nucleic acid-targeting system of the present invention, contemplating a dose of about 3 to 20 mg of composition administered to a human.

[0763] In other embodiments, the methods of US Patent Publication No. 20130183282, which is directed to methods of cleaving a target sequence from the human rhodopsin gene, may also be modified to the nucleic acid-targeting system of the present invention.

[0764] In other embodiments, the methods of US Patent Publication No. 20130202678 for treating retinopathies and sight-threatening ophthalmologic disorders relating to delivering of the Puf-A gene (which is expressed in retinal ganglion and pigmented cells of eye tissues and displays a unique anti-apoptotic activity) to the sub-retinal or intravitreal space in the eye may be used or adapted. In particular, desirable targets are zgc:193933, prdm1a, spata2, tex10, rbb4, ddx3, zp2.2, Blimp-1 and HtrA2, all of which may be targeted by the composition, system, of the present invention.

[0765] Wu (Cell Stem Cell, 13:659-62, 2013) designed a guide RNA that led Cas9 to a single base pair mutation that causes cataracts in mice, where it induced DNA cleavage. Then using either the other wild-type allele or oligos given to the zygotes repair mechanisms corrected the sequence of the broken allele and corrected the cataract-causing genetic defect in mutant mouse. This approach can be adapted to and/or applied to the Fanzor compositions, systems, described herein.

[0766] US Patent Publication No. 20120159653, describes use of zinc finger nucleases to genetically modify cells, animals and proteins associated with macular degeneration (MD), the teachings of which can be applied to and/or adapted for the Fanzor compositions, systems, described herein.

[0767] One aspect of US Patent Publication No. 20120159653 relates to editing of any chromosomal sequences that encode proteins associated with MD which may be applied to the nucleic acid-targeting system of the present invention.

### Treating Muscle Diseases and Cardiovascular Diseases

[0768] In one embodiment, the composition, system can be used to treat and/or prevent a muscle disease and associated circulatory or cardiovascular disease or disorder. The present invention also contemplates delivering the composition, system, described herein, e.g., Fanzor effector protein systems, to the heart. For the heart, a myocardium tropic adeno-associated virus (AAVM) is preferred, in particular AAVM41 which showed preferential gene transfer in the heart (see, e.g., Lin-Yanga et al., PNAS, Mar. 10, 2009, vol. 106, no. 10). Administration may be systemic or local. A dosage of about 1-10×10¹⁴ vector genomes are contemplated for systemic administration. See also, e.g., Eulalio et al. (2012) Nature 492: 376 and Somasuntharam et al. (2013) Biomaterials 34: 7790, the teachings of which can be adapted for and/or applied to the compositions, systems, described herein.

[0769] For example, US Patent Publication No. 20110023139, the teachings of which can be adapted for and/or applied to the compositions, systems, described herein describes use of zinc finger nucleases to genetically modify cells, animals and proteins associated with cardiovascular disease. Cardiovascular diseases generally include high blood pressure, heart attacks, heart failure, and stroke and TIA. Any chromosomal sequence involved in cardiovascular disease, or the protein encoded by any chromosomal sequence involved in cardiovascular disease may be utilized in the methods described in this disclosure. The cardiovascular-related proteins are typically selected based on an experimental association of the cardiovascular-related protein to the development of cardiovascular disease. For example, the production rate or circulating concentration of a cardiovascular-related protein may be elevated or depressed in a population having a cardiovascular disorder relative to a population lacking the cardiovascular disorder. Differences in protein levels may be assessed using proteomic techniques including but not limited to Western blot, immunohistochemical staining, enzyme linked immunosorbent assay (ELISA), and mass spectrometry. Alternatively, the cardiovascular-related proteins may be identified by obtaining gene expression profiles of the genes encoding the proteins using genomic techniques including but not limited to DNA microarray analysis, serial analysis of gene expression (SAGE), and quantitative real-time polymerase chain reaction (Q-PCR).

[0770] The compositions, systems, herein can be used for treating diseases of the muscular system. The present invention also contemplates delivering the composition, system, described herein, effector protein systems, to muscle(s).

[0771] In one embodiment, the muscle disease to be treated is a muscle dystrophy such as DMD. In one embodiment, the composition, system, such as a system capable of RNA modification, described herein can be used to achieve exon skipping to achieve correction of the diseased gene. As used herein, the term “exon skipping” refers to the modification of pre-mRNA splicing by the targeting of splice donor and/or acceptor sites within a pre-mRNA with one or more complementary antisense oligonucleotide(s) (AONs). By blocking access of a spliceosome to one or more splice donor or acceptor site, an AON may prevent a splicing reaction thereby causing the deletion of one or more exons from a fully-processed mRNA. Exon skipping may be achieved in the nucleus during the maturation process of pre-mRNAs. In some examples, exon skipping may include the masking of key sequences involved in the splicing of targeted exons by using a composition, system, described herein capable of RNA modification. In one embodiment, exon skipping can be achieved in dystrophin mRNA. In one embodiment, the composition, system, can induce exon skipping at exon 1, 2, 3, 4, 5, 6, 7, 8, 10, 11, 12, 13, 14, 15, 16, 17, 18, 19, 20, 21, 22, 23, 24, 25, 26, 27, 28, 29, 30, 31, 32, 33, 34, 45, 36, 37, 38, 39, 40, 41, 42, 43, 44, 45, 46, 47, 48, 49, 50, 51, 52, 53, 54, 55, 56, 57, 58, 59, 60, 61, 62, 63, 64, 65, 66, 67, 68, 69, 70, 71, 72, 73, 74, 75, 76, 77, 78, 79, or any combination thereof of the dystrophin mRNA. In one embodiment, the composition, system, can induce exon skipping at exon 43, 44, 50, 51, 52, 55, or any combination thereof of the dystrophin mRNA. Mutations in these exons, can also be corrected using non-exon skipping polynucleotide modification methods.

[0772] In one embodiment, for treatment of a muscle disease, the method of Bortolanza et al. Molecular Therapy vol. 19 no. 11, 2055-264 November 2011) may be applied to an AAV expressing Fanzor polypeptide and injected into humans at a dosage of about 2×10¹⁵ or 2×10¹⁶ vg of vector. The teachings of Bortolanza et al., can be adapted for and/or applied to the compositions, systems, described herein.

[0773] In one embodiment, the method of Dumonceaux et al. (Molecular Therapy vol. 18 no. 5, 881-887 May 2010) may be applied to an AAV expressing Fanzor polypeptide and injected into humans, for example, at a dosage of about 10¹⁴ to about 10¹⁵ vg of vector. The teachings of Dumonceaux described herein can be adapted for and/or applied to the compositions, systems, described herein.

[0774] In one embodiment, the method of Kinouchi et al. (Gene Therapy (2008) 15, 1126-1130) may be applied to compositions described herein and injected into a human, for example, at a dosage of about 500 to 1000 ml of a 40 μM solution into the muscle.

[0775] In one embodiment, the method of Hagstrom et al. (Molecular Therapy Vol. 10, No. 2, August 2004) can be adapted for and/or applied to the compositions, systems, herein and injected at a dose of about 15 to about 50 mg into the great saphenous vein of a human.

[0776] In one embodiment, the method comprises treating a sickle cell related disease, e.g., sickle cell trait, sickle cell disease such as sickle cell anemia, β-thalassaemia. For example, the method and system may be used to modify the genome of the sickle cell, e.g., by correcting one or more mutations of the β-globin gene. In the case of β-thalassaemia, sickle cell anemia can be corrected by modifying HSCs with the systems. The system allows the specific editing of the cell's genome by cutting its DNA and then letting it repair itself. The Fanzor polypeptide is inserted and directed by a nucleic acid component molecule to the mutated point and then it cuts the DNA at that point. Simultaneously, a healthy version of the sequence is inserted. This sequence is used by the cell's own repair system to fix the induced cut. In this way, the Fanzor polypeptide allows the correction of the mutation in the previously obtained stem cells. The methods and systems may be used to correct HSCs as to sickle cell anemia using a systems that targets and corrects the mutation (e.g., with a suitable HDR template that delivers a coding sequence for β-globin, advantageously non-sickling β-globin); specifically, the nucleic acid component molecule can target mutation that give rise to sickle cell anemia, and the HDR can provide coding for proper expression of β-globin. A nucleic acid component molecule that targets the mutation-and-Fanzor polypeptide containing particle is contacted with HSCs carrying the mutation. The particle also can contain a suitable HDR template to correct the mutation for proper expression of β-globin; or the HSC can be contacted with a second particle or a vector that contains or delivers the HDR template. The so contacted cells can be administered; and optionally treated/expanded; cf. Cartier. The HDR template can provide for the HSC to express an engineered β-globin gene (e.g., PA-T87Q), or β-globin.

### Treating Diseases of the Liver and Kidney

[0777] In one embodiment, the composition, system, or component thereof described herein can be used to treat a disease of the kidney or liver. Thus, in one embodiment, delivery of the composition or component thereof described herein is to the liver or kidney.

[0778] Delivery strategies to induce cellular uptake of the therapeutic nucleic acid include physical force or vector systems such as viral-, lipid- or complex-based delivery, or nanocarriers. From the initial applications with less possible clinical relevance, when nucleic acids were addressed to renal cells with hydrodynamic high-pressure injection systemically, a wide range of gene therapeutic viral and non-viral carriers have been applied already to target posttranscriptional events in different animal kidney disease models in vivo (Csaba Révész and Péter Hamar (2011). Delivery Methods to Target RNAs in the Kidney, Gene Therapy Applications, Prof Chunsheng Kang (Ed.), ISBN: 978-953-307-541-9, InTech, Available from: www.intechopen.com/books/gene-therapy-applications/delivery-methods-to-target-rnas-inthe-kidney). Delivery methods to the kidney may include those in Yuan et al. (Am J Physiol Renal Physiol 295: F605-F617, 2008). The method of Yuang et al. may be applied to the composition of the present invention contemplating a 1-2 g subcutaneous injection of polypeptide nuclease conjugated with cholesterol to a human for delivery to the kidneys. In one embodiment, the method of Molitoris et al. (J Am Soc Nephrol 20: 1754-1764, 2009) can be adapted to the composition and a cumulative dose of 12-20 mg/kg to a human can be used for delivery to the proximal tubule cells of the kidneys. In one embodiment, the methods of Thompson et al. (Nucleic Acid Therapeutics, Volume 22, Number 4, 2012) can be adapted to the compositions and a dose of up to 25 mg/kg can be delivered via i.v. administration. In one embodiment, the method of Shimizu et al. (J Am Soc Nephrol 21: 622-633, 2010) can be adapted to the compositions and a dose of about of 10-20 mol compositions complexed with nanocarriers in about 1-2 liters of a physiologic fluid for i.p. administration can be used.

[0779] Other various delivery vehicles can be used to deliver the composition, system to the kidney such as viral, hydrodynamic, lipid, polymer nanoparticles, aptamers and various combinations thereof (see e.g. Larson et al., Surgery, (August 2007), Vol. 142, No. 2, pp. (262-269); Hamar et al., Proc Natl Acad Sci, (October 2004), Vol. 101, No. 41, pp. (14883-14888); Zheng et al., Am J Pathol, (October 2008), Vol. 173, No. 4, pp. (973-980); Feng et al., Transplantation, (May 2009), Vol. 87, No. 9, pp. (1283-1289); Q. Zhang et al., PloS ONE, (July 2010), Vol. 5, No. 7, e11709, pp. (1-13); Kushibikia et al., J Controlled Release, (July 2005), Vol. 105, No. 3, pp. (318-331); Wang et al., Gene Therapy, (July 2006), Vol. 13, No. 14, pp. (1097-1103); Kobayashi et al., Journal of Pharmacology and Experimental Therapeutics, (February 2004), Vol. 308, No. 2, pp. (688-693); Wolfrum et al., Nature Biotechnology, (September 2007), Vol. 25, No. 10, pp. (1149-1157); Molitoris et al., J Am Soc Nephrol, (August 2009), Vol. 20, No. 8 pp. (1754-1764); Mikhaylova et al., Cancer Gene Therapy, (March 2011), Vol. 16, No. 3, pp. (217-226); Y. Zhang et al., J Am Soc Nephrol, (April 2006), Vol. 17, No. 4, pp. (1090-1101); Singhal et al., Cancer Res, (May 2009), Vol. 69, No. 10, pp. (4244-4251); Malek et al., Toxicology and Applied Pharmacology, (April 2009), Vol. 236, No. 1, pp. (97-108); Shimizu et al., J Am Soc Nephrology, (April 2010), Vol. 21, No. 4, pp. (622-633); Jiang et al., Molecular Pharmaceutics, (May-June 2009), Vol. 6, No. 3, pp. (727-737); Cao et al, J Controlled Release, (June 2010), Vol. 144, No. 2, pp. (203-212); Ninichuk et al., Am J Pathol, (March 2008), Vol. 172, No. 3, pp. (628-637); Purschke et al., Proc Natl Acad Sci, (March 2006), Vol. 103, No. 13, pp. (5173-5178).

[0780] In one embodiment, delivery is to liver cells. In one embodiment, the liver cell is a hepatocyte. Delivery of the composition and system herein may be via viral vectors, especially AAV (and in particular AAV2/6) vectors. These can be administered by intravenous injection. A preferred target for the liver, whether in vitro or in vivo, is the albumin gene. This is a so-called ‘safe harbor” as albumin is expressed at very high levels and so some reduction in the production of albumin following successful gene editing is tolerated. It is also preferred as the high levels of expression seen from the albumin promoter/enhancer allows for useful levels of correct or transgene production (from the inserted recombination template) to be achieved even if only a small fraction of hepatocytes is edited. See sites identified by Wechsler et al. (reported at the 57th Annual Meeting and Exposition of the American Society of Hematology—abstract available online at ash.confex.com/ash/2015/webprogram/Paper86495.html and presented on 6th December 2015) which can be adapted for use with the compositions, systems, herein.

[0781] Exemplary liver and kidney diseases that can be treated and/or prevented are described elsewhere herein.

### Treating Epithelial and Lung Diseases

[0782] In one embodiment, the disease treated or prevented by the composition and system described herein can be a lung or epithelial disease. The compositions and systems described herein can be used for treating epithelial and/or lung diseases. The present invention also contemplates delivering the composition, system, described herein, to one or both lungs.

[0783] In one embodiment, as viral vector can be used to deliver the composition, system, or component thereof to the lungs. In one embodiment, the AAV is an AAV-1, AAV-2, AAV-5, AAV-6, and/or AAV-9 for delivery to the lungs. (see, e.g., Li et al., Molecular Therapy, vol. 17 no. 12, 2067-277 December 2009). In one embodiment, the MOI can vary from 1×103 to 4×105 vector genomes/cell. In one embodiment, the delivery vector can be an RSV vector as in Zamora et al. (Am J Respir Crit Care Med Vol 183. pp 531-538, 2011. The method of Zamora et al. may be applied to the nucleic acid-targeting system of the present invention and an aerosolized composition, for example with a dosage of 0.6 mg/kg, may be contemplated for the present invention.

[0784] Subjects treated for a lung disease may for example receive pharmaceutically effective amount of aerosolized AAV vector system per lung endobronchially delivered while spontaneously breathing. As such, aerosolized delivery is preferred for AAV delivery in general. An adenovirus or an AAV particle may be used for delivery. Suitable gene constructs, each operably linked to one or more regulatory sequences, may be cloned into the delivery vector. In this instance, the following constructs are provided as examples: Cbh or EF1a promoter for Fanzor, U6 or H1 promoter for nucleic acid component molecule). A preferred arrangement is to use a CFTRdelta508 targeting nucleic acid component molecule, a repair template for deltaF508 mutation and a codon optimized composition, with optionally one or more nuclear localization signal or sequence(s) (NLS(s)), e.g., two (2) NLSs.

### Treating Diseases of the Skin

[0785] The compositions and systems described herein can be used for the treatment of skin diseases. The present invention also contemplates delivering the composition and system, described herein, to the skin.

[0786] In one embodiment, delivery to the skin (intradermal delivery) of the composition, system, or component thereof can be via one or more microneedles or microneedle containing device. For example, in one embodiment the device and methods of Hickerson et al. (Molecular Therapy—Nucleic Acids (2013) 2, e129) can be used and/or adapted to deliver the composition, system, described herein, for example, at a dosage of up to 300 μl of 0.1 mg/ml compositions to the skin.

[0787] In one embodiment, the methods and techniques of Leachman et al. (Molecular Therapy, vol. 18 no. 2, 442-446 February 2010) can be used and/or adapted for delivery of a compositions described herein to the skin.

[0788] In one embodiment, the methods and techniques of Zheng et al. (PNAS, Jul. 24, 2012, vol. 109, no. 30, 11975-11980) can be used and/or adapted for nanoparticle delivery of a compositions described herein to the skin. In one embodiment, as dosage of about 25 nM applied in a single application can achieve gene knockdown in the skin.

### Treating Cancer

[0789] The compositions, systems, described herein can be used for the treatment of cancer. The present invention also contemplates delivering the composition, system, described herein, to a cancer cell. Also, as is described elsewhere herein the compositions, systems, can be used to modify an immune cell, such as a CAR or CAR T cell, which can then in turn be used to treat and/or prevent cancer. This is also described in International Patent Publication No. WO 2015/161276, the disclosure of which is hereby incorporated by reference and described herein below.

[0790] Target genes suitable for the treatment or prophylaxis of cancer can include those set forth in Tables 4A and 4B. In one embodiment, target genes for cancer treatment and prevention can also include those described in International Patent Publication No. WO 2015/048577 the disclosure of which is hereby incorporated by reference and can be adapted for and/or applied to the composition, system, described herein.

### Adoptive Cell Therapy

[0791] The compositions, systems, and components thereof described herein can be used to modify cells for an adoptive cell therapy. In an aspect of the invention, methods and compositions which involve editing a target nucleic acid sequence, or modulating expression of a target nucleic acid sequence, and applications thereof in connection with cancer immunotherapy are comprehended by adapting the composition, system, of the present invention. In some examples, the compositions, systems, and methods may be used to modify a stem cell (e.g., induced pluripotent cell) to derive modified natural killer cells, gamma delta T cells, and alpha beta T cells, which can be used for the adoptive cell therapy. In certain examples, the compositions, systems, and methods may be used to modify modified natural killer cells, gamma delta T cells, and alpha beta T cells.

[0792] As used herein, “ACT”, “adoptive cell therapy” and “adoptive cell transfer” may be used interchangeably. In one embodiment, Adoptive cell therapy (ACT) can refer to the transfer of cells to a patient with the goal of transferring the functionality and characteristics into the new host by engraftment of the cells (see, e.g., Mettananda et al., Editing an α-globin enhancer in primary human hematopoietic stem cells as a treatment for β-thalassemia, Nat Commun. 2017 Sep. 4; 8(1):424). As used herein, the term “engraft” or “engraftment” refers to the process of cell incorporation into a tissue of interest in vivo through contact with existing cells of the tissue. Adoptive cell therapy (ACT) can refer to the transfer of cells, most commonly immune-derived cells, back into the same patient or into a new recipient host with the goal of transferring the immunologic functionality and characteristics into the new host. If possible, use of autologous cells helps the recipient by minimizing GVHD issues. The adoptive transfer of autologous tumor infiltrating lymphocytes (TIL) (Zacharakis et al., (2018) Nat Med. 2018 June; 24(6):724-730; Besser et al., (2010) Clin. Cancer Res 16 (9) 2646-55; Dudley et al., (2002) Science 298 (5594): 850-4; and Dudley et al., (2005) Journal of Clinical Oncology 23 (10): 2346-57.) or genetically re-directed peripheral blood mononuclear cells (Johnson et al., (2009) Blood 114 (3): 535-46; and Morgan et al., (2006) Science 314(5796) 126-9) has been used to successfully treat patients with advanced solid tumors, including melanoma, metastatic breast cancer and colorectal carcinoma, as well as patients with CD19-expressing hematologic malignancies (Kalos et al., (2011) Science Translational Medicine 3 (95): 95ra73). In one embodiment, allogenic cells immune cells are transferred (see, e.g., Ren et al., (2017) Clin Cancer Res 23 (9) 2255-2266). As described further herein, allogenic cells can be edited to reduce alloreactivity and prevent graft-versus-host disease. Thus, use of allogenic cells allows for cells to be obtained from healthy donors and prepared for use in patients as opposed to preparing autologous cells from a patient after diagnosis.

[0793] Aspects of the invention involve the adoptive transfer of immune system cells, such as T cells, specific for selected antigens, such as tumor associated antigens or tumor specific neoantigens (see, e.g., Maus et al., 2014, Adoptive Immunotherapy for Cancer or Viruses, Annual Review of Immunology, Vol. 32: 189-225; Rosenberg and Restifo, 2015, Adoptive cell transfer as personalized immunotherapy for human cancer, Science Vol. 348 no. 6230 pp. 62-68; Restifo et al., 2015, Adoptive immunotherapy for cancer: harnessing the T cell response. Nat. Rev. Immunol. 12(4): 269-281; and Jenson and Riddell, 2014, Design and implementation of adoptive therapy with chimeric antigen receptor-modified T cells. Immunol Rev. 257(1): 127-144; and Rajasagi et al., 2014, Systematic identification of personal tumor-specific neoantigens in chronic lymphocytic leukemia. Blood. 2014 Jul. 17; 124(3):453-62).

[0794] In one embodiment, an antigen (such as a tumor antigen) to be targeted in adoptive cell therapy (such as particularly CAR or TCR T-cell therapy) of a disease (such as particularly of tumor or cancer) may be selected from a group consisting of: MR1 (see, e.g., Crowther, et al., 2020, Genome-wide CRISPR-Cas9 screening reveals ubiquitous T cell cancer targeting via the monomorphic MHC class I-related protein MR1, Nature Immunology volume 21, pages 178-185), B cell maturation antigen (BCMA) (see, e.g., Friedman et al., Effective Targeting of Multiple BCMA-Expressing Hematological Malignancies by Anti-BCMA CAR T Cells, Hum Gene Ther. 2018 Mar. 8; Berdeja J G, et al. Durable clinical responses in heavily pretreated patients with relapsed/refractory multiple myeloma: updated results from a multicenter study of bb2121 anti-Bcma CAR T cell therapy. Blood. 2017; 130:740; and Mouhieddine and Ghobrial, Immunotherapy in Multiple Myeloma: The Era of CAR T Cell Therapy, Hematologist, May-June 2018, Volume 15, issue 3); PSA (prostate-specific antigen); prostate-specific membrane antigen (PSMA); PSCA (Prostate stem cell antigen); Tyrosine-protein kinase transmembrane receptor ROR1; fibroblast activation protein (FAP); Tumor-associated glycoprotein 72 (TAG72); Carcinoembryonic antigen (CEA); Epithelial cell adhesion molecule (EPCAM); Mesothelin; Human Epidermal growth factor Receptor 2 (ERBB2 (Her2/neu)); Prostase; Prostatic acid phosphatase (PAP); elongation factor 2 mutant (ELF2M); Insulin-like growth factor 1 receptor (IGF-1R); gplOO; BCR-ABL (breakpoint cluster region-Abelson); tyrosinase; New York esophageal squamous cell carcinoma 1 (NY-ESO-1); κ-light chain, LAGE (L antigen); MAGE (melanoma antigen); Melanoma-associated antigen 1 (MAGE-A1); MAGE A3; MAGE A6; legumain; Human papillomavirus (HPV) E6; HPV E7; prostein; survivin; PCTA1 (Galectin 8); Melan-A/MART-1; Ras mutant; TRP-1 (tyrosinase related protein 1, or gp75); Tyrosinase-related Protein 2 (TRP2); TRP-2/INT2 (TRP-2/intron 2); RAGE (renal antigen); receptor for advanced glycation end products 1 (RAGE1); Renal ubiquitous 1, 2 (RU1, RU2); intestinal carboxyl esterase (iCE); Heat shock protein 70-2 (HSP70-2) mutant; thyroid stimulating hormone receptor (TSHR); CD123; CD171; CD19; CD20; CD22; CD26; CD30; CD33; CD44v7/8 (cluster of differentiation 44, exons 7/8); CD53; CD92; CD100; CD148; CD150; CD200; CD261; CD262; CD362; CS-1 (CD2 subset 1, CRACC, SLAMF7, CD319, and 19A24); C-type lectin-like molecule-1 (CLL-1); ganglioside GD3 (aNeu5Ac(2-8)aNeu5Ac(2-3)bDGalp(1-4)bDGlcp(1-1)Cer); Tn antigen (Tn Ag); Fms-Like Tyrosine Kinase 3 (FLT3); CD38; CD138; CD44v6; B7H3 (CD276); KIT (CD117); Interleukin-13 receptor subunit alpha-2 (IL-13Ra2); Interleukin 11 receptor alpha (IL-11Ra); prostate stem cell antigen (PSCA); Protease Serine 21 (PRSS21); vascular endothelial growth factor receptor 2 (VEGFR2); Lewis(Y) antigen; CD24; Platelet-derived growth factor receptor beta (PDGFR-beta); stage-specific embryonic antigen-4 (SSEA-4); Mucin 1, cell surface associated (MUC1); mucin 16 (MUC16); epidermal growth factor receptor (EGFR); epidermal growth factor receptor variant III (EGFRvIII); neural cell adhesion molecule (NCAM); carbonic anhydrase IX (CAIX); Proteasome (Prosome, Macropain) Subunit, Beta Type, 9 (LMP2); ephrin type-A receptor 2 (EphA2); Ephrin B2; Fucosyl GM1; sialyl Lewis adhesion molecule (sLe); ganglioside GM3 (aNeu5Ac(2-3)bDGalp(1-4)bDGlcp(1-1)Cer); TGS5; high molecular weight-melanoma-associated antigen (HMWMAA); o-acetyl-GD2 ganglioside (OAcGD2); Folate receptor alpha; Folate receptor beta; tumor endothelial marker 1 (TEM1/CD248); tumor endothelial marker 7-related (TEM7R); claudin 6 (CLDN6); G protein-coupled receptor class C group 5, member D (GPRC5D); chromosome X open reading frame 61 (CXORF61); CD97; CD179a; anaplastic lymphoma kinase (ALK); Polysialic acid; placenta-specific 1 (PLAC1); hexasaccharide portion of globoH glycoceramide (GloboH); mammary gland differentiation antigen (NY-BR-1); uroplakin 2 (UPK2); Hepatitis A virus cellular receptor 1 (HAVCR1); adrenoceptor beta 3 (ADRB3); pannexin 3 (PANX3); G protein-coupled receptor 20 (GPR20); lymphocyte antigen 6 complex, locus K 9 (LY6K); Olfactory receptor 51E2 (OR51E2); TCR Gamma Alternate Reading Frame Protein (TARP); Wilms tumor protein (WT1); ETS translocation-variant gene 6, located on chromosome 12p (ETV6-AML); sperm protein 17 (SPA17); X Antigen Family, Member 1A (XAGE1); angiopoietin-binding cell surface receptor 2 (Tie 2); CT (cancer/testis (antigen)); melanoma cancer testis antigen-1 (MAD-CT-1); melanoma cancer testis antigen-2 (MAD-CT-2); Fos-related antigen 1; p53; p53 mutant; human Telomerase reverse transcriptase (hTERT); sarcoma translocation breakpoints; melanoma inhibitor of apoptosis (ML-IAP); ERG (transmembrane protease, serine 2 (TMPRSS2) ETS fusion gene); N-Acetyl glucosaminyl-transferase V (NA17); paired box protein Pax-3 (PAX3); Androgen receptor; Cyclin B1; Cyclin D1; v-myc avian myelocytomatosis viral oncogene neuroblastoma derived homolog (MYCN); Ras Homolog Family Member C (RhoC); Cytochrome P450 1B1 (CYP1B1); CCCTC-Binding Factor (Zinc Finger Protein)-Like (BORIS); Squamous Cell Carcinoma Antigen Recognized By T Cells-1 or 3 (SART1, SART3); Paired box protein Pax-5 (PAX5); proacrosin binding protein sp32 (OY-TES1); lymphocyte-specific protein tyrosine kinase (LCK); A kinase anchor protein 4 (AKAP-4); synovial sarcoma, X breakpoint-1, -2, -3 or -4 (SSX1, SSX2, SSX3, SSX4); CD79a; CD79b; CD72; Leukocyte-associated immunoglobulin-like receptor 1 (LAIR1); Fc fragment of IgA receptor (FCAR); Leukocyte immunoglobulin-like receptor subfamily A member 2 (LILRA2); CD300 molecule-like family member f (CD300LF); C-type lectin domain family 12 member A (CLEC12A); bone marrow stromal cell antigen 2 (BST2); EGF-like module-containing mucin-like hormone receptor-like 2 (EMR2); lymphocyte antigen 75 (LY75); Glypican-3 (GPC3); Fc receptor-like 5 (FCRL5); mouse double minute 2 homolog (MDM2); livin; alphafetoprotein (AFP); transmembrane activator and CAML Interactor (TACI); B-cell activating factor receptor (BAFF-R); V-Ki-ras2 Kirsten rat sarcoma viral oncogene homolog (KRAS); immunoglobulin lambda-like polypeptide 1 (IGLL1); 707-AP (707 alanine proline); ART-4 (adenocarcinoma antigen recognized by T4 cells); BAGE (B antigen; b-catenin/m, b-catenin/mutated); CAMEL (CTL-recognized antigen on melanoma); CAP1 (carcinoembryonic antigen peptide 1); CASP-8 (caspase-8); CDC27m (cell-division cycle 27 mutated); CDK4/m (cycline-dependent kinase 4 mutated); Cyp-B (cyclophilin B); DAM (differentiation antigen melanoma); EGP-2 (epithelial glycoprotein 2); EGP-40 (epithelial glycoprotein 40); Erbb2, 3, 4 (erythroblastic leukemia viral oncogene homolog-2, -3, 4); FBP (folate binding protein); fAchR (Fetal acetylcholine receptor); G250 (glycoprotein 250); GAGE (G antigen); GnT-V (N-acetylglucosaminyltransferase V); HAGE (helicose antigen); ULA-A (human leukocyte antigen-A); HST2 (human signet ring tumor 2); KIAA0205; KDR (kinase insert domain receptor); LDLR/FUT (low density lipid receptor/GDP L-fucose: b-D-galactosidase 2-a-L fucosyltransferase); L1CAM (L1 cell adhesion molecule); MC1R (melanocortin 1 receptor); Myosin/m (myosin mutated); MUM-1, -2, -3 (melanoma ubiquitous mutated 1, 2, 3); NA88-A (NA cDNA clone of patient M88); KG2D (Natural killer group 2, member D) ligands; oncofetal antigen (h5T4); p190 minor bcr-abl (protein of 190 KD bcr-abl); Pml/RARa (promyelocytic leukemia/retinoic acid receptor a); PRAME (preferentially expressed antigen of melanoma); SAGE (sarcoma antigen); TEL/AML I (translocation Ets-family leukemia/acute myeloid leukemia 1); TPI/m (triosephosphate isomerase mutated); CD70; and any combination thereof.

[0795] In one embodiment, an antigen to be targeted in adoptive cell therapy (such as particularly CAR or TCR T-cell therapy) of a disease (such as particularly of tumor or cancer) is a tumor-specific antigen (TSA).

[0796] In one embodiment, an antigen to be targeted in adoptive cell therapy (such as particularly CAR or TCR T-cell therapy) of a disease (such as particularly of tumor or cancer) is a neoantigen.

[0797] In one embodiment, an antigen to be targeted in adoptive cell therapy (such as particularly CAR or TCR T-cell therapy) of a disease (such as particularly of tumor or cancer) is a tumor-associated antigen (TAA).

[0798] In one embodiment, an antigen to be targeted in adoptive cell therapy (such as particularly CAR or TCR T-cell therapy) of a disease (such as particularly of tumor or cancer) is a universal tumor antigen. In certain preferred embodiments, the universal tumor antigen is selected from the group consisting of: a human telomerase reverse transcriptase (hTERT), survivin, mouse double minute 2 homolog (MDM2), cytochrome P450 1B 1 (CYP1B), HER2/neu, Wilms' tumor gene 1 (WT1), livin, alphafetoprotein (AFP), carcinoembryonic antigen (CEA), mucin 16 (MUC16), MUC1, prostate-specific membrane antigen (PSMA), p53, cyclin (Dl), and any combinations thereof.

[0799] In one embodiment, an antigen (such as a tumor antigen) to be targeted in adoptive cell therapy (such as particularly CAR or TCR T-cell therapy) of a disease (such as particularly of tumor or cancer) may be selected from a group consisting of: CD19, BCMA, CD70, CLL-1, MAGE A3, MAGE A6, HPV E6, HPV E7, WT1, CD22, CD171, ROR1, MUC16, and SSX2. In certain preferred embodiments, the antigen may be CD19. For example, CD19 may be targeted in hematologic malignancies, such as in lymphomas, more particularly in B-cell lymphomas, such as without limitation in diffuse large B-cell lymphoma, primary mediastinal b-cell lymphoma, transformed follicular lymphoma, marginal zone lymphoma, mantle cell lymphoma, acute lymphoblastic leukemia including adult and pediatric ALL, non-Hodgkin lymphoma, indolent non-Hodgkin lymphoma, or chronic lymphocytic leukemia. For example, BCMA may be targeted in multiple myeloma or plasma cell leukemia (see, e.g., 2018 American Association for Cancer Research (AACR) Annual meeting Poster: Allogeneic Chimeric Antigen Receptor T Cells Targeting B Cell Maturation Antigen). For example, CLL1 may be targeted in acute myeloid leukemia. For example, MAGE A3, MAGE A6, SSX2, and/or KRAS may be targeted in solid tumors. For example, HPV E6 and/or HPV E7 may be targeted in cervical cancer or head and neck cancer. For example, WT1 may be targeted in acute myeloid leukemia (AML), myelodysplastic syndromes (MDS), chronic myeloid leukemia (CML), non-small cell lung cancer, breast, pancreatic, ovarian or colorectal cancers, or mesothelioma. For example, CD22 may be targeted in B cell malignancies, including non-Hodgkin lymphoma, diffuse large B-cell lymphoma, or acute lymphoblastic leukemia. For example, CD171 may be targeted in neuroblastoma, glioblastoma, or lung, pancreatic, or ovarian cancers. For example, ROR1 may be targeted in ROR1+ malignancies, including non-small cell lung cancer, triple negative breast cancer, pancreatic cancer, prostate cancer, ALL, chronic lymphocytic leukemia, or mantle cell lymphoma. For example, MUC16 may be targeted in MUC16ecto+ epithelial ovarian, fallopian tube or primary peritoneal cancer. For example, CD70 may be targeted in both hematologic malignancies as well as in solid cancers such as renal cell carcinoma (RCC), gliomas (e.g., GBM), and head and neck cancers (HNSCC). CD70 is expressed in both hematologic malignancies as well as in solid cancers, while its expression in normal tissues is restricted to a subset of lymphoid cell types (see, e.g., 2018 American Association for Cancer Research (AACR) Annual meeting Poster: Allogeneic CRISPR Engineered Anti-CD70 CAR-T Cells Demonstrate Potent Preclinical Activity Against Both Solid and Hematological Cancer Cells).

[0800] Various strategies may for example be employed to genetically modify T cells by altering the specificity of the T cell receptor (TCR) for example by introducing new TCR a and 3 chains with selected peptide specificity (see U.S. Pat. No. 8,697,854; PCT Patent Publications: WO2003020763, WO2004033685, WO2004044004, WO2005114215, WO2006000830, WO2008038002, WO2008039818, WO2004074322, WO2005113595, WO2006125962, WO2013166321, WO2013039889, WO2014018863, WO2014083173; U.S. Pat. No. 8,088,379).

[0801] As an alternative to, or addition to, TCR modifications, chimeric antigen receptors (CARs) may be used in order to generate immunoresponsive cells, such as T cells, specific for selected targets, such as malignant cells, with a wide variety of receptor chimera constructs having been described (see U.S. Pat. Nos. 5,843,728; 5,851,828; 5,912,170; 6,004,811; 6,284,240; 6,392,013; 6,410,014; 6,753,162; 8,211,422; and, PCT Publication WO 9215322).

[0802] In general, CARs are comprised of an extracellular domain, a transmembrane domain, and an intracellular domain, wherein the extracellular domain comprises an antigen-binding domain that is specific for a predetermined target. While the antigen-binding domain of a CAR is often an antibody or antibody fragment (e.g., a single chain variable fragment, scFv), the binding domain is not particularly limited so long as it results in specific recognition of a target. For example, in one embodiment, the antigen-binding domain may comprise a receptor, such that the CAR is capable of binding to the ligand of the receptor. Alternatively, the antigen-binding domain may comprise a ligand, such that the CAR is capable of binding the endogenous receptor of that ligand.

[0803] The antigen-binding domain of a CAR is generally separated from the transmembrane domain by a hinge or spacer. The spacer is also not particularly limited, and it is designed to provide the CAR with flexibility. For example, a spacer domain may comprise a portion of a human Fc domain, including a portion of the CH3 domain, or the hinge region of any immunoglobulin, such as IgA, IgD, IgE, IgG, or IgM, or variants thereof. Furthermore, the hinge region may be modified so as to prevent off-target binding by FcRs or other potential interfering objects. For example, the hinge may comprise an IgG4 Fc domain with or without a S228P, L235E, and/or N297Q mutation (according to Kabat numbering) in order to decrease binding to FcRs. Additional spacers/hinges include, but are not limited to, CD4, CD8, and CD28 hinge regions.

[0804] The transmembrane domain of a CAR may be derived either from a natural or from a synthetic source. Where the source is natural, the domain may be derived from any membrane bound or transmembrane protein. Transmembrane regions of particular use in this disclosure may be derived from CD8, CD28, CD3, CD45, CD4, CD5, CDS, CD9, CD 16, CD22, CD33, CD37, CD64, CD80, CD86, CD 134, CD137, CD 154, TCR. Alternatively, the transmembrane domain may be synthetic, in which case it will comprise predominantly hydrophobic residues such as leucine and valine. Preferably a triplet of phenylalanine, tryptophan and valine will be found at each end of a synthetic transmembrane domain. Optionally, a short oligo- or polypeptide linker, preferably between 2 and 10 amino acids in length may form the linkage between the transmembrane domain and the cytoplasmic signaling domain of the CAR. A glycine-serine doublet provides a particularly suitable linker.

[0805] Alternative CAR constructs may be characterized as belonging to successive generations. First-generation CARs typically consist of a single-chain variable fragment of an antibody specific for an antigen, for example comprising a VL linked to a VH of a specific antibody, linked by a flexible linker, for example by a CD8a hinge domain and a CD8a transmembrane domain, to the transmembrane and intracellular signaling domains of either CD3ζ or FcRγ (scFv-CD3ζ or scFv-FcRγ; see U.S. Pat. Nos. 7,741,465; 5,912,172; 5,906,936). Second-generation CARs incorporate the intracellular domains of one or more costimulatory molecules, such as CD28, OX40 (CD134), or 4-1BB (CD137) within the endodomain (for example scFv-CD28/OX40/4-1BB-CD3ζ; see U.S. Pat. Nos. 8,911,993; 8,916,381; 8,975,071; 9,101,584; 9,102,760; 9,102,761). Third-generation CARs include a combination of costimulatory endodomains, such a CD3ζ-chain, CD97, GDI 1a-CD18, CD2, ICOS, CD27, CD154, CDS, OX40, 4-1BB, CD2, CD7, LIGHT, LFA-1, NKG2C, B7-H3, CD30, CD40, PD-1, or CD28 signaling domains (for example scFv-CD28-4-1BB-CD3ζ or scFv-CD28-OX40-CD3ζ; see U.S. Pat. Nos. 8,906,682; 8,399,645; 5,686,281; PCT Publication No. WO 2014/134165; PCT Publication No. WO 2012/079000). In one embodiment, the primary signaling domain comprises a functional signaling domain of a protein selected from the group consisting of CD3 zeta, CD3 gamma, CD3 delta, CD3 epsilon, common FcR gamma (FCERIG), FcR beta (Fc Epsilon R1b), CD79a, CD79b, Fc gamma RIIa, DAP10, and DAP12. In certain preferred embodiments, the primary signaling domain comprises a functional signaling domain of CD3ζ or FcRγ. In one embodiment, the one or more costimulatory signaling domains comprise a functional signaling domain of a protein selected, each independently, from the group consisting of: CD27, CD28, 4-1BB (CD137), OX40, CD30, CD40, PD-1, ICOS, lymphocyte function-associated antigen-1 (LFA-1), CD2, CD7, LIGHT, NKG2C, B7-H3, a ligand that specifically binds with CD83, CDS, ICAM-1, GITR, BAFFR, HVEM (LIGHTR), SLAMF7, NKp80 (KLRF1), CD160, CD19, CD4, CD8 alpha, CD8 beta, IL2R beta, IL2R gamma, IL7R alpha, ITGA4, VLA1, CD49a, ITGA4, IA4, CD49D, ITGA6, VLA-6, CD49f, ITGAD, CD11d, ITGAE, CD103, ITGAL, CD11a, LFA-1, ITGAM, CD11b, ITGAX, CD11c, ITGB1, CD29, ITGB2, CD18, ITGB7, TNFR2, TRANCE/RANKL, DNAM1 (CD226), SLAMF4 (CD244, 2B4), CD84, CD96 (Tactile), CEACAM1, CRTAM, Ly9 (CD229), CD160 (BY55), PSGL1, CD100 (SEMA4D), CD69, SLAMF6 (NTB-A, Ly108), SLAM (SLAMF1, CD150, IPO-3), BLAME (SLAMF8), SELPLG (CD162), LTBR, LAT, GADS, SLP-76, PAG/Cbp, NKp44, NKp30, NKp46, and NKG2D. In one embodiment, the one or more costimulatory signaling domains comprise a functional signaling domain of a protein selected, each independently, from the group consisting of: 4-1BB, CD27, and CD28. In one embodiment, a chimeric antigen receptor may have the design as described in U.S. Pat. No. 7,446,190, comprising an intracellular domain of CD3ζ chain (such as amino acid residues 52-163 of the human CD3 zeta chain, as shown in SEQ ID NO: 14 of U.S. Pat. No. 7,446,190), a signaling region from CD28 and an antigen-binding element (or portion or domain; such as scFv). The CD28 portion, when between the zeta chain portion and the antigen-binding element, may suitably include the transmembrane and signaling domains of CD28 (such as amino acid residues 114-220 of SEQ ID NO: 10, full sequence shown in SEQ ID NO: 6 of U.S. Pat. No. 7,446,190; these can include the following portion of CD28 as set forth in Genbank identifier NM_006139. Alternatively, when the zeta sequence lies between the CD28 sequence and the antigen-binding element, intracellular domain of CD28 can be used alone (such as amino sequence set forth in SEQ ID NO: 9 of U.S. Pat. No. 7,446,190). Hence, certain embodiments employ a CAR comprising (a) a zeta chain portion comprising the intracellular domain of human CD3ζ chain, (b) a costimulatory signaling region, and (c) an antigen-binding element (or portion or domain), wherein the costimulatory signaling region comprises the amino acid sequence encoded by SEQ ID NO: 6 of U.S. Pat. No. 7,446,190.

[0806] Alternatively, costimulation may be orchestrated by expressing CARs in antigen-specific T cells, chosen so as to be activated and expanded following engagement of their native αβTCR, for example by antigen on professional antigen-presenting cells, with attendant costimulation. In addition, additional engineered receptors may be provided on the immunoresponsive cells, for example to improve targeting of a T-cell attack and/or minimize side effects.

[0807] By means of an example and without limitation, Kochenderfer et al., (2009) J Immunother. 32 (7): 689-702 described anti-CD19 chimeric antigen receptors (CAR). FMC63-28Z CAR contained a single chain variable region moiety (scFv) recognizing CD19 derived from the FMC63 mouse hybridoma (described in Nicholson et al., (1997) Molecular Immunology 34: 1157-1165), a portion of the human CD28 molecule, and the intracellular component of the human TCR-ζ molecule. FMC63-CD828BBZ CAR contained the FMC63 scFv, the hinge and transmembrane regions of the CD8 molecule, the cytoplasmic portions of CD28 and 4-1BB, and the cytoplasmic component of the TCR-ζ molecule. The exact sequence of the CD28 molecule included in the FMC63-28Z CAR corresponded to Genbank identifier NM_006139; the sequence included all amino acids starting with the amino acid sequence IEVMYPPPY (SEQ ID NO: 560). and continuing all the way to the carboxy-terminus of the protein. To encode the anti-CD19 scFv component of the vector, the authors designed a DNA sequence which was based on a portion of a previously published CAR (Cooper et al., (2003) Blood 101: 1637-1644). This sequence encoded the following components in frame from the 5′ end to the 3′ end: an XhoI site, the human granulocyte-macrophage colony-stimulating factor (GM-CSF) receptor α-chain signal sequence, the FMC63 light chain variable region (as in Nicholson et al., supra), a linker peptide (as in Cooper et al., supra), the FMC63 heavy chain variable region (as in Nicholson et al., supra), and a NotI site. A plasmid encoding this sequence was digested with XhoI and NotI. To form the MSGV-FMC63-28Z retroviral vector, the XhoI and NotI-digested fragment encoding the FMC63 scFv was ligated into a second XhoI and NotI-digested fragment that encoded the MSGV retroviral backbone (as in Hughes et al., (2005) Human Gene Therapy 16: 457-472) as well as part of the extracellular portion of human CD28, the entire transmembrane and cytoplasmic portion of human CD28, and the cytoplasmic portion of the human TCR-ζ molecule (as in Maher et al., 2002) Nature Biotechnology 20: 70-75). The FMC63-28Z CAR is included in the KTE-C19 (axicabtagene ciloleucel) anti-CD19 CAR-T therapy product in development by Kite Pharma, Inc. for the treatment of inter alia patients with relapsed/refractory aggressive B-cell non-Hodgkin lymphoma (NHL). Accordingly, In one embodiment, cells intended for adoptive cell therapies, more particularly immunoresponsive cells such as T cells, may express the FMC63-28Z CAR as described by Kochenderfer et al. (supra). Hence, in one embodiment, cells intended for adoptive cell therapies, more particularly immunoresponsive cells such as T cells, may comprise a CAR comprising an extracellular antigen-binding element (or portion or domain; such as scFv) that specifically binds to an antigen, an intracellular signaling domain comprising an intracellular domain of a CD3ζ chain, and a costimulatory signaling region comprising a signaling domain of CD28. Preferably, the CD28 amino acid sequence is as set forth in Genbank identifier NM_006139 (sequence version 1, 2 or 3) starting with the amino acid sequence IEVMYPPPY (SEQ ID NO: 560) and continuing all the way to the carboxy-terminus of the protein. Preferably, the antigen is CD19, more preferably the antigen-binding element is an anti-CD19 scFv, even more preferably the anti-CD19 scFv as described by Kochenderfer et al. (supra).

[0808] Additional anti-CD19 CARs are further described in International Patent Publication No. WO 2015/187528. More particularly Example 1 and Table 1 of WO2015187528, incorporated by reference herein, demonstrate the generation of anti-CD19 CARs based on a fully human anti-CD19 monoclonal antibody (47G4, as described in US20100104509) and murine anti-CD19 monoclonal antibody (as described in Nicholson et al. and explained above). Various combinations of a signal sequence (human CD8-alpha or GM-CSF receptor), extracellular and transmembrane regions (human CD8-alpha) and intracellular T-cell signaling domains (CD28-CD3ζ; 4-1BB-CD3ζ; CD27-CD3ζ; CD28-CD27-CD3ζ, 4-1BB-CD27-CD3ζ; CD27-4-1BB-CD3ζ; CD28-CD27-FcεRI gamma chain; or CD28-FcεRI gamma chain) were disclosed. Hence, in one embodiment, cells intended for adoptive cell therapies, more particularly immunoresponsive cells such as T cells, may comprise a CAR comprising an extracellular antigen-binding element that specifically binds to an antigen, an extracellular and transmembrane region as set forth in Table 1 of WO2015187528 and an intracellular T-cell signaling domain as set forth in Table 1 of International Application No. WO 2015/187528. Preferably, the antigen is CD19, more preferably the antigen-binding element is an anti-CD19 scFv, even more preferably the mouse or human anti-CD19 scFv as described in Example 1 of WO 2015/187528. In one embodiment, the CAR comprises, consists essentially of or consists of an amino acid sequence of SEQ ID NO: 1, SEQ ID NO: 2, SEQ ID NO: 3, SEQ ID NO: 4, SEQ ID NO: 5, SEQ ID NO: 6, SEQ ID NO: 7, SEQ ID NO: 8, SEQ ID NO: 9, SEQ ID NO: 10, SEQ ID NO: 11, SEQ ID NO: 12, or SEQ ID NO: 13 as set forth in Table 1 of WO2015187528.

[0809] By means of an example and without limitation, chimeric antigen receptor that recognizes the CD70 antigen is described in WO2012058460A2 (see also, Park et al., CD70 as a target for chimeric antigen receptor T cells in head and neck squamous cell carcinoma, Oral Oncol. 2018 March; 78:145-150; and Jin et al., CD70, a novel target of CAR T-cell therapy for gliomas, Neuro Oncol. 2018 Jan. 10; 20(1):55-65). CD70 is expressed by diffuse large B-cell and follicular lymphoma and also by the malignant cells of Hodgkins lymphoma, Waldenstrom's macroglobulinemia and multiple myeloma, and by HTLV-1- and EBV-associated malignancies. (Agathanggelou et al. Am. J. Pathol. 1995; 147: 1152-1160; Hunter et al., Blood 2004; 104:4881. 26; Lens et al., J Immunol. 2005; 174:6212-6219; Baba et al., J Virol. 2008; 82:3843-3852.) In addition, CD70 is expressed by non-hematological malignancies such as renal cell carcinoma and glioblastoma. (Junker et al., J Urol. 2005; 173:2150-2153; Chahlavi et al., Cancer Res 2005; 65:5428-5438) Physiologically, CD70 expression is transient and restricted to a subset of highly activated T, B, and dendritic cells.

[0810] By means of an example and without limitation, chimeric antigen receptor that recognizes BCMA has been described (see, e.g., US20160046724A1; WO2016014789A2; WO2017211900A1; WO2015158671A1; US20180085444A1; WO2018028647A1; US20170283504A1; and WO2013154760A1).

[0811] In one embodiment, the immune cell may, in addition to a CAR or exogenous TCR as described herein, further comprise a chimeric inhibitory receptor (inhibitory CAR) that specifically binds to a second target antigen and is capable of inducing an inhibitory or immunosuppressive or repressive signal to the cell upon recognition of the second target antigen. In one embodiment, the chimeric inhibitory receptor comprises an extracellular antigen-binding element (or portion or domain) configured to specifically bind to a target antigen, a transmembrane domain, and an intracellular immunosuppressive or repressive signaling domain. In one embodiment, the second target antigen is an antigen that is not expressed on the surface of a cancer cell or infected cell or the expression of which is downregulated on a cancer cell or an infected cell. In one embodiment, the second target antigen is an MHC-class I molecule. In one embodiment, the intracellular signaling domain comprises a functional signaling portion of an immune checkpoint molecule, such as for example PD-1 or CTLA4. Advantageously, the inclusion of such inhibitory CAR reduces the chance of the engineered immune cells attacking non-target (e.g., non-cancer) tissues.

[0812] Alternatively, T-cells expressing CARs may be further modified to reduce or eliminate expression of endogenous TCRs in order to reduce off-target effects. Reduction or elimination of endogenous TCRs can reduce off-target effects and increase the effectiveness of the T cells (U.S. Pat. No. 9,181,527). T cells stably lacking expression of a functional TCR may be produced using a variety of approaches. T cells internalize, sort, and degrade the entire T cell receptor as a complex, with a half-life of about 10 hours in resting T cells and 3 hours in stimulated T cells (von Essen, M. et al. 2004. J. Immunol. 173:384-393). Proper functioning of the TCR complex requires the proper stoichiometric ratio of the proteins that compose the TCR complex. TCR function also requires two functioning TCR zeta proteins with ITAM motifs. The activation of the TCR upon engagement of its MHC-peptide ligand requires the engagement of several TCRs on the same T cell, which all must signal properly. Thus, if a TCR complex is destabilized with proteins that do not associate properly or cannot signal optimally, the T cell will not become activated sufficiently to begin a cellular response.

[0813] Accordingly, in one embodiment, TCR expression may eliminated using RNA interference (e.g., snucleic acid component, siRNA, miRNA, etc.), Fanzor polypeptide, or other methods that target the nucleic acids encoding specific TCRs (e.g., TCR-α and TCR-β) and/or CD3 chains in primary T cells. By blocking expression of one or more of these proteins, the T cell will no longer produce one or more of the key components of the TCR complex, thereby destabilizing the TCR complex and preventing cell surface expression of a functional TCR.

[0814] In some instances, CAR may also comprise a switch mechanism for controlling expression and/or activation of the CAR. For example, a CAR may comprise an extracellular, transmembrane, and intracellular domain, in which the extracellular domain comprises a target-specific binding element that comprises a label, binding domain, or tag that is specific for a molecule other than the target antigen that is expressed on or by a target cell. In such embodiments, the specificity of the CAR is provided by a second construct that comprises a target antigen binding domain (e.g., an scFv or a bispecific antibody that is specific for both the target antigen and the label or tag on the CAR) and a domain that is recognized by or binds to the label, binding domain, or tag on the CAR. See, e.g., WO 2013/044225, WO 2016/000304, WO 2015/057834, WO 2015/057852, WO 2016/070061, U.S. Pat. No. 9,233,125, US 2016/0129109. In this way, a T-cell that expresses the CAR can be administered to a subject, but the CAR cannot bind its target antigen until the second composition comprising an antigen-specific binding domain is administered.

[0815] Alternative switch mechanisms include CARs that require multimerization in order to activate their signaling function (see, e.g., US Patent Publication Nos. US 2015/0368342, US 2016/0175359, US 2015/0368360) and/or an exogenous signal, such as a small molecule drug (US 2016/0166613, Yung et al., Science, 2015), in order to elicit a T-cell response. Some CARs may also comprise a “suicide switch” to induce cell death of the CAR T-cells following treatment (Buddee et al., PLoS One, 2013) or to downregulate expression of the CAR following binding to the target antigen (International Patent Publication No. WO 2016/011210).

[0816] Alternative techniques may be used to transform target immunoresponsive cells, such as protoplast fusion, lipofection, transfection or electroporation. A wide variety of vectors may be used, such as retroviral vectors, lentiviral vectors, adenoviral vectors, adeno-associated viral vectors, plasmids or transposons, such as a Sleeping Beauty transposon (see U.S. Pat. Nos. 6,489,458; 7,148,203; 7,160,682; 7,985,739; 8,227,432), may be used to introduce CARs, for example using 2nd generation antigen-specific CARs signaling through CD3ζ and either CD28 or CD137. Viral vectors may for example include vectors based on HIV, SV40, EBV, HSV or BPV.

[0817] Cells that are targeted for transformation may for example include T cells, Natural Killer (NK) cells, cytotoxic T lymphocytes (CTL), regulatory T cells, human embryonic stem cells, tumor-infiltrating lymphocytes (TIL) or a pluripotent stem cell from which lymphoid cells may be differentiated. T cells expressing a desired CAR may for example be selected through co-culture with γ-irradiated activating and propagating cells (AaPC), which co-express the cancer antigen and co-stimulatory molecules. The engineered CAR T-cells may be expanded, for example by co-culture on AaPC in presence of soluble factors, such as IL-2 and IL-21. This expansion may for example be carried out so as to provide memory CAR+ T cells (which may for example be assayed by non-enzymatic digital array and/or multi-panel flow cytometry). In this way, CAR T cells may be provided that have specific cytotoxic activity against antigen-bearing tumors (optionally in conjunction with production of desired chemokines such as interferon-γ). CAR T cells of this kind may for example be used in animal models, for example to treat tumor xenografts.

[0818] In one embodiment, ACT includes co-transferring CD4+ Th1 cells and CD8+ CTLs to induce a synergistic antitumor response (see, e.g., Li et al., Adoptive cell therapy with CD4+ T helper 1 cells and CD8+ cytotoxic T cells enhances complete rejection of an established tumor, leading to generation of endogenous memory responses to non-targeted tumor epitopes. Clin Transl Immunology. 2017 October; 6(10): e160).

[0819] In one embodiment, Th17 cells are transferred to a subject in need thereof. Th17 cells have been reported to directly eradicate melanoma tumors in mice to a greater extent than Th1 cells (Muranski P, et al., Tumor-specific Th17-polarized cells eradicate large established melanoma. Blood. 2008 Jul. 15; 112(2):362-73; and Martin-Orozco N, et al., T helper 17 cells promote cytotoxic T cell activation in tumor immunity. Immunity. 2009 Nov. 20; 31(5):787-98). Those studies involved an adoptive T cell transfer (ACT) therapy approach, which takes advantage of CD4+ T cells that express a TCR recognizing tyrosinase tumor antigen. Exploitation of the TCR leads to rapid expansion of Th17 populations to large numbers ex vivo for reinfusion into the autologous tumor-bearing hosts.

[0820] In one embodiment, ACT may include autologous iPSC-based vaccines, such as irradiated iPSCs in autologous anti-tumor vaccines (see e.g., Kooreman, Nigel G. et al., Autologous iPSC-Based Vaccines Elicit Anti-tumor Responses In Vivo, Cell Stem Cell 22, 1-13, 2018, doi.org/10.1016/j.stem.2018.01.016).

[0821] Unlike T-cell receptors (TCRs) that are MHC restricted, CARs can potentially bind any cell surface-expressed antigen and can thus be more universally used to treat patients (see Irving et al., Engineering Chimeric Antigen Receptor T-Cells for Racing in Solid Tumors: Don't Forget the Fuel, Front. Immunol., 3 Apr. 2017, doi.org/10.3389/fimmu.2017.00267). In one embodiment, in the absence of endogenous T-cell infiltrate (e.g., due to aberrant antigen processing and presentation), which precludes the use of TIL therapy and immune checkpoint blockade, the transfer of CAR T-cells may be used to treat patients (see, e.g., Hinrichs C S, Rosenberg S A. Exploiting the curative potential of adoptive T-cell therapy for cancer. Immunol Rev (2014) 257(1):56-71. doi:10.1111/imr.12132).

[0822] Approaches such as the foregoing may be adapted to provide methods of treating and/or increasing survival of a subject having a disease, such as a neoplasia, for example by administering an effective amount of an immunoresponsive cell comprising an antigen recognizing receptor that binds a selected antigen, wherein the binding activates the immunoresponsive cell, thereby treating or preventing the disease (such as a neoplasia, a pathogen infection, an autoimmune disorder, or an allogeneic transplant reaction).

[0823] In one embodiment, the treatment can be administered after lymphodepleting pretreatment in the form of chemotherapy (typically a combination of cyclophosphamide and fludarabine) or radiation therapy. Initial studies in ACT had short lived responses and the transferred cells did not persist in vivo for very long (Houot et al., T-cell-based immunotherapy: adoptive cell transfer and checkpoint inhibition. Cancer Immunol Res (2015) 3(10):1115-22; and Kamta et al., Advancing Cancer Therapy with Present and Emerging Immuno-Oncology Approaches. Front. Oncol. (2017) 7:64). Immune suppressor cells like Tregs and MDSCs may attenuate the activity of transferred cells by outcompeting them for the necessary cytokines. Not being bound by a theory lymphodepleting pretreatment may eliminate the suppressor cells allowing the TILs to persist.

[0824] In one embodiment, the treatment can be administrated into patients undergoing an immunosuppressive treatment (e.g., glucocorticoid treatment). The cells or population of cells may be made resistant to at least one immunosuppressive agent due to the inactivation of a gene encoding a receptor for such immunosuppressive agent. In one embodiment, the immunosuppressive treatment provides for the selection and expansion of the immunoresponsive T cells within the patient.

[0825] In one embodiment, the treatment can be administered before primary treatment (e.g., surgery or radiation therapy) to shrink a tumor before the primary treatment. In another embodiment, the treatment can be administered after primary treatment to remove any remaining cancer cells.

[0826] In one embodiment, immunometabolic barriers can be targeted therapeutically prior to and/or during ACT to enhance responses to ACT or CAR T-cell therapy and to support endogenous immunity (see, e.g., Irving et al., Engineering Chimeric Antigen Receptor T-Cells for Racing in Solid Tumors: Don't Forget the Fuel, Front. Immunol., 3 Apr. 2017, doi.org/10.3389/fimmu.2017.00267).

[0827] The administration of cells or population of cells, such as immune system cells or cell populations, such as more particularly immunoresponsive cells or cell populations, as disclosed herein may be carried out in any convenient manner, including by aerosol inhalation, injection, ingestion, transfusion, implantation or transplantation. The cells or population of cells may be administered to a patient subcutaneously, intradermally, intratumorally, intranodally, intramedullary, intramuscularly, intrathecally, by intravenous or intralymphatic injection, or intraperitoneally. In one embodiment, the disclosed CARS may be delivered or administered into a cavity formed by the resection of tumor tissue (i.e., intracavity delivery) or directly into a tumor prior to resection (i.e., intratumoral delivery). In one embodiment, the cell compositions of the present invention are preferably administered by intravenous injection.

[0828] The administration of the cells or population of cells can consist of the administration of 104-109 cells per kg body weight, preferably 105 to 106 cells/kg body weight including all integer values of cell numbers within those ranges. Dosing in CART cell therapies may for example involve administration of from 106 to 109 cells/kg, with or without a course of lymphodepletion, for example with cyclophosphamide. The cells or population of cells can be administrated in one or more doses. In another embodiment, the effective amount of cells are administrated as a single dose. In another embodiment, the effective amount of cells are administrated as more than one dose over a period time. Timing of administration is within the judgment of managing physician and depends on the clinical condition of the patient. The cells or population of cells may be obtained from any source, such as a blood bank or a donor. While individual needs vary, determination of optimal ranges of effective amounts of a given cell type for a particular disease or conditions are within the skill of one in the art. An effective amount means an amount which provides a therapeutic or prophylactic benefit. The dosage administrated will be dependent upon the age, health and weight of the recipient, kind of concurrent treatment, if any, frequency of treatment and the nature of the effect desired.

[0829] In another embodiment, the effective amount of cells or composition comprising those cells are administrated parenterally. The administration can be an intravenous administration. The administration can be directly done by injection within a tumor.

[0830] To guard against possible adverse reactions, engineered immunoresponsive cells may be equipped with a transgenic safety switch, in the form of a transgene that renders the cells vulnerable to exposure to a specific signal. For example, the herpes simplex viral thymidine kinase (TK) gene may be used in this way, for example by introduction into allogeneic T lymphocytes used as donor lymphocyte infusions following stem cell transplantation (Greco, et al., Improving the safety of cell therapy with the TK-suicide gene. Front. Pharmacol. 2015; 6: 95). In such cells, administration of a nucleoside prodrug such as ganciclovir or acyclovir causes cell death. Alternative safety switch constructs include inducible caspase 9, for example triggered by administration of a small-molecule dimerizer that brings together two nonfunctional icasp9 molecules to form the active enzyme. A wide variety of alternative approaches to implementing cellular proliferation controls have been described (see U.S. Patent Publication No. 20130071414; International Patent Publication WO 2011/146862; International Patent Publication WO 2014/011987; International Patent Publication WO 2013/040371; Zhou et al. BLOOD, 2014, 123/25:3895-3905; Di Stasi et al., The New England Journal of Medicine 2011; 365:1673-1683; Sadelain M, The New England Journal of Medicine 2011; 365:1735-173; Ramos et al., Stem Cells 28(6):1107-15 (2010)).

[0831] In a further refinement of adoptive therapies, genome editing may be used to tailor immunoresponsive cells to alternative implementations, for example providing edited CAR T cells (see Poirot et al., 2015, Multiplex genome edited T-cell manufacturing platform for “off-the-shelf” adoptive T-cell immunotherapies, Cancer Res 75 (18): 3853; Ren et al., 2017, Multiplex genome editing to generate universal CAR T cells resistant to PD1 inhibition, Clin Cancer Res. 2017 May 1; 23(9):2255-2266. doi: 10.1158/1078-0432.CCR-16-1300. Epub 2016 Nov. 4; Qasim et al., 2017, Molecular remission of infant B-ALL after infusion of universal TALEN gene-edited CAR T cells, Sci Transl Med. 2017 Jan. 25; 9(374); Legut, et al., 2018, CRISPR-mediated TCR replacement generates superior anticancer transgenic T cells. Blood, 131(3), 311-322; and Georgiadis et al., Long Terminal Repeat CRISPR-CAR-Coupled “Universal” T Cells Mediate Potent Anti-leukemic Effects, Molecular Therapy, In Press, Corrected Proof, Available online 6 Mar. 2018). Cells may be edited using any CRISPR system and method of use thereof as described herein. The composition and systems may be delivered to an immune cell by any method described herein. In preferred embodiments, cells are edited ex vivo and transferred to a subject in need thereof. Immunoresponsive cells, CAR T cells or any cells used for adoptive cell transfer may be edited. Editing may be performed for example to insert or knock-in an exogenous gene, such as an exogenous gene encoding a CAR or a TCR, at a preselected locus in a cell (e.g. TRAC locus); to eliminate potential alloreactive T-cell receptors (TCR) or to prevent inappropriate pairing between endogenous and exogenous TCR chains, such as to knock-out or knock-down expression of an endogenous TCR in a cell; to disrupt the target of a chemotherapeutic agent in a cell; to block an immune checkpoint, such as to knock-out or knock-down expression of an immune checkpoint protein or receptor in a cell; to knock-out or knock-down expression of other gene or genes in a cell, the reduced expression or lack of expression of which can enhance the efficacy of adoptive therapies using the cell; to knock-out or knock-down expression of an endogenous gene in a cell, said endogenous gene encoding an antigen targeted by an exogenous CAR or TCR; to knock-out or knock-down expression of one or more MHC constituent proteins in a cell; to activate a T cell; to modulate cells such that the cells are resistant to exhaustion or dysfunction; and/or increase the differentiation and/or proliferation of functionally exhausted or dysfunctional CD8+ T-cells (see International Patent Publication Nos. WO 2013/176915, WO 2014/059173, WO 2014/172606, WO 2014/184744, and WO 2014/191128).

[0832] In one embodiment, editing may result in inactivation of a gene. By inactivating a gene, it is intended that the gene of interest is not expressed in a functional protein form. In a particular embodiment, the system specifically catalyzes cleavage in one targeted gene thereby inactivating said targeted gene. The nucleic acid strand breaks caused are commonly repaired through the distinct mechanisms of homologous recombination or non-homologous end joining (NHEJ). However, NHEJ is an imperfect repair process that often results in changes to the DNA sequence at the site of the cleavage. Repair via non-homologous end joining (NHEJ) often results in small insertions or deletions (Indel) and can be used for the creation of specific gene knockouts. Cells in which a cleavage induced mutagenesis event has occurred can be identified and/or selected by well-known methods in the art. In one embodiment, homology directed repair (HDR) is used to concurrently inactivate a gene (e.g., TRAC) and insert an endogenous TCR or CAR into the inactivated locus.

[0833] Hence, in one embodiment, editing of cells, particularly cells intended for adoptive cell therapies, more particularly immunoresponsive cells such as T cells, may be performed to insert or knock-in an exogenous gene, such as an exogenous gene encoding a CAR or a TCR, at a preselected locus in a cell. Conventionally, nucleic acid molecules encoding CARS or TCRs are transfected or transduced to cells using randomly integrating vectors, which, depending on the site of integration, may lead to clonal expansion, oncogenic transformation, variegated transgene expression and/or transcriptional silencing of the transgene. Directing of transgene(s) to a specific locus in a cell can minimize or avoid such risks and advantageously provide for uniform expression of the transgene(s) by the cells. Without limitation, suitable ‘safe harbor’ loci for directed transgene integration include CCR5 or AAVS1. Homology-directed repair (HDR) strategies are known and described elsewhere in this specification allowing to insert transgenes into desired loci (e.g., TRAC locus).

[0834] Further suitable loci for insertion of transgenes, in particular CAR or exogenous TCR transgenes, include without limitation loci comprising genes coding for constituents of endogenous T-cell receptor, such as T-cell receptor alpha locus (TRA) or T-cell receptor beta locus (TRB), for example T-cell receptor alpha constant (TRAC) locus, T-cell receptor beta constant 1 (TRBC1) locus or T-cell receptor beta constant 2 (TRBC1) locus. Advantageously, insertion of a transgene into such locus can simultaneously achieve expression of the transgene, potentially controlled by the endogenous promoter, and knock-out expression of the endogenous TCR. This approach has been exemplified in Eyquem et al., (2017) Nature 543: 113-117, wherein the authors used CRISPR/Cas9 gene editing to knock-in a DNA molecule encoding a CD19-specific CAR into the TRAC locus downstream of the endogenous promoter; the CAR-T cells obtained by CRISPR were significantly superior in terms of reduced tonic CAR signaling and exhaustion.

[0835] T cell receptors (TCR) are cell surface receptors that participate in the activation of T cells in response to the presentation of antigen. The TCR is generally made from two chains, α and β, which assemble to form a heterodimer and associates with the CD3-transducing subunits to form the T cell receptor complex present on the cell surface. Each α and β chain of the TCR consists of an immunoglobulin-like N-terminal variable (V) and constant (C) region, a hydrophobic transmembrane domain, and a short cytoplasmic region. As for immunoglobulin molecules, the variable region of the α and β chains are generated by V(D)J recombination, creating a large diversity of antigen specificities within the population of T cells. However, in contrast to immunoglobulins that recognize intact antigen, T cells are activated by processed peptide fragments in association with an MHC molecule, introducing an extra dimension to antigen recognition by T cells, known as MHC restriction. Recognition of MHC disparities between the donor and recipient through the T cell receptor leads to T cell proliferation and the potential development of graft versus host disease (GVHD). The inactivation of TCRα or TCRβ can result in the elimination of the TCR from the surface of T cells preventing recognition of alloantigen and thus GVHD. However, TCR disruption generally results in the elimination of the CD3 signaling component and alters the means of further T cell expansion.

[0836] Hence, in one embodiment, editing of cells, particularly cells intended for adoptive cell therapies, more particularly immunoresponsive cells such as T cells, may be performed to knock-out or knock-down expression of an endogenous TCR in a cell. For example, NHEJ-based or HDR-based gene editing approaches can be employed to disrupt the endogenous TCR alpha and/or beta chain genes. For example, gene editing system or systems, such as Fanzor system or systems, can be designed to target a sequence found within the TCR beta chain conserved between the beta 1 and beta 2 constant region genes (TRBC1 and TRBC2) and/or to target the constant region of the TCR alpha chain (TRAC) gene.

[0837] Allogeneic cells are rapidly rejected by the host immune system. It has been demonstrated that, allogeneic leukocytes present in non-irradiated blood products will persist for no more than 5 to 6 days (Boni, Muranski et al. 2008 Blood 1; 112(12):4746-54). Thus, to prevent rejection of allogeneic cells, the host's immune system usually has to be suppressed to some extent. However, in the case of adoptive cell transfer the use of immunosuppressive drugs also have a detrimental effect on the introduced therapeutic T cells. Therefore, to effectively use an adoptive immunotherapy approach in these conditions, the introduced cells would need to be resistant to the immunosuppressive treatment. Thus, in a particular embodiment, the present invention further comprises a step of modifying T cells to make them resistant to an immunosuppressive agent, preferably by inactivating at least one gene encoding a target for an immunosuppressive agent. An immunosuppressive agent is an agent that suppresses immune function by one of several mechanisms of action. An immunosuppressive agent can be, but is not limited to a calcineurin inhibitor, a target of rapamycin, an interleukin-2 receptor α-chain blocker, an inhibitor of inosine monophosphate dehydrogenase, an inhibitor of dihydrofolic acid reductase, a corticosteroid or an immunosuppressive antimetabolite. The present invention allows conferring immunosuppressive resistance to T cells for immunotherapy by inactivating the target of the immunosuppressive agent in T cells. As non-limiting examples, targets for an immunosuppressive agent can be a receptor for an immunosuppressive agent such as: CD52, glucocorticoid receptor (GR), a FKBP family gene member and a cyclophilin family gene member.

[0838] In one embodiment, editing of cells, particularly cells intended for adoptive cell therapies, more particularly immunoresponsive cells such as T cells, may be performed to block an immune checkpoint, such as to knock-out or knock-down expression of an immune checkpoint protein or receptor in a cell. Immune checkpoints are inhibitory pathways that slow down or stop immune reactions and prevent excessive tissue damage from uncontrolled activity of immune cells. In one embodiment, the immune checkpoint targeted is the programmed death-1 (PD-1 or CD279) gene (PDCD1). In other embodiments, the immune checkpoint targeted is cytotoxic T-lymphocyte-associated antigen (CTLA-4). In additional embodiments, the immune checkpoint targeted is another member of the CD28 and CTLA4 Ig superfamily such as BTLA, LAG3, ICOS, PDL1 or KIR. In further additional embodiments, the immune checkpoint targeted is a member of the TNFR superfamily such as CD40, OX40, CD137, GITR, CD27 or TIM-3.

[0839] Additional immune checkpoints include Src homology 2 domain-containing protein tyrosine phosphatase 1 (SHP-1) (Watson H A, et al., SHP-1: the next checkpoint target for cancer immunotherapy? Biochem Soc Trans. 2016 Apr. 15; 44(2):356-62). SHP-1 is a widely expressed inhibitory protein tyrosine phosphatase (PTP). In T-cells, it is a negative regulator of antigen-dependent activation and proliferation. It is a cytosolic protein, and therefore not amenable to antibody-mediated therapies, but its role in activation and proliferation makes it an attractive target for genetic manipulation in adoptive transfer strategies, such as chimeric antigen receptor (CAR) T cells. Immune checkpoints may also include T cell immunoreceptor with Ig and ITIM domains (TIGIT/Vstm3/WUCAM/VSIG9) and VISTA (Le Mercier I, et al., (2015) Beyond CTLA-4 and PD-1, the generation Z of negative checkpoint regulators. Front. Immunol. 6:418).

[0840] International Patent Publication No. WO 2014/172606 relates to the use of MT1 and/or MT2 inhibitors to increase proliferation and/or activity of exhausted CD8+ T-cells and to decrease CD8+ T-cell exhaustion (e.g., decrease functionally exhausted or unresponsive CD8+ immune cells). In one embodiment, metallothioneins are targeted by gene editing in adoptively transferred T cells.

[0841] In one embodiment, targets of gene editing may be at least one targeted locus involved in the expression of an immune checkpoint protein. Such targets may include, but are not limited to CTLA4, PPP2CA, PPP2CB, PTPN6, PTPN22, PDCD1, ICOS (CD278), PDL1, KIR, LAG3, HAVCR2, BTLA, CD160, TIGIT, CD96, CRTAM, LAIR1, SIGLEC7, SIGLEC9, CD244 (2B4), TNFRSF10B, TNFRSF10A, CASP8, CASP10, CASP3, CASP6, CASP7, FADD, FAS, TGFBRII, TGFRBRI, SMAD2, SMAD3, SMAD4, SMAD10, SKI, SKIL, TGIF1, IL10RA, IL10RB, HMOX2, IL6R, IL6ST, EIF2AK4, CSK, PAG1, SIT1, FOXP3, PRDM1, BATF, VISTA, GUCY1A2, GUCY1A3, GUCY1B2, GUCY1B3, MT1, MT2, CD40, OX40, CD137, GITR, CD27, SHP-1, TIM-3, CEACAM-1, CEACAM-3, or CEACAM-5. In preferred embodiments, the gene locus involved in the expression of PD-1 or CTLA-4 genes is targeted. In other preferred embodiments, combinations of genes are targeted, such as but not limited to PD-1 and TIGIT.

[0842] By means of an example and without limitation, International Patent Publication No. WO 2016/196388 concerns an engineered T cell comprising (a) a genetically engineered antigen receptor that specifically binds to an antigen, which receptor may be a CAR; and (b) a disrupted gene encoding a PD-L1, an agent for disruption of a gene encoding a PD-L1, and/or disruption of a gene encoding PD-L1, wherein the disruption of the gene may be mediated by a gene editing nuclease, a zinc finger nuclease (ZFN), CRISPR/Cas9 and/or TALEN. WO2015142675 relates to immune effector cells comprising a CAR in combination with an agent (such as the composition or system herein) that increases the efficacy of the immune effector cells in the treatment of cancer, wherein the agent may inhibit an immune inhibitory molecule, such as PD1, PD-L1, CTLA-4, TIM-3, LAG-3, VISTA, BTLA, TIGIT, LAIR1, CD160, 2B4, TGFR beta, CEACAM-1, CEACAM-3, or CEACAM-5. Ren et al., (2017) Clin Cancer Res 23 (9) 2255-2266 performed lentiviral delivery of CAR and electro-transfer of Cas9 mRNA and gRNAs targeting endogenous TCR, 3-2 microglobulin (B2M) and PD1 simultaneously, to generate gene-disrupted allogeneic CAR T cells deficient of TCR, HLA class I molecule and PD1.

[0843] In one embodiment, cells may be engineered to express a CAR, wherein expression and/or function of methylcytosine dioxygenase genes (TET1, TET2 and/or TET3) in the cells has been reduced or eliminated, (such as the composition or system herein) (for example, as described in WO201704916).

[0844] In one embodiment, editing of cells, particularly cells intended for adoptive cell therapies, more particularly immunoresponsive cells such as T cells, may be performed to knock-out or knock-down expression of an endogenous gene in a cell, said endogenous gene encoding an antigen targeted by an exogenous CAR or TCR, thereby reducing the likelihood of targeting of the engineered cells. In one embodiment, the targeted antigen may be one or more antigen selected from the group consisting of CD38, CD138, CS-1, CD33, CD26, CD30, CD53, CD92, CD100, CD148, CD150, CD200, CD261, CD262, CD362, human telomerase reverse transcriptase (hTERT), survivin, mouse double minute 2 homolog (MDM2), cytochrome P450 1B1 (CYP1B), HER2/neu, Wilms' tumor gene 1 (WT1), livin, alphafetoprotein (AFP), carcinoembryonic antigen (CEA), mucin 16 (MUC16), MUC1, prostate-specific membrane antigen (PSMA), p53, cyclin (D1), B cell maturation antigen (BCMA), transmembrane activator and CAML Interactor (TACI), and B-cell activating factor receptor (BAFF-R) (for example, as described in International Patent Publication Nos. WO 2016/011210 and WO 2017/011804).

[0845] In one embodiment, editing of cells, particularly cells intended for adoptive cell therapies, more particularly immunoresponsive cells such as T cells, may be performed to knock-out or knock-down expression of one or more MHC constituent proteins, such as one or more HLA proteins and/or beta-2 microglobulin (B2M), in a cell, whereby rejection of non-autologous (e.g., allogeneic) cells by the recipient's immune system can be reduced or avoided. In preferred embodiments, one or more HLA class I proteins, such as HLA-A, B and/or C, and/or B2M may be knocked-out or knocked-down. Preferably, B2M may be knocked-out or knocked-down. By means of an example, Ren et al., (2017) Clin Cancer Res 23 (9) 2255-2266 performed lentiviral delivery of CAR and electro-transfer of Cas mRNA and gRNAs targeting endogenous TCR, 3-2 microglobulin (B2M) and PD1 simultaneously, to generate gene-disrupted allogeneic CAR T cells deficient of TCR, HLA class I molecule and PD1.

[0846] In other embodiments, at least two genes are edited. Pairs of genes may include, but are not limited to PD1 and TCRα, PD1 and TCRβ, CTLA-4 and TCRα, CTLA-4 and TCRβ, LAG3 and TCRα, LAG3 and TCRβ, Tim3 and TCRα, Tim3 and TCRβ, BTLA and TCRα, BTLA and TCRβ, BY55 and TCRα, BY55 and TCRβ, TIGIT and TCRα, TIGIT and TCRβ, B7H5 and TCRα, B7H5 and TCRβ, LAIR1 and TCRα, LAIR1 and TCRβ, SIGLEC10 and TCRα, SIGLEC10 and TCRβ, 2B4 and TCRα, 2B4 and TCRβ, B2M and TCRα, B2M and TCRβ.

[0847] In one embodiment, a cell may be multiplied edited (multiplex genome editing) as taught herein to (1) knock-out or knock-down expression of an endogenous TCR (for example, TRBC1, TRBC2 and/or TRAC), (2) knock-out or knock-down expression of an immune checkpoint protein or receptor (for example PD1, PD-L1 and/or CTLA4); and (3) knock-out or knock-down expression of one or more MHC constituent proteins (for example, HLA-A, B and/or C, and/or B2M, preferably B2M).

[0848] Whether prior to or after genetic modification of the T cells, the T cells can be activated and expanded generally using methods as described, for example, in U.S. Pat. Nos. 6,352,694; 6,534,055; 6,905,680; 5,858,358; 6,887,466; 6,905,681; 7,144,575; 7,232,566; 7,175,843; 5,883,223; 6,905,874; 6,797,514; 6,867,041; and 7,572,631. T cells can be expanded in vitro or in vivo.

[0849] Immune cells may be obtained using any method known in the art. In one embodiment, allogenic T cells may be obtained from healthy subjects. In one embodiment T cells that have infiltrated a tumor are isolated. T cells may be removed during surgery. T cells may be isolated after removal of tumor tissue by biopsy. T cells may be isolated by any means known in the art. In one embodiment, T cells are obtained by apheresis. In one embodiment, the method may comprise obtaining a bulk population of T cells from a tumor sample by any suitable method known in the art. For example, a bulk population of T cells can be obtained from a tumor sample by dissociating the tumor sample into a cell suspension from which specific cell populations can be selected. Suitable methods of obtaining a bulk population of T cells may include, but are not limited to, any one or more of mechanically dissociating (e.g., mincing) the tumor, enzymatically dissociating (e.g., digesting) the tumor, and aspiration (e.g., as with a needle).

[0850] The bulk population of T cells obtained from a tumor sample may comprise any suitable type of T cell. Preferably, the bulk population of T cells obtained from a tumor sample comprises tumor infiltrating lymphocytes (TILs).

[0851] The tumor sample may be obtained from any mammal. Unless stated otherwise, as used herein, the term “mammal” refers to any mammal including, but not limited to, mammals of the order Logomorpha, such as rabbits; the order Carnivora, including Felines (cats) and Canines (dogs); the order Artiodactyla, including Bovines (cows) and Swines (pigs); or of the order Perssodactyla, including Equines (horses). The mammals may be non-human primates, e.g., of the order Primates, Ceboids, or Simoids (monkeys) or of the order Anthropoids (humans and apes). In one embodiment, the mammal may be a mammal of the order Rodentia, such as mice and hamsters. Preferably, the mammal is a non-human primate or a human. An especially preferred mammal is the human.

[0852] T cells can be obtained from a number of sources, including peripheral blood mononuclear cells (PBMC), bone marrow, lymph node tissue, spleen tissue, and tumors. In one embodiment of the present invention, T cells can be obtained from a unit of blood collected from a subject using any number of techniques known to the skilled artisan, such as Ficoll separation. In one preferred embodiment, cells from the circulating blood of an individual are obtained by apheresis or leukapheresis. The apheresis product typically contains lymphocytes, including T cells, monocytes, granulocytes, B cells, other nucleated white blood cells, red blood cells, and platelets. In one embodiment, the cells collected by apheresis may be washed to remove the plasma fraction and to place the cells in an appropriate buffer or media for subsequent processing steps. In one embodiment of the invention, the cells are washed with phosphate buffered saline (PBS). In an alternative embodiment, the wash solution lacks calcium and may lack magnesium or may lack many if not all divalent cations. Initial activation steps in the absence of calcium lead to magnified activation. As those of ordinary skill in the art would readily appreciate a washing step may be accomplished by methods known to those in the art, such as by using a semi-automated “flow-through” centrifuge (for example, the Cobe 2991 cell processor) according to the manufacturer's instructions. After washing, the cells may be resuspended in a variety of biocompatible buffers, such as, for example, Ca-free, Mg-free PBS. Alternatively, the undesirable components of the apheresis sample may be removed and the cells directly resuspended in culture media.

[0853] In another embodiment, T cells are isolated from peripheral blood lymphocytes by lysing the red blood cells and depleting the monocytes, for example, by centrifugation through a PERCOLL™ gradient. A specific subpopulation of T cells, such as CD28+, CD4+, CDC, CD45RA+, and CD45RO+ T cells, can be further isolated by positive or negative selection techniques. For example, in one preferred embodiment, T cells are isolated by incubation with anti-CD3/anti-CD28 (i.e., 3×28)-conjugated beads, such as DYNABEADS® M-450 CD3/CD28 T, or XCYTE DYNABEADS™ for a time period sufficient for positive selection of the desired T cells. In one embodiment, the time period is about 30 minutes. In a further embodiment, the time period ranges from 30 minutes to 36 hours or longer and all integer values there between. In a further embodiment, the time period is at least 1, 2, 3, 4, 5, or 6 hours. In yet another preferred embodiment, the time period is 10 to 24 hours. In one preferred embodiment, the incubation time period is 24 hours. For isolation of T cells from patients with leukemia, use of longer incubation times, such as 24 hours, can increase cell yield. Longer incubation times may be used to isolate T cells in any situation where there are few T cells as compared to other cell types, such in isolating tumor infiltrating lymphocytes (TIL) from tumor tissue or from immunocompromised individuals. Further, use of longer incubation times can increase the efficiency of capture of CD8+ T cells.

[0854] Enrichment of a T cell population by negative selection can be accomplished with a combination of antibodies directed to surface markers unique to the negatively selected cells. A preferred method is cell sorting and/or selection via negative magnetic immunoadherence or flow cytometry that uses a cocktail of monoclonal antibodies directed to cell surface markers present on the cells negatively selected. For example, to enrich for CD4+ cells by negative selection, a monoclonal antibody cocktail typically includes antibodies to CD14, CD20, CD11b, CD16, HLA-DR, and CD8.

[0855] Further, monocyte populations (e.g., CD14+ cells) may be depleted from blood preparations by a variety of methodologies, including anti-CD14 coated beads or columns, or utilization of the phagocytotic activity of these cells to facilitate removal. Accordingly, in one embodiment, the invention uses paramagnetic particles of a size sufficient to be engulfed by phagocytotic monocytes. In one embodiment, the paramagnetic particles are commercially available beads, for example, those produced by Life Technologies under the trade name Dynabeads™. In one embodiment, other non-specific cells are removed by coating the paramagnetic particles with “irrelevant” proteins (e.g., serum proteins or antibodies). Irrelevant proteins and antibodies include those proteins and antibodies or fragments thereof that do not specifically target the T cells to be isolated. In one embodiment, the irrelevant beads include beads coated with sheep anti-mouse antibodies, goat anti-mouse antibodies, and human serum albumin.

[0856] In brief, such depletion of monocytes is performed by preincubating T cells isolated from whole blood, apheresed peripheral blood, or tumors with one or more varieties of irrelevant or non-antibody coupled paramagnetic particles at any amount that allows for removal of monocytes (approximately a 20:1 bead:cell ratio) for about 30 minutes to 2 hours at 22 to 37 degrees C., followed by magnetic removal of cells which have attached to or engulfed the paramagnetic particles. Such separation can be performed using standard methods available in the art. For example, any magnetic separation methodology may be used including a variety of which are commercially available, (e.g., DYNAL® Magnetic Particle Concentrator (DYNAL MPC®)). Assurance of requisite depletion can be monitored by a variety of methodologies known to those of ordinary skill in the art, including flow cytometric analysis of CD14 positive cells, before and after depletion.

[0857] For isolation of a desired population of cells by positive or negative selection, the concentration of cells and surface (e.g., particles such as beads) can be varied. In one embodiment, it may be desirable to significantly decrease the volume in which beads and cells are mixed together (i.e., increase the concentration of cells), to ensure maximum contact of cells and beads. For example, in one embodiment, a concentration of 2 billion cells/ml is used. In one embodiment, a concentration of 1 billion cells/ml is used. In a further embodiment, greater than 100 million cells/ml is used. In a further embodiment, a concentration of cells of 10, 15, 20, 25, 30, 35, 40, 45, or 50 million cells/ml is used. In yet another embodiment, a concentration of cells from 75, 80, 85, 90, 95, or 100 million cells/ml is used. In further embodiments, concentrations of 125 or 150 million cells/ml can be used. Using high concentrations can result in increased cell yield, cell activation, and cell expansion. Further, use of high cell concentrations allows more efficient capture of cells that may weakly express target antigens of interest, such as CD28-negative T cells, or from samples where there are many tumor cells present (i.e., leukemic blood, tumor tissue, etc.). Such populations of cells may have therapeutic value and would be desirable to obtain. For example, using high concentration of cells allows more efficient selection of CD8+ T cells that normally have weaker CD28 expression.

[0858] In a related embodiment, it may be desirable to use lower concentrations of cells. By significantly diluting the mixture of T cells and surface (e.g., particles such as beads), interactions between the particles and cells are minimized. This selects for cells that express high amounts of desired antigens to be bound to the particles. For example, CD4+ T cells express higher levels of CD28 and are more efficiently captured than CD8+ T cells in dilute concentrations. In one embodiment, the concentration of cells used is 5×10⁶/ml. In other embodiments, the concentration used can be from about 1×10⁵/ml to 1×10⁶/ml, and any integer value in between.

[0859] T cells can also be frozen. Wishing not to be bound by theory, the freeze and subsequent thaw step provides a more uniform product by removing granulocytes and to some extent monocytes in the cell population. After a washing step to remove plasma and platelets, the cells may be suspended in a freezing solution. While many freezing solutions and parameters are known in the art and will be useful in this context, one method involves using PBS containing 20% DMSO and 8% human serum albumin, or other suitable cell freezing media, the cells then are frozen to −80° C. at a rate of 1° per minute and stored in the vapor phase of a liquid nitrogen storage tank. Other methods of controlled freezing may be used as well as uncontrolled freezing immediately at −20° C. or in liquid nitrogen.

[0860] T cells for use in the present invention may also be antigen-specific T cells. For example, tumor-specific T cells can be used. In one embodiment, antigen-specific T cells can be isolated from a patient of interest, such as a patient afflicted with a cancer or an infectious disease. In one embodiment, neoepitopes are determined for a subject and T cells specific to these antigens are isolated. Antigen-specific cells for use in expansion may also be generated in vitro using any number of methods known in the art, for example, as described in U.S. Patent Publication No. US 20040224402 entitled, Generation and Isolation of Antigen-Specific T Cells, or in U.S. Pat. No. 6,040,177. Antigen-specific cells for use in the present invention may also be generated using any number of methods known in the art, for example, as described in Current Protocols in Immunology, or Current Protocols in Cell Biology, both published by John Wiley & Sons, Inc., Boston, Mass.

[0861] In a related embodiment, it may be desirable to sort or otherwise positively select (e.g., via magnetic selection) the antigen specific cells prior to or following one or two rounds of expansion. Sorting or positively selecting antigen-specific cells can be carried out using peptide-MHC tetramers (Altman, et al., Science. 1996 Oct. 4; 274(5284):94-6). In another embodiment, the adaptable tetramer technology approach is used (Andersen et al., 2012 Nat Protoc. 7:891-902). Tetramers are limited by the need to utilize predicted binding peptides based on prior hypotheses, and the restriction to specific HLAs. Peptide-MHC tetramers can be generated using techniques known in the art and can be made with any MHC molecule of interest and any antigen of interest as described herein. Specific epitopes to be used in this context can be identified using numerous assays known in the art. For example, the ability of a polypeptide to bind to MHC class I may be evaluated indirectly by monitoring the ability to promote incorporation of 1251 labeled 02-microglobulin (β2m) into MHC class I/β2m/peptide heterotrimeric complexes (see Parker et al., J. Immunol. 152:163, 1994).

[0862] In one embodiment cells are directly labeled with an epitope-specific reagent for isolation by flow cytometry followed by characterization of phenotype and TCRs. In one embodiment, T cells are isolated by contacting with T cell specific antibodies. Sorting of antigen-specific T cells, or generally any cells of the present invention, can be carried out using any of a variety of commercially available cell sorters, including, but not limited to, MoFlo sorter (DakoCytomation, Fort Collins, Colo.), FACSAria™, FACSArray™, FACSVantage™, BD™ LSR II, and FACSCalibur™ (BD Biosciences, San Jose, Calif).

[0863] In a preferred embodiment, the method comprises selecting cells that also express CD3. The method may comprise specifically selecting the cells in any suitable manner. Preferably, the selecting is carried out using flow cytometry. The flow cytometry may be carried out using any suitable method known in the art. The flow cytometry may employ any suitable antibodies and stains. Preferably, the antibody is chosen such that it specifically recognizes and binds to the particular biomarker being selected. For example, the specific selection of CD3, CD8, TIM-3, LAG-3, 4-1BB, or PD-1 may be carried out using anti-CD3, anti-CD8, anti-TIM-3, anti-LAG-3, anti-4-1BB, or anti-PD-1 antibodies, respectively. The antibody or antibodies may be conjugated to a bead (e.g., a magnetic bead) or to a fluorochrome. Preferably, the flow cytometry is fluorescence-activated cell sorting (FACS). TCRs expressed on T cells can be selected based on reactivity to autologous tumors. Additionally, T cells that are reactive to tumors can be selected for based on markers using the methods described in patent publication Nos. WO2014133567 and WO2014133568, herein incorporated by reference in their entirety. Additionally, activated T cells can be selected for based on surface expression of CD107a.

[0864] In one embodiment of the invention, the method further comprises expanding the numbers of T cells in the enriched cell population. Such methods are described in U.S. Pat. No. 8,637,307 and is herein incorporated by reference in its entirety. The numbers of T cells may be increased at least about 3-fold (or 4-, 5-, 6-, 7-, 8-, or 9-fold), more preferably at least about 10-fold (or 20-, 30-, 40-, 50-, 60-, 70-, 80-, or 90-fold), more preferably at least about 100-fold, more preferably at least about 1,000 fold, or most preferably at least about 100,000-fold. The numbers of T cells may be expanded using any suitable method known in the art. Exemplary methods of expanding the numbers of cells are described in patent publication No. WO 2003/057171, U.S. Pat. No. 8,034,334, and U.S. Patent Publication No. 2012/0244133, each of which is incorporated herein by reference.

[0865] In one embodiment, ex vivo T cell expansion can be performed by isolation of T cells and subsequent stimulation or activation followed by further expansion. In one embodiment of the invention, the T cells may be stimulated or activated by a single agent. In another embodiment, T cells are stimulated or activated with two agents, one that induces a primary signal and a second that is a co-stimulatory signal. Ligands useful for stimulating a single signal or stimulating a primary signal and an accessory molecule that stimulates a second signal may be used in soluble form. Ligands may be attached to the surface of a cell, to an Engineered Multivalent Signaling Platform (EMSP), or immobilized on a surface. In a preferred embodiment, both primary and secondary agents are co-immobilized on a surface, for example a bead or a cell. In one embodiment, the molecule providing the primary activation signal may be a CD3 ligand, and the co-stimulatory molecule may be a CD28 ligand or 4-1BB ligand.

[0866] In one embodiment, T cells comprising a CAR or an exogenous TCR, may be manufactured as described in International Patent Publication No. WO 2015/120096, by a method comprising enriching a population of lymphocytes obtained from a donor subject; stimulating the population of lymphocytes with one or more T-cell stimulating agents to produce a population of activated T cells, wherein the stimulation is performed in a closed system using serum-free culture medium; transducing the population of activated T cells with a viral vector comprising a nucleic acid molecule which encodes the CAR or TCR, using a single cycle transduction to produce a population of transduced T cells, wherein the transduction is performed in a closed system using serum-free culture medium; and expanding the population of transduced T cells for a predetermined time to produce a population of engineered T cells, wherein the expansion is performed in a closed system using serum-free culture medium. In one embodiment, T cells comprising a CAR or an exogenous TCR, may be manufactured as described in WO 2015/120096, by a method comprising: obtaining a population of lymphocytes; stimulating the population of lymphocytes with one or more stimulating agents to produce a population of activated T cells, wherein the stimulation is performed in a closed system using serum-free culture medium; transducing the population of activated T cells with a viral vector comprising a nucleic acid molecule which encodes the CAR or TCR, using at least one cycle transduction to produce a population of transduced T cells, wherein the transduction is performed in a closed system using serum-free culture medium; and expanding the population of transduced T cells to produce a population of engineered T cells, wherein the expansion is performed in a closed system using serum-free culture medium. The predetermined time for expanding the population of transduced T cells may be 3 days. The time from enriching the population of lymphocytes to producing the engineered T cells may be 6 days. The closed system may be a closed bag system. Further provided is population of T cells comprising a CAR or an exogenous TCR obtainable or obtained by said method, and a pharmaceutical composition comprising such cells.

[0867] In one embodiment, T cell maturation or differentiation in vitro may be delayed or inhibited by the method as described in International Patent Publication No. WO 2017/070395, comprising contacting one or more T cells from a subject in need of a T cell therapy with an AKT inhibitor (such as, e.g., one or a combination of two or more AKT inhibitors disclosed in claim 8 of WO2017070395) and at least one of exogenous Interleukin-7 (IL-7) and exogenous Interleukin-15 (IL-15), wherein the resulting T cells exhibit delayed maturation or differentiation, and/or wherein the resulting T cells exhibit improved T cell function (such as, e.g., increased T cell proliferation; increased cytokine production; and/or increased cytolytic activity) relative to a T cell function of a T cell cultured in the absence of an AKT inhibitor.

[0868] In one embodiment, a patient in need of a T cell therapy may be conditioned by a method as described in International Patent Publication No. WO 2016/191756 comprising administering to the patient a dose of cyclophosphamide between 200 mg/m2/day and 2000 mg/m2/day and a dose of fludarabine between 20 mg/m2/day and 900 mg/m²/day.

### Further Exemplary Diseases and Disease Treatments

[0869] The following provides additional exemplary diseases for which the systems and compositions of the present invention can be used to treat and/or prevent, such as by a method described herein.

Genetic Diseases and Diseases with a Genetic and or Epigenetic Aspect

[0870] The compositions, systems, or components thereof can be used to treat and/or prevent a genetic disease or a disease with a genetic and/or epigenetic aspect. The genes and conditions exemplified herein are not exhaustive. In one embodiment, a method of treating and/or preventing a genetic disease can include administering a composition, system, and/or one or more components thereof to a subject, where the composition, system, and/or one or more components thereof is capable of modifying one or more copies of one or more genes associated with the genetic disease or a disease with a genetic and/or epigenetic aspect in one or more cells of the subject. In one embodiment, modifying one or more copies of one or more genes associated with a genetic disease or a disease with a genetic and/or epigenetic aspect in the subject can eliminate a genetic disease or a symptom thereof in the subject. In one embodiment, modifying one or more copies of one or more genes associated with a genetic disease or a disease with a genetic and/or epigenetic aspect in the subject can decrease the severity of a genetic disease or a symptom thereof in the subject. In one embodiment, the compositions, systems, or components thereof can modify one or more genes or polynucleotides associated with one or more diseases, including genetic diseases and/or those having a genetic aspect and/or epigenetic aspect, including but not limited to, any one or more set forth in Table 4A. It will be appreciated that those diseases and associated genes listed herein are non-exhaustive and non-limiting. Further some genes play roles in the development of multiple diseases.

TABLE 4A
Exemplary Genetic and Other Diseases and Associated Genes

| | Primary Tissues | Additional | |
|---|---|---|---|
| | or System | Tissues/Systems | |
| Disease Name | Affected | Affected | Genes |
| Achondroplasia | Bone and | | fibroblast growth factor receptor 3 |
| | Muscle | | (FGFR3) |
| Achromatopsia | eye | | CNGA3, CNGB3, GNAT2, PDE6C, |
| | | | PDE6H, ACHM2, ACHM3, |
| Acute Renal Injury | kidney | | NFkappaB, AATF, p85alpha, FAS, |
| | | | Apoptosis cascade elements (e.g., |
| | | | FASR, Caspase 2, 3, 4, 6, 7, 8, 9, 10, |
| | | | AKT, TNF alpha, IGF1, IGF1R, |
| | | | RIPK1), p53 |
| Age Related Macular | eye | | Abcr; CCL2; CC2; CP |
| Degeneration | | | (ceruloplasmin); Timp3; cathepsinD; |
| | | | VLDLR, CCR2 |
| AIDS | Immune System | | KIR3DL1, NKAT3, NKB1, AMB11, |
| | | | KIR3DS1, IFNG, CXCL12, SDF1 |
| Albinism (including | Skin, hair, eyes, | | TYR, OCA2, TYRP1, and SLC45A2, |
| oculocutaneous albinism (types | | | SLC24A5 and C10orf11 |
| 1-7) and ocular albinism) | | | |
| Alkaptonuria | Metabolism of | Tissues/organs | HGD |
| | amino acids | where | |
| | | homogentisic | |
| | | acid | |
| | | accumulates, | |
| | | particularly | |
| | | cartilage (joints), | |
| | | heart valves, | |
| | | kidneys | |
| alpha-1 antitrypsin deficiency | Lung | Liver, skin, | SERPINA1, those set forth in |
| (AATD or A1AD) | | vascular system, | WO2017165862, PiZ allele |
| | | kidneys, GI | |
| ALS | CNS | | SOD1; ALS2; ALS3; ALS5; |
| | | | ALS7; STEX; FUS; TARDBP; VEGF |
| | | | (VEGF-a; |
| | | | VEGF-b; VEGF-c); DPP6; NEFH, |
| | | | PTGS1, SLC1A2, TNFRSF10B, |
| | | | PRPH, HSP90AA1, CRIA2, IFNG, |
| | | | AMPA2 S100B, FGF2, AOX1, CS, |
| | | | TXN, RAPHJ1, MAP3K5, NBEAL1, |
| | | | GPX1, ICA1L, RAC1, MAPT, ITPR2, |
| | | | ALS2CR4, GLS, ALS2CR8, CNTFR, |
| | | | ALS2CR11, FOLH1, FAM117B, |
| | | | P4HB, CNTF, SQSTM1, STRADB, |
| | | | NAIP, NLR, YWHAQ, SLC33A1, |
| | | | TRAK2, SCA1, NIF3L1, NIF3, |
| | | | PARD3B, COX8A, CDK15, HECW1, |
| | | | HECT, C2, WW 15, NOS1, MET, |
| | | | SOD2, HSPB1, NEFL, CTSB, ANG, |
| | | | HSPA8, RNase A, VAPB, VAMP, |
| | | | SNCA, alpha HGF, CAT, ACTB, |
| | | | NEFM, TH, BCL2, FAS, CASP3, |
| | | | CLU, SMN1, G6PD, BAX, HSF1, |
| | | | RNF19A, JUN, ALS2CR12, HSPA5, |
| | | | MAPK14, APEX1, TXNRD1, NOS2, |
| | | | TIMP1, CASP9, XIAP, GLG1, EPO, |
| | | | VEGFA, ELN, GDNF, NFE2L2, |
| | | | SLC6A3, HSPA4, APOE, PSMB8, |
| | | | DCTN2, TIMP3, KIFAP3, SLC1A1, |
| | | | SMN2, CCNC, STUB1, ALS2, |
| | | | PRDX6, SYP, CABIN1, CASP1, |
| | | | GART, CDK5, ATXN3, RTN4, |
| | | | C1QB, VEGFC, HTT, PARK7, XDH, |
| | | | GFAP, MAP2, CYCS, FCGR3B, CCS, |
| | | | UBL5, MMP9m SLC18A3, TRPM7, |
| | | | HSPB2, AKT1, DEERL1, CCL2, |
| | | | NGRN, GSR, TPPP3, APAF1, |
| | | | BTBD10, GLUD1, CXCR4, S:C1A3, |
| | | | FLT1, PON1, AR, LIF, ERBB3, |
| | | | :GA:S1, CD44, TP53, TLR3, GRIA1, |
| | | | GAPDH, AMPA, GRIK1, DES, |
| | | | CHAT, FLT4, CHMP2B, BAG1, |
| | | | CRNA COMPONENT4, GSS, BAK1, |
| | | | KDR, GSTP1, OGG1, IL6 |
| Alzheimer's Disease | Brain | | E1; CHIP; UCH; UBB; Tau; LRP; |
| | | | PICALM; CLU; PS1; |
| | | | SORL1; CR1; VLDLR; UBA1; |
| | | | UBA3; CHIP28; AQP1; UCHL1; |
| | | | UCHL3; APP, AAA, CVAP, AD1, |
| | | | APOE, AD2, DCP1, ACE1, MPO, |
| | | | PACIP1, PAXIP1L, PTIP, A2M, |
| | | | BLMH, BMH, PSEN1, AD3, ALAS2, |
| | | | ABCA1, BIN1, BDNF, BTNL8, |
| | | | C1ORF49, CDH4, CHRNB2, |
| | | | CKLFSF2, CLEC4E, CR1L, CSF3R, |
| | | | CST3, CYP2C, DAPK1, ESR1, |
| | | | FCAR, FCGR3B, FFA2, FGA, GAB2, |
| | | | GALP, GAPDHS, GMPB, HP, HTR7, |
| | | | IDE, IF127, IFI6, IFIT2, IL1RN, IL- |
| | | | 1RA, IL8RA, IL8RB, JAG1, KCNJ15, |
| | | | LRP6, MAPT, MARK4, MPHOSPH1, |
| | | | MTHFR, NBN, NCSTN, NIACR2, |
| | | | NMNAT3, NTM, ORM1, P2RY13, |
| | | | PBEF1, PCK1, PICALM, PLAU, |
| | | | PLXNC1, PRNP, PSEN1, PSEN2, |
| | | | PTPRA, RALGPS2, RGSL2, |
| | | | SELENBP1, SLC25A37, SORL1, |
| | | | Mitoferrin-1, TF, TFAM, TNF, |
| | | | TNFRSF10C, UBE1C |
| Amyloidosis | | | APOA1, APP, AAA, CVAP, AD1, |
| | | | GSN, FGA, LYZ, TTR, PALB |
| Amyloid neuropathy | | | TTR, PALB |
| Anemia | Blood | | CDAN1, CDA1, RPS19, DBA, PKLR, |
| | | | PK1, NT5C3, UMPH1, PSN1, RHAG, |
| | | | RH50A, NRAMP2, SPTB, ALAS2, |
| | | | ANH1, ASB, ABCB7, ABC7, ASAT |
| Angelman Syndrome | Nervous system, | | UBE3A |
| | brain | | |
| Attention Deficit Hyperactivity | Brain | | PTCHD1 |
| Disorder (ADHD) | | | |
| Autoimmune lymphoproliferative | Immune system | | TNFRSF6, APT1, FAS, CD95, |
| syndrome | | | ALPS1A |
| Autism, Autism spectrum | Brain | | PTCHD1; Mecp2; BZRAP1; MDGA2; |
| disorders (ASDs), including | | | Sema5A; Neurexin 1; GLO1, RTT, |
| Asperger's and a general | | | PPMX, MRX16, RX79, NLGN3, |
| diagnostic category called | | | NLGN4, KIAA1260, AUTSX2, |
| Pervasive Developmental | | | FMR1, FMR2; FXR1; FXR2; |
| Disorders (PDDs) | | | MGLUR5, ATP10C, CDH10, GRM6, |
| | | | MGLUR6, CDH9, CNTN4, NLGN2, |
| | | | CNTNAP2, SEMA5A, DHCR7, |
| | | | NLGN4X, NLGN4Y, DPP6, NLGN5, |
| | | | EN2, NRCAM, MDGA2, NRXN1, |
| | | | FMR2, AFF2, FOXP2, OR4M2, |
| | | | OXTR, FXR1, FXR2, PAH, |
| | | | GABRA1, PTEN, GABRA5, PTPRZ1, |
| | | | GABRB3, GABRG1, HIRIP3, |
| | | | SEZ6L2, HOXA1, SHANK3, IL6, |
| | | | SHBZRAP1, LAMB1, SLC6A4, |
| | | | SERT, MAPK3, TAS2R1, MAZ, |
| | | | TSC1, MDGA2, TSC2, MECP2, |
| | | | UBE3A, WNT2, see also |
| | | | 20110023145 |
| autosomal dominant polycystic | kidney | liver | PKD1, PKD2 |
| kidney disease (ADPKD) - | | | |
| (includes diseases such as von | | | |
| Hippel-Lindau disease and | | | |
| tubreous sclerosis complex | | | |
| disease) | | | |
| Autosomal Recessive Polycystic | kidney | liver | PKDH1 |
| Kidney Disease (ARPKD) | | | |
| Ataxia-Telangiectasia (a.k.a | Nervous system, | various | ATM |
| Louis Bar syndrome) | immune system | | |
| B-Cell Non-Hodgkin Lymphoma | | | BCL7A, BCL7 |
| Bardet-Biedl syndrome | Eye, | Liver, ear, | ARL6, BBS1, BBS2, BBS4, BBS5, |
| | musculoskeletal | gastrointestinal | BBS7, BBS9, BBS10, BBS12, |
| | system, kidney, | system, brain | CEP290, INPP5E, LZTFL1, MKKS, |
| | reproductive | | MKS1, SDCCAG8, TRIM32, TTC8 |
| | organs | | |
| Bare Lymphocyte Syndrome | blood | | TAPBP, TPSN, TAP2, ABCB3, PSF2, |
| | | | RING11, MHC2TA, C2TA, RFX5, |
| | | | RFXAP, RFX5 |
| Bartter's Syndrome (types I, II, | kidney | | SLC12A1 (type I), KCNJ1 (type II), |
| III, IVA and B, and V) | | | CLCNKB (type III), BSND (type IV |
| | | | A), or both the CLCNKA CLCNKB |
| | | | genes (type IV B), CASR (type V). |
| Becker muscular dystrophy | Muscle | | DMD, BMD, MYF6 |
| Best Disease (Vitelliform | eye | | VMD2 |
| Macular Dystrophy type 2) | | | |
| Bleeding Disorders | blood | | TBXA2R, P2RX1, P2X1 |
| Blue Cone Monochromacy | eye | | OPN1LW, OPN1MW, and LCR |
| Breast Cancer | Breast tissue | | BRCA1, BRCA2, COX-2 |
| Bruton's Disease (aka X-linked | Immune system, | | BTK |
| Agammglobulinemia) | specifically B | | |
| | cells | | |
| Cancers (e.g., lymphoma, chronic | Various | | FAS, BID, CTLA4, PDCD1, CBLB, |
| lymphocytic leukemia (CLL), B | | | PTPN6, TRAC, TRBC, those |
| cell acute lymphocytic leukemia | | | described in WO2015048577 |
| (B-ALL), acute lymphoblastic | | | |
| leukemia, acute myeloid | | | |
| leukemia, non-Hodgkin's | | | |
| lymphoma (NHL), diffuse large | | | |
| cell lymphoma (DLCL), multiple | | | |
| myeloma, renal cell carcinoma | | | |
| (RCC), neuroblastoma, colorectal | | | |
| cancer, breast cancer, ovarian | | | |
| cancer, melanoma, sarcoma, | | | |
| prostate cancer, lung cancer, | | | |
| esophageal cancer, hepatocellular | | | |
| carcinoma, pancreatic cancer, | | | |
| astrocytoma, mesothelioma, head | | | |
| and neck cancer, and | | | |
| medulloblastoma | | | |
| Cardiovascular Diseases | heart | Vascular system | IL1B, XDH, TP53, PTGS, MB, IL4, |
| | | | ANGPT1, ABCGu8, CTSK, PTGIR, |
| | | | KCNJ11, INS, CRP, PDGFRB, |
| | | | CCNA2, PDGFB, KCNJ5, KCNN3, |
| | | | CAPN10, ADRA2B, ABCG5, |
| | | | PRDX2, CPAN5, PARP14, MEX3C, |
| | | | ACE, RNF, IL6, TNF, STN, |
| | | | SERPINE1, ALB, ADIPOQ, APOB, |
| | | | APOE, LEP, MTHFR, APOA1, |
| | | | EDN1, NPPB, NOS3, PPARG, PLAT, |
| | | | PTGS2, CETP, AGTR1, HMGCR, |
| | | | IGF1, SELE, REN, PPARA, PON1, |
| | | | KNG1, CCL2, LPL, VWF, F2, |
| | | | ICAM1, TGFB, NPPA, IL10, EPO, |
| | | | SOD1, VCAM1, IFNG, LPA, MPO, |
| | | | ESR1, MAPK, HP, F3, CST3, COG2, |
| | | | MMP9, SERPINC1, F8, HMOX1, |
| | | | APOC3, IL8, PROL1, CBS, NOS2, |
| | | | TLR4, SELP, ABCA1, AGT, LDLR, |
| | | | GPT, VEGFA, NR3C2, IL18, NOS1, |
| | | | NR3C1, FGB, HGF, IL1A, AKT1, |
| | | | LIPC, HSPD1, MAPK14, SPP1, |
| | | | ITGB3, CAT, UTS2, THBD, F10, CP, |
| | | | TNFRSF11B, EGFR, MMP2, PLG, |
| | | | NPY, RHOD, MAPK8, MYC, FN1, |
| | | | CMA1, PLAU, GNB3, ADRB2, |
| | | | SOD2, F5, VDR, ALOX5, HLA- |
| | | | DRB1, PARP1, CD40LG, PON2, |
| | | | AGER, IRS1, PTGS1, ECE1, F7, |
| | | | IRMN, EPHX2, IGFBP1, MAPK10, |
| | | | FAS, ABCB1, JUN, IGFBP3, CD14, |
| | | | PDE5A, AGTR2, CD40, LCAT, |
| | | | CCR5, MMP1, TIMP1, ADM, |
| | | | DYT10, STAT3, MMP3, ELN, USF1, |
| | | | CFH, HSPA4, MMP12, MME, F2R, |
| | | | SELL, CTSB, ANXA5, ADRB1, |
| | | | CYBA, FGA, GGT1, LIPG, HIF1A, |
| | | | CXCR4, PROC, SCARB1, CD79A, |
| | | | PLTP, ADD1, FGG, SAA1, KCNH2, |
| | | | DPP4, NPR1, VTN, KIAA0101, FOS, |
| | | | TLR2, PPIG, IL1R1, AR, CYP1A1, |
| | | | SERPINA1, MTR, RBP4, APOA4, |
| | | | CDKN2A, FGF2, EDNRB, ITGA2, |
| | | | VLA-2, CABIN1, SHBG, HMGB1, |
| | | | HSP90B2P, CYP3A4, GJA1, CAV1, |
| | | | ESR2, LTA, GDF15, BDNF, |
| | | | CYP2D6, NGF, SP1, TGIF1, SRC, |
| | | | EGF, PIK3CG, HLA-A, KCNQ1, |
| | | | CNR1, FBN1, CHKA, BEST1, |
| | | | CTNNB1, IL2, CD36, PRKAB1, TPO, |
| | | | ALDH7A1, CX3CR1, TH, F9, CH1, |
| | | | TF, HFE, IL17A, PTEN, GSTM1, |
| | | | DMD, GATA4, F13A1, TTR, FABP4, |
| | | | PON3, APOC1, INSR, TNFRSF1B, |
| | | | HTR2A, CSF3, CYP2C9, TXN, |
| | | | CYP11B2, PTH, CSF2, KDR, |
| | | | PLA2G2A, THBS1, GCG, RHOA, |
| | | | ALDH2, TCF7L2, NFE2L2, |
| | | | NOTCH1, UGT1A1, IFNA1, PPARD, |
| | | | SIRT1, GNHR1, PAPPA, ARR3, |
| | | | NPPC, AHSP, PTK2, IL13, MTOR, |
| | | | ITGB2, GSTT1, IL6ST, CPB2, |
| | | | CYP1A2, HNF4A, SLC64A, |
| | | | PLA2G6, TNFSF11, SLC8A1, F2RL1, |
| | | | AKR1A1, ALDH9A1, BGLAP, |
| | | | MTTP, MTRR, SULT1A3, RAGE, |
| | | | C4B, P2RY12, RNLS, CREB1, |
| | | | POMC, RAC1, LMNA, CD59, |
| | | | SCM5A, CYP1B1, MIF, MMP13, |
| | | | TIMP2, CYP19A1, CUP21A2, |
| | | | PTPN22, MYH14, MBL2, SELPLG, |
| | | | AOC3, CTSL1, PCNA, IGF2, ITGB1, |
| | | | CAST, CXCL12, IGHE, KCNE1, |
| | | | TFRC, COL1A1, COL1A2, IL2RB, |
| | | | PLA2G10, ANGPT2, PROCR, NOX4, |
| | | | HAMP, PTPN11, SLCA1, IL2RA, |
| | | | CCL5, IRF1, CF:AR, CA:CA, EIF4E, |
| | | | GSTP1, JAK2, CYP3A5, HSPG2, |
| | | | CCL3, MYD88, VIP, SOAT1, |
| | | | ADRBK1, NR4A2, MMP8, NPR2, |
| | | | GCH1, EPRS, PPARGC1A, F12, |
| | | | PECAM1, CCL4, CERPINA34, |
| | | | CASR, FABP2, TTF2, PROS1, CTF1, |
| | | | SGCB, YME1L1, CAMP, ZC3H12A, |
| | | | AKR1B1, MMP7, AHR, CSF1, |
| | | | HDAC9, CTGF, KCNMA1, UGT1A, |
| | | | PRKCA, COMT, S100B, EGR1, PRL, |
| | | | IL15, DRD4, CAMK2G, SLC22A2, |
| | | | CCL11, PGF, THPO, GP6, TACR1, |
| | | | NTS, HNF1A, SST, KCDN1, |
| | | | LOC646627, TBXAS1, CUP2J2, |
| | | | TBXA2R, ADH1C, ALOX12, AHSG, |
| | | | BHMT, GJA4, SLC25A4, ACLY, |
| | | | ALOX5AP, NUMA1, CYP27B1, |
| | | | CYSLTR2, SOD3, LTC4S, UCN, |
| | | | GHRL, APOC2, CLEC4A, |
| | | | KBTBD10, TNC, TYMS, SHC1, |
| | | | LRP1, SOCS3, ADH1B, KLK3, |
| | | | HSD11B1, VKORC1, SERPINB2, |
| | | | TNS1, RNF19A, EPOR, ITGAM, |
| | | | PITX2, MAPK7, FCGR3A, LEEPR, |
| | | | ENG, GPX1, GOT2, HRH1, NR112, |
| | | | CRH, HTR1A, VDAC1, HPSE, |
| | | | SFTPD, TAP2, RMF123, PTK2Bm |
| | | | NTRK2, IL6R, ACHE, GLP1R, GHR, |
| | | | GSR, NQO1, NR5A1, GJB2, |
| | | | SLC9A1, MAOA, PCSK9, FCGR2A, |
| | | | SERPINF1, EDN3, UCP2, TFAP2A, |
| | | | C4BPA, SERPINF2, TYMP, ALPP, |
| | | | CXCR2, SLC3A3, ABCG2, ADA, |
| | | | JAK3, HSPA1A, FASN, FGF1, F11, |
| | | | ATP7A, CR1, GFPA, ROCK1, |
| | | | MECP2, MYLK, BCHE, LIPE, |
| | | | ADORA1, WRN, CXCR3, CD81, |
| | | | SMAD7, LAMC2, MAP3K5, CHGA, |
| | | | IAPP, RHO, ENPP1, PTHLH, NRG1, |
| | | | VEGFC, ENPEP, CEBPB, NAGLU,. |
| | | | F2RL3, CX3CL1, BDKRB1, |
| | | | ADAMTS13, ELANE, ENPP2, CISH, |
| | | | GAST, MYOC, ATP1A2, NF1, GJB1, |
| | | | MEF2A, VCL, BMPR2, TUBB, |
| | | | CDC42, KRT18, HSF1, MYB, |
| | | | PRKAA2, ROCK2, TFP1, PRKG1, |
| | | | BMP2, CTNND1, CTH, CTSS, |
| | | | VAV2, NPY2R, IGFBP2, CD28, |
| | | | GSTA1, PPIA, APOH, S100A8, IL11, |
| | | | ALOX15, FBLN1, NR1H3, SCD, GIP, |
| | | | CHGB, PRKCB, SRD5A1, HSD11B2, |
| | | | CALCRL, GALNT2, ANGPTL4, |
| | | | KCNN4, PIK3C2A, HBEGF, |
| | | | CYP7A1, HLA-DRB5, BNIP3, |
| | | | GCKR, S100A12, PADI4, HSPA14, |
| | | | CXCR1, H19, KRTAP19-3, IDDM2, |
| | | | RAC2, YRY1, CLOCK, NGFR, DBH, |
| | | | CRNA COMPONENT4, CACNA1C, |
| | | | PRKAG2, CHAT, PTGDS, NR1H2, |
| | | | TEK, VEGFB, MEF2C, MAPKAPK2, |
| | | | TNFRSF11A, HSPA9, CYSLTR1, |
| | | | MAT1A, OPRL1, IMPA1, CLCN2, |
| | | | DLD, PSMA6, PSMB8, CHI3L1, |
| | | | ALDH1B1, PARP2, STAR, LBP, |
| | | | ABCC6, RGS2, EFNB2, GJB6, |
| | | | APOA2, AMPD1, DYSF, |
| | | | FDFT1, EMD2, CCR6, GJB3, IL1RL1, |
| | | | ENTPD1, BBS4, CELSR2, F11R, |
| | | | RAPGEF3, HYAL1, ZNF259, |
| | | | ATOX1, ATF6, KHK, SAT1, GGH, |
| | | | TIMP4, SLC4A4, PDE2A, PDE3B, |
| | | | FADS1, FADS2, TMSB4X, TXNIP, |
| | | | LIMS1, RHOB, LY96, FOXO1, |
| | | | PNPLA2, TRH, GJC1, S:C17A5, FTO, |
| | | | GJD2, PRSC1, CASP12, GPBAR1, |
| | | | PXK, IL33, TRIB1, PBX4, NUPR1, |
| | | | 15-SEP, CILP2, TERC, GGT2, |
| | | | MTCO1, UOX, AVP |
| Cataract | eye | | CRYAA, CRYA1, CRYBB2, CRYB2, |
| | | | PITX3, BFSP2, CP49, CP47, CRYAA, |
| | | | CRYA1, PAX6, AN2, MGDA, |
| | | | CRYBA1, CRYB1, CRYGC, CRYG3, |
| | | | CCL, LIM2, MP19, CRYGD, CRYG4, |
| | | | BFSP2, CP49, CP47, HSF4, CTM, |
| | | | HSF4, CTM, MIP, AQP0, CRYAB, |
| | | | CRYA2, CTPP2, CRYBB1, CRYGD, |
| | | | CRYG4, CRYBB2, CRYB2, CRYGC, |
| | | | CRYG3, CCL, CRYAA, CRYA1, |
| | | | GJA8, CX50, CAE1, GJA3, CX46, |
| | | | CZP3, CAE3, CCM1, CAM, KRIT1 |
| CDKL-5 Deficiencies or | Brain, CNS | | CDKL5 |
| Mediated Diseases | | | |
| Charcot-Marie-Tooth (CMT) | Nervous system | Muscles | PMP22 (CMT1A and E), MPZ |
| disease (Types 1, 2, 3, 4,) | | (dystrophy) | (CMT1B), LITAF (CMT1C), EGR2 |
| | | | (CMT1D), NEFL (CMT1F), GJB1 |
| | | | (CMT1X), MFN2 (CMT2A), KIF1B |
| | | | (CMT2A2B), RAB7A (CMT2B), |
| | | | TRPV4 (CMT2C), GARS (CMT2D), |
| | | | NEFL (CMT2E), GAPD1 (CMT2K), |
| | | | HSPB8 (CMT2L), DYNC1H1, |
| | | | CMT2O), LRSAM1 (CMT2P), |
| | | | IGHMBP2 (CMT2S), MORC2 |
| | | | (CMT2Z), GDAP1 (CMT4A), |
| | | | MTMR2 or SBF2/MTMR13 |
| | | | (CMT4B), SH3TC2 (CMT4C), |
| | | | NDRG1 (CMT4D), PRX (CMT4F), |
| | | | FIG4 (CMT4J), NT-3 |
| Chédiak-Higashi Syndrome | Immune system | Skin, hair, eyes, | LYST |
| | | neurons | |
| Choroidermia | | | CHM, REP1, |
| Chorioretinal atrophy | eye | | PRDM13, RGR, TEAD1 |
| Chronic Granulomatous Disease | Immune system | | CYBA, CYBB, NCF1, NCF2, NCF4 |
| Chronic Mucocutaneous | Immune system | | AIRE, CARD9, CLEC7A IL12B, |
| Candidiasis | | | IL12B1, IL1F, IL17RA, IL17RC, |
| | | | RORC, STAT1, STAT3, TRAF31P2 |
| Cirrhosis | liver | | KRT18, KRT8, CIRH1A, NAIC, |
| | | | TEX292, KIAA1988 |
| Colon cancer (Familial | Gastrointestinal | | FAP: APC HNPCC: MSH2, |
| adenomatous polyposis (FAP) | | | MLH1, PMS2, SH6, PMS1 |
| and hereditary nonpolyposis | | | |
| colon cancer (HNPCC)) | | | |
| Combined Immunodeficiency | Immune System | | IL2RG, SCIDX1, SCIDX, IMD4); |
| | | | HIV-1 (CCL5, SCYA5, D17S136E, |
| | | | TCP228 |
| Cone(-rod) dystrophy | eye | | AIPL1, CRX, GUA1A, GUCY2D, |
| | | | PITPM3, PROM1, PRPH2, RIMS1, |
| | | | SEMA4A, ABCA4, ADAM9, ATF6, |
| | | | C21ORF2, C8ORF37, CACNA2D4, |
| | | | CDHR1, CERKL, CNGA3, CNGB3, |
| | | | CNNM4, CNAT2, IFT81, KCNV2, |
| | | | PDE6C, PDE6H, POC1B, RAX2, |
| | | | RDH5, RPGRIP1, TTLL5, RetCG1, |
| | | | GUCY2E |
| Congenital Stationary Night | eye | | CABP4, CACNA1F, CACNA2D4, |
| Blindness | | | GNAT1, CPR179, GRK1, GRM6, |
| | | | LRIT3, NYX, PDE6B, RDH5, RHO, |
| | | | RLBP1, RPE65, SAG, SLC24A1, |
| | | | TRPM1, |
| Congenital Fructose Intolerance | Metabolism | | ALDOB |
| Cori's Disease (Glycogen Storage | Various- | | AGL |
| Disease Type III) | wherever | | |
| | glycogen | | |
| | accumulates, | | |
| | particularly | | |
| | liver, heart, | | |
| | skeletal muscle | | |
| Corneal clouding and dystrophy | eye | | APOA1, TGFBI, CSD2, CDGG1, |
| | | | CSD, BIGH3, CDG2, TACSTD2, |
| | | | TROP2, M1S1, VSX1, RINX, PPCD, |
| | | | PPD, KTCN, COL8A2, FECD, |
| | | | PPCD2, PIP5K3, CFD |
| Cornea plana congenital | | | KERA, CNA2 |
| Cri du chat Syndrome, also | | | Deletions involving only band 5p15.2 |
| known as 5p syndrome and cat | | | to the entire short arm of chromosome |
| cry syndrome | | | 5, e.g., CTNND2, TERT, |
| Cystic Fibrosis (CF) | Lungs and | Pancreas, liver, | CTFR, ABCC7, CF, MRP7, SCNN1A, |
| | respiratory | digestive | those described in WO2015157070 |
| | system | system, | |
| | | reproductive | |
| | | system, | |
| | | exocrine, glands, | |
| Diabetic nephropathy | kidney | | Gremlin, 12/15- lipoxygenase, TIM44, |
| Dent Disease (Types 1 and 2) | Kidney | | Type 1: CLCN5, Type 2: ORCL |
| Dentatorubro-Pallidoluysian | CNS, brain, | | Atrophin-1 and Atn1 |
| Atrophy (DRPLA) (aka Haw | muscle | | |
| River and Naito-Oyanagi | | | |
| Disease) | | | |
| Down Syndrome | various | | Chromosome 21 trisomy |
| Drug Addiction | Brain | | Prkce; Drd2; Drd4; ABAT; |
| | | | GRIA2; Grm5; Grin1: Htr1b; Grin2a; |
| | | | Drd3; Pdyn; Gria1 |
| Duane syndrome (Types 1, 2, and | eye | | CHN1, indels on chromosomes 4 and 8 |
| 3, including subgroups A, B and | | | |
| C). Other names for this | | | |
| condition include: Duane's | | | |
| Retraction Syndrome (or DR | | | |
| syndrome), Eye Retraction | | | |
| Syndrome, Retraction Syndrome, | | | |
| Congenital retraction syndrome | | | |
| and Stilling-Turk-Duane | | | |
| Syndrome | | | |
| Duchenne muscular dystrophy | muscle | Cardiovascular, | DMD, BMD, dystrophin gene, intron |
| (DMD) | | respiratory | flanking exon 51 of DMD gene, exon |
| | | | 51 mutations in DMD gene, see also |
| | | | WO2013163628 and U.S. Pat. Pub. |
| | | | 20130145487 |
| Edward's Syndrome | | | Complete or partial trisomy of |
| (Trisomy 18) | | | chromosome 18 |
| Ehlers-Danlos Syndrome (Types | Various | | COL5A1, COL5A2, COL1A1, |
| I-VI) | depending on | | COL3A1, TNXB, PLOD1, COL1A2, |
| | type: including | | FKBP14 and ADAMTS2 |
| | musculoskeletal, | | |
| | eye, vasculature, | | |
| | immune, and | | |
| | skin | | |
| Emery-Dreifuss muscular | muscle | | LMNA, LMN1, EMD2, FPLD, |
| dystrophy | | | CMD1A, HGPS, LGMD1B, LMNA, |
| | | | LMN1, EMD2, FPLD, CMD1A |
| Enhanced S-Cone Syndrome | eye | | NR2E3, NRL |
| Fabry's Disease | Various - | | GLA |
| | including skin, | | |
| | eyes, and | | |
| | gastrointestinal | | |
| | system, kidney, | | |
| | heart, brain, | | |
| | nervous system | | |
| Facioscapulohumeral muscular | muscles | | FSHMD1A, FSHD1A, FRG1, |
| dystrophy | | | |
| Factor H and Factor H-like 1 | blood | | HF1, CFH, HUS |
| Factor V Leiden thrombophilia | blood | | Factor V (F5) |
| and Factor V deficiency | | | |
| Factor V and Factor VII | blood | | MCFD2 |
| deficiency | | | |
| Factor VII deficiency | blood | | F7 |
| Factor X deficiency | blood | | F10 |
| Factor XI deficiency | blood | | F11 |
| Factor XII deficiency | blood | | F12, HAF |
| Factor XIIIA deficiency | blood | | F13A1, F13A |
| Factor XIIIB deficiency | blood | | F13B |
| Familial Hypercholestereolemia | Cardiovascular | | APOB, LDLR, PCSK9 |
| | system | | |
| Familial Mediterranean Fever | Various- | Heart, kidney, | MEFV |
| (FMF) also called recurrent | organs/tissues | brain/CNS, | |
| polyserositis or familial | with serous or | reproductive | |
| paroxysmal polyserositis | synovial | organs | |
| | membranes, | | |
| | skin, joints | | |
| Fanconi Anemia | Various - blood | | FANCA, FACA, FA1, FA, FAA, |
| | (anemia), | | FAAP95, FAAP90, FLJ34064, |
| | immune system, | | FANCC, FANCG, RAD51, BRCA1, |
| | cognitive, | | BRCA2, BRIP1, BACH1, FANCJ, |
| | kidneys, eyes, | | FANCB, FANCD1, FANCD2, |
| | musculoskeletal | | FANCD, FAD, FANCE, FACE, |
| | | | FANCF, FANCI, ERCC4, FANCL, |
| | | | FANCM, PALB2, RAD51C, SLX4, |
| | | | UBE2T, FANCB, XRCC9, PHF9, |
| | | | KIAA1596 |
| Fanconi Syndrome Types I | kidneys | | FRTS1, GATM |
| (Childhood onset) and II (Adult | | | |
| Onset) | | | |
| Fragile X syndrome and related | brain | | FMR1, FMR2; FXR1; FXR2; |
| disorders | | | mGLUR5 |
| Fragile XE Mental Retardation | Brain, nervous | | FMR1 |
| (aka Martin Bell syndrome) | system | | |
| Friedreich Ataxia (FRDA) | Brain, nervous | heart | FXN/X25 |
| | system | | |
| Fuchs endothelial corneal | Eye | | TCF4; COL8A2 |
| dystrophy | | | |
| Galactosemia | Carbohydrate | Various-where | GALT, GALK1, and GALE |
| | metabolism | galactose | |
| | disorder | accumulates - | |
| | | liver, brain, eyes | |
| Gastrointestinal Epithelial | | | CISH |
| Cancer, GI cancer | | | |
| Gaucher Disease (Types 1, 2, and | Fat metabolism | Various-liver, | GBA |
| 3, as well as other unusual forms | disorder | spleen, blood, | |
| that may not fit into these types) | | CNS, skeletal | |
| | | system | |
| Griscelli syndrome | | | |
| Glaucoma | eye | | MYOC, TIGR, GLC1A, JOAG, |
| | | | GPOA, OPTN, GLC1E, FIP2, HYPL, |
| | | | NRP, CYP1B1, GLC3A, OPA1, NTG, |
| | | | NPG, CYP1B1, GLC3A, those |
| | | | described in WO2015153780 |
| Glomerulo sclerosis | kidney | | CC chemokine ligand 2 |
| Glycogen Storage Diseases | Metabolism | | SLC2A2, GLUT2, G6PC, G6PT, |
| Types I-VI -See also Cori's | Diseases | | G6PT1, GAA, LAMP2, LAMPB, |
| Disease, Pompe's Disease, | | | AGL, GDE, GBE1, GYS2, PYGL, |
| McArdle's disease, Hers Disease, | | | PFKM, see also Cori's Disease, |
| and Von Gierke's disease | | | Pompe's Disease, McArdle's disease, |
| | | | Hers Disease, and Von Gierke's |
| | | | disease |
| RBC Glycolytic enzyme | blood | | any mutations in a gene for an enzyme |
| deficiency | | | in the glycolysis pathway including |
| | | | mutations in genes for hexokinases I |
| | | | and II, glucokinase, phosphoglucose |
| | | | isomerase, phosphofructokinase, |
| | | | aldolase Bm triosephosphate |
| | | | isomerease, glyceraldehydee-3- |
| | | | phosphate dehydrogenase, |
| | | | phosphoglycerokinase, |
| | | | phosphoglycerate mutase, enolase I, |
| | | | pyruvate kinase |
| Hartnup's disease | Malabsorption | Various- brain, | SLC6A19 |
| | disease | gastrointestinal, | |
| | | skin, | |
| Hearing Loss | ear | | NOX3, Hes5, BDNF, |
| Hemochromatosis (HH) | Iron absorption | Various- | HFE and H63D |
| | regulation | wherever iron | |
| | disease | accumulates, | |
| | | liver, heart, | |
| | | pancreas, joints, | |
| | | pituitary gland | |
| Hemophagocytic | blood | | PRF1, HPLH2, UNC13D, MUNC13- |
| lymphohistiocytosis disorders | | | 4, HPLH3, HLH3, FHL3 |
| Hemorrhagic disorders | blood | | PI, ATT, F5 |
| Hers disease (Glycogen storage | liver | muscle | PYGL |
| disease Type VI) | | | |
| Hereditary angioedema (HAE) | | | kalikrein B1 |
| Hereditary Hemorrhagic | Skin and | | ACVRL1, ENG and SMAD4 |
| Telangiectasia (Osler-Weber- | mucous | | |
| Rendu Syndrome) | membranes | | |
| Hereditary Spherocytosis | blood | | NK1, EPB42, SLC4A1, SPTA1, and |
| | | | SPTB |
| Hereditary Persistence of Fetal | blood | | HBG1, HBG2, BCL11A, promoter |
| Hemoglobin | | | region of HBG 1 and/or 2 (in the |
| | | | CCAAT box) |
| Hemophilia (hemophilia A | blood | | A: FVIII, F8C, HEMA |
| (Classic) a B (aka Christmas | | | B: FVIX, HEMB |
| discasc) and C) | | | C: F9, F11 |
| Hepatic adenoma | liver | | TCF1, HNF1A, MODY3 |
| Hepatic failure, early onset, and | liver | | SCOD1, SCO1 |
| neurologic disorder | | | |
| Hepatic lipase deficiency | liver | | LIPC |
| Hepatoblastoma, cancer and | liver | | CTNNB1, PDGFRL, PDGRL, PRLTS, |
| carcinomas | | | AXIN1, AXIN, CTNNB1, TP53, P53, |
| | | | LFS1, IGF2R, MPRI, MET, CASP8, |
| | | | MCH5 |
| Hermansky-Pudlak syndrome | Skin, eyes, | | HPS1, HPS3, HPS4, HPS5, HPS6, |
| | blood, lung, | | HPS7, DTNBP1, BLOC1, BLOC1S2, |
| | kidneys, | | BLOC3 |
| | intestine | | |
| HIV susceptibility or infection | Immune system | | IL10, CSIF, CMKBR2, CCR2, |
| | | | CMKBR5, CCCKR5 (CCR5), those in |
| | | | WO2015148670A1 |
| Holoprosencephaly (HPE) | brain | | ACVRL1, ENG, SMAD4 |
| (Alobar, Semilobar, and Lobar) | | | |
| Homocystinuria | Metabolic | Various- | CBS, MTHFR, MTR, MTRR, and |
| | disease | connective | MMADHC |
| | | tissue, muscles, | |
| | | CNS, | |
| | | cardiovascular | |
| | | system | |
| HPV | | | HPV16 and HPV18 E6/E7 |
| HSV1, HSV2, and related | eye | | HSV1 genes (immediate early and late |
| keratitis | | | HSV-1 genes (UL1, 1.5, 5, 6, 8, 9, 12, |
| | | | 15, 16, 18, 19, 22, 23, 26, 26.5, 27, 28, |
| | | | 29, 30, 31, 32, 33, 34, 35, 36, 37, 38, |
| | | | 42, 48, 49.5, 50, 52, 54, S6, RL2, RS1, |
| | | | those described in WO2015153789, |
| | | | WO2015153791 |
| Hunter's Syndrome (aka | Lysosomal | Various- liver, | IDS |
| Mucopolysaccharidosis type II) | storage disease | spleen, eye, | |
| | | joint, heart, | |
| | | brain, skeletal | |
| Huntington's disease (HD) and | Brain, nervous | | HD, HTT, IT15, PRNP, PRIP, JPH3, |
| HD-like disorders | system | | JP3, HDL2, TBP, SCA17, PRKCE; |
| | | | IGF1; EP300; RCOR1; PRKCZ; |
| | | | HDAC4; and TGM2, and those |
| | | | described in WO2013130824, |
| | | | WO2015089354 |
| Hurler's Syndrome (aka | Lysosomal | Various- liver, | IDUA, α-L-iduronidasc |
| mucopolysaccharidosis type I H, | storage disease | spleen, eye, | |
| MPS IH) | | joint, heart, | |
| | | brain, skeletal | |
| Hurler-Scheie syndrome (aka | Lysosomal | Various- liver, | IDUA, α-L-iduronidase |
| mucopolysaccharidosis type I H- | storage disease | spleen, eye, | |
| S, MPS I H-S) | | joint, heart, | |
| | | brain, skeletal | |
| hyaluronidase deficiency (aka | Soft and | | HYAL1 |
| MPS IX) | connective | | |
| | tissues | | |
| Hyper IgM syndrome | Immune system | | CD40L |
| Hyper- tension caused renal | kidney | | Mineral corticoid receptor |
| damage | | | |
| Immunodeficiencies | Immune System | | CD3E, CD3G, AICDA, AID, HIGM2, |
| | | | TNFRSF5, CD40, UNG, DGU, |
| | | | HIGM4, TNFSF5, CD40LG, HIGM1, |
| | | | IGM, FOXP3, IPEX, AIID, XPID, |
| | | | PIDX, TNFRSF14B, TACI |
| Inborn errors of metabolism: | Metabolism | Various organs | See also: Carbohydrate metabolism |
| including urca cycle disorders, | diseases, liver | and cells | disorders (e.g., galactosemia), Amino |
| organic acidemias), fatty acid | | | acid Metabolism disorders (e.g., |
| oxidation defects, amino | | | phenylketonuria), Fatty acid |
| acidopathies, carbohydrate | | | metabolism (e.g., MCAD deficiency), |
| disorders, mitochondrial | | | Urca Cycle disorders (e.g., |
| disorders | | | Citrullinemia), Organic acidemias |
| | | | (e.g., Maple Syrup Urine disease), |
| | | | Mitochondrial disorders (e.g., |
| | | | MELAS), peroxisomal disorders (e.g., |
| | | | Zellweger syndrome) |
| Inflammation | Various | | IL-10; IL-1 (IL-1a; IL-1b); IL-13; IL- |
| | | | 17 (IL-17a (CTLA8); IL- |
| | | | 17b; IL-17c; IL-17d; IL-17f); II-23; |
| | | | Cx3cr1; ptpn22; TNFa; |
| | | | NOD2/CARD15 for IBD; IL-6; IL-12 |
| | | | (IL-12a; IL-12b); |
| | | | CTLA4; Cx3cl1 |
| Inflammatory Bowel Diseases | Gastrointestinal | Joints, skin | NOD2, IRGM, LRRK2, ATG5, |
| (e.g., Ulcerative Colitis and | | | ATG16L1, IRGM, GATM, ECM1, |
| Chron's Disease) | | | CDH1, LAMB1, HNF4A, GNA12, |
| | | | IL10, CARD9/15, CCR6, IL2RA, |
| | | | MST1, TNFSF15, REL, STAT3, |
| | | | IL23R, IL12B, FUT2 |
| Interstitial renal fibrosis | kidney | | TGF-β type II receptor |
| Job's Syndrome (aka Hyper IgE | Immune System | | STAT3, DOCK8 |
| Syndrome) | | | |
| Juvenile Retinoschisis | eye | | RS1, XLRS1 |
| Kabuki Syndrome 1 | | | MLL4, KMT2D |
| Kennedy Discase (aka | Muscles, brain, | | SBMA/SMAX1/AR |
| Spinobulbar Muscular Atrophy) | nervous system | | |
| Klinefelter syndrome | Various- | | Extra X chromosome in males |
| | particularly | | |
| | those involved | | |
| | in development | | |
| | of male | | |
| | characteristics | | |
| Lafora Disease | Brain, CNS | | EMP2A and EMP2B |
| Leber Congenital Amaurosis | eye | | CRB1, RP12, CORD2, CRD, CRX, |
| | | | IMPDH1, OTX2, AIPL1, CABP4, |
| | | | CCT2, CEP290, CLUAP1, CRB1, |
| | | | CRX, DTHD1, GDF6, GUCY2D, |
| | | | IFT140, IQCB1, KCNJ13, LCA5, |
| | | | LRAT, NMNAT1, PRPH2, RD3, |
| | | | RDH12, RPE65, RP20, RPGRIP1, |
| | | | SPATA7, TULP1, LCA1, LCA4, |
| | | | GUC2D, CORD6, LCA3, |
| Lesch-Nyhan Syndrome | Metabolism | Various - joints, | HPRT1 |
| | disease | cognitive, brain, | |
| | | nervous system | |
| Leukocyte deficiencies and | blood | | ITGB2, CD18, LCAMB, LAD, |
| disorders | | | EIF2B1, EIF2BA, EIF2B2, EIF2B3, |
| | | | EIF2B5, LVWM, CACH, CLE, |
| | | | EIF2B4 |
| Leukemia | Blood | | TAL1, TCL5, SCL, TAL2, FLT3, |
| | | | NBS1, NBS, ZNFN1A1, IK1, LYF1, |
| | | | HOXD4, HOX4B, BCR, CML, PHL, |
| | | | ALL, ARNT, KRAS2, RASK2, |
| | | | GMPS, AF10, ARHGEF12, LARG, |
| | | | KIAA0382, CALM, CLTH, CEBPA, |
| | | | CEBP, CHIC2, BTL, FLT3, KIT, |
| | | | PBT, LPP, NPM1, NUP214, D9S46E, |
| | | | CAN, CAIN, RUNX1, CBFA2, |
| | | | AML1, WHSC1L1, NSD3, FLT3, |
| | | | AF1Q, NPM1, NUMA1, ZNF145, |
| | | | PLZF, PML, MYL, STAT5B, AF10, |
| | | | CALM, CLTH, ARL11, ARLTS1, |
| | | | P2RX7, P2X7, BCR, CML, PHL, |
| | | | ALL, GRAF, NF1, VRNF, WSS, |
| | | | NFNS, PTPN11, PTP2C, SHP2, NS1, |
| | | | BCL2, CCND1, PRAD1, BCL1, |
| | | | TCRA, GATA1, GF1, ERYF1, NFE1, |
| | | | ABL1, NQO1, DIA4, NMOR1, |
| | | | NUP214, D9S46E, CAN, CAIN |
| Limb-girdle muscular dystrophy | muscle | | LGMD |
| diseases | | | |
| Lowe syndrome | brain, eyes, | | OCRL |
| | kidneys | | |
| Lupus glomerulo- nephritis | kidney | | MAPK1 |
| Machado- | Brain, CNS, | | ATX3 |
| Joseph's Disease (also known as | muscle | | |
| Spinocerebellar ataxia Type 3) | | | |
| Macular degeneration | eye | | ABC4, CBC1, CHM1, APOE, |
| | | | C1QTNF5, C2, C3, CCL2, CCR2, |
| | | | CD36, CFB, CFH, CFHR1, CFHR3, |
| | | | CNGB3, CP, CRP, CST3, CTSD, |
| | | | CX3CR1, ELOVL4, ERCC6, FBLN5, |
| | | | FBLN6, FSCN2, HMCN1, HTRA1, |
| | | | IL6, IL8, PLEKHA1, PROM1, |
| | | | PRPH2, RPGR, SERPING1, TCOF1, |
| | | | TIMP3, TLR3 |
| Macular Dystrophy | eye | | BEST1, C1QTNF5, CTNNA1, |
| | | | EFEMP1, ELOVL4, FSCN2, |
| | | | GUCA1B, HMCN1, IMPG1, OTX2, |
| | | | PRDM13, PROM1, PRPH2, RP1L1, |
| | | | TIMP3, ABCA4, CFH, DRAM2, |
| | | | IMG1, MFSD8, ADMD, STGD2, |
| | | | STGD3, RDS, RP7, PRPH, AVMD, |
| | | | AOFMD, VMD2 |
| Malattia Leventinesse | eye | | EFEMP1, FBLN3 |
| Maple Syrup Urine Disease | Metabolism | | BCKDHA, BCKDHB, and DBT |
| | disease | | |
| Marfan syndrome | Connective | Musculoskeletal | FBN1 |
| | tissue | | |
| Maroteaux-Lamy Syndrome (aka | Musculoskeletal | Liver, spleen | ARSB |
| MPS VI) | system, nervous | | |
| | system | | |
| McArdle's Disease (Glycogen | Glycogen | muscle | PYGM |
| Storage Disease Type V) | storage disease | | |
| Medullary cystic kidney disease | kidney | | UMOD, HNFJ, FJHN, MCKD2, |
| | | | ADMCKD2 |
| Metachromatic leukodystrophy | Lysosomal | Nervous system | ARSA |
| | storage disease | | |
| Methylmalonic acidemia (MMA) | Metabolism | | MMAA, MMAB, MUT, MMACHC, |
| | disease | | MMADHC, LMBRD1 |
| Morquio Syndrome (aka MPS IV | Connective | heart | GALNS |
| A and B) | tissue, skin, | | |
| | bone, eyes | | |
| Mucopolysaccharidosis diseases | Lysosomal | | See also Hurler/Scheie syndrome, |
| (Types I H/S, I H, II, III A B and | storage disease - | | Hurler disease, Sanfillipo syndrome, |
| C, I S, IVA and B, IX, VII, and | affects various | | Scheie syndrome, Morquio syndrome, |
| VI) | organs/tissues | | hyaluronidase deficiency, Sly |
| | | | syndrome, and Maroteaux-Lamy |
| | | | syndrome |
| Muscular Atrophy | muscle | | VAPB, VAPC, ALS8, SMN1, SMA1, |
| | | | SMA2, SMA3, SMA4, BSCL2, |
| | | | SPG17, GARS, SMAD1, CMT2D, |
| | | | HEXB, IGHMBP2, SMUBP2, |
| | | | CATF1, SMARD1 |
| Muscular dystrophy | muscle | | FKRP, MDC1C, LGMD2I, LAMA2, |
| | | | LAMM, LARGE, KIAA0609, |
| | | | MDC1D, FCMD, TTID, MYOT, |
| | | | CAPN3, CANP3, DYSF, LGMD2B, |
| | | | SGCG, LGMD2C, DMDA1, SCG3, |
| | | | SGCA, ADL, DAG2, LGMD2D, |
| | | | DMDA2, SGCB, LGMD2E, SGCD, |
| | | | SGD, LGMD2F, CMD1L, TCAP, |
| | | | LGMD2G, CMD1N, TRIM32, HT2A, |
| | | | LGMD2H, FKRP, MDC1C, LGMD2I, |
| | | | TTN, CMD1G, TMD, LGMD2J, |
| | | | POMT1, CAV3, LGMD1C, SEPN1, |
| | | | SELN, RSMD1, PLEC1, PLTN, EBS1 |
| Myotonic dystrophy (Type 1 and | Muscles | Eyes, heart, | CNBP (Type 2) and DMPK (Type 1) |
| Type 2) | | endocrine | |
| Neoplasia | | | PTEN; ATM; ATR; EGFR; ERBB2; |
| | | | ERBB3; ERBB4; |
| | | | Notch1; Notch2; Notch3; Notch4; |
| | | | AKT; AKT2; AKT3; HIF; |
| | | | HIF1a; HIF3a; Met; HRG; Bcl2; |
| | | | PPAR alpha; PPAR |
| | | | gamma; WT1 (Wilms Tumor); FGF |
| | | | Receptor Family |
| | | | members (5 members: 1, 2, 3, 4, 5); |
| | | | CDKN2a; APC; RB |
| | | | (retinoblastoma); MEN1; VHL; |
| | | | BRCA1; BRCA2; AR |
| | | | (Androgen Receptor); TSG101; IGF; |
| | | | IGF Receptor; Igf1 (4 |
| | | | variants); Igf2 (3 variants); Igf 1 |
| | | | Receptor; Igf 2 Receptor; |
| | | | Bax; Bcl2; caspases family (9 |
| | | | members: |
| | | | 1, 2, 3, 4, 6, 7, 8, 9, 12); Kras; Apc |
| Neurofibromatosis (NF) (NF1, | brain, spinal | | NF1, NF2 |
| formerly Recklinghausen's NF, | cord, nerves, | | |
| and NF2) | and skin | | |
| Niemann-Pick Lipidosis (Types | Lysosomal | Various- where | Types A and B: SMPD1; Type C: |
| A, B, and C) | Storage Disease | sphingomyelin | NPC1 or NPC2 |
| | | accumulates, | |
| | | particularly | |
| | | spleen, liver, | |
| | | blood, CNS | |
| Noonan Syndrome | Various - | | PTPN11, SOS1, RAF1 and KRAS |
| | musculoskeletal, | | |
| | heart, eyes, | | |
| | reproductive | | |
| | organs, blood | | |
| Norrie Disease or X-linked | eye | | NDP |
| Familial Exudative | | | |
| Vitreoretinopathy | | | |
| North Carolina Macular | eye | | MCDR1 |
| Dystrophy | | | |
| Osteogenesis imperfecta (OI) | bones, | | COL1A1, COL1A2, CRTAP, P3H |
| (Types I, II, III, IV, V, VI, VII) | musculoskeletal | | |
| Osteopetrosis | bones | | LRP5, BMND1, LRP7, LR3, OPPG, |
| | | | VBCH2, CLCN7, CLC7, OPTA2, |
| | | | OSTM1, GL, TCIRG1, TIRC7, |
| | | | OC116, OPTB1 |
| Patau's Syndrome | Brain, heart, | | Additional copy of chromosome 13 |
| (Trisomy 13) | skeletal system | | |
| Parkinson's disease (PD) | Brain, nervous | | SNCA (PARK1), UCHL1 (PARK 5), |
| | system | | and LRRK2 (PARK8), (PARK3), |
| | | | PARK2, PARK4, PARK7 (PARK7), |
| | | | PINK1 (PARK6); x-Synuclein, DJ-1, |
| | | | Parkin, NR4A2, NURR1, NOT, |
| | | | TINUR, SNCAIP, TBP, SCA17, |
| | | | NCAP, PRKN, PDJ, DBH, NDUFV2 |
| Pattern Dystrophy of the RPE | eye | | RDS/peripherin |
| Phenylketonuria (PKU) | Metabolism | Various due to | PAH, PKU1, QDPR, DHPR, PTS |
| | disorder | build-up of | |
| | | phenylalanine, | |
| | | phenyl ketones | |
| | | in tissues and | |
| | | CNS | |
| Polycystic kidney and hepatic | Kidney, liver | | FCYT, PKHD1, ARPKD, PKD1, |
| discase | | | PKD2, PKD4, PKDTS, PRKCSH, |
| | | | G19P1, PCLD, SEC63 |
| Pompe's Disease | Glycogen | Various - heart, | GAA |
| | storage disease | liver, spleen | |
| Porphyria (actually refers to a | Various- | | ALAD, ALAS2, CPOX, FECH, |
| group of different diseases all | wherever heme | | HMBS, PPOX, UROD, or UROS |
| having a specific heme | precursors | | |
| production process abnormality) | accumulate | | |
| posterior polymorphous corneal | eyes | | TCF4; COL8A2 |
| dystrophy | | | |
| Primary Hyperoxaluria (e.g., type | Various - eyes, | | LDHA (lactate dehydrogenase A) and |
| 1) | heart, kidneys, | | hydroxyacid oxidase 1 (HAO1) |
| | skeletal system | | |
| Primary Open Angle Glaucoma | eyes | | MYOC |
| (POAG) | | | |
| Primary sclerosing cholangitis | Liver, | | TCF4; COL8A2 |
| | gallbladder | | |
| Progeria (also called Hutchinson- | All | | LMNA |
| Gilford progeria syndrome) | | | |
| Prader-Willi Syndrome | Musculoskeletal | | Deletion of region of short arm of |
| | system, brain, | | chromosome 15, including UBE3A |
| | reproductive | | |
| | and endocrine | | |
| | system | | |
| Prostate Cancer | prostate | | HOXB13, MSMB, GPRC6A, TP53 |
| Pyruvate Dehydrogenase | Brain, nervous | | PDHA1 |
| Deficiency | system | | |
| Kidney/Renal carcinoma | kidney | | RLIP76, VEGF |
| Rett Syndrome | Brain | | MECP2, RTT, PPMX, MRX16, |
| | | | MRX79, CDKL5, STK9, MECP2, |
| | | | RTT, PPMX, MRX16, MRX79, x- |
| | | | Synuclein, DJ-1 |
| Retinitis pigmentosa (RP) | eye | | ADIPOR1, ABCA4, AGBL5, |
| | | | ARHGEF18, ARL2BP, ARL3, ARL6, |
| | | | BEST1, BBS1, BBS2, C2ORF71, |
| | | | C8ORF37, CA4, CERKL, CLRN1, |
| | | | CNGA1, CMGB1, CRB1, CRX, |
| | | | CYP4V2, DHDDS, DHX38, EMC1, |
| | | | EYS, FAM161A, FSCN2, GPR125, |
| | | | GUCA1B, HK1, HPRPF3, HGSNAT, |
| | | | IDH3B, IMPDH1, IMPG2, IFT140, |
| | | | IFT172, KLHL7, KIAA1549, KIZ, |
| | | | LRAT, MAK, MERTK, MVK, NEK2, |
| | | | NUROD1, NR2E3, NRL, OFD1, |
| | | | PDE6A, PDE6B, PDE6G, POMGNT1, |
| | | | PRCD, PROM1, PRPF3, PRPF4, |
| | | | PRPF6, PRPF8, PRPF31, PRPH2, |
| | | | RPB3, RDH12, REEP6, RP39, RGR, |
| | | | RHO, RLBP1, ROM1, RP1, RP1L1, |
| | | | RPY, RP2, RP9, RPE65, RPGR, |
| | | | SAMD11, SAG, SEMA4A, SLC7A14, |
| | | | SNRNP200, SPP2, SPATA7, TRNT1, |
| | | | TOPORS, TTC8, TULP1, USH2A, |
| | | | ZFN408, ZNF513, see also |
| | | | 20120204282 |
| Scheie syndrome (also known as | Various- liver, | | IDUA, α-L-iduronidase |
| mucopolysaccharidosis type I | spleen, eye, | | |
| S(MPS I-S)) | joint, heart, | | |
| | brain, skeletal | | |
| Schizophrenia | Brain | | Neuregulin1 (Nrg1); Erb4 (receptor for |
| | | | Neuregulin); |
| | | | Complexin1 (Cplx1); Tph1 |
| | | | Tryptophan hydroxylase; Tph2 |
| | | | Tryptophan hydroxylase 2; Neurexin |
| | | | 1; GSK3; GSK3a; |
| | | | GSK3b; 5-HTT (Slc6a4); COMT; |
| | | | DRD (Drd1a): SLC6A3; DAOA; |
| | | | DTNBP1; Dao (Dao1); TCF4; |
| | | | COL8A2 |
| Secretase Related Disorders | Various | | APH-1 (alpha and beta); PSEN1; |
| | | | NCSTN; PEN-2; Nos1, Parp1, Nat1, |
| | | | Nat2, CTSB, APP, APH1B, PSEN2, |
| | | | PSENEN, BACE1, ITM2B, CTSD, |
| | | | NOTCH1, TNF, INS, DYT10, |
| | | | ADAM17, APOE, ACE, STN, TP53, |
| | | | IL6, NGFR, IL1B, ACHE, CTNNB1, |
| | | | IGF1, IFNG, NRG1, CASP3, MAPK1, |
| | | | CDH1, APBB1, HMGCR, CREB1, |
| | | | PTGS2, HES1, CAT, TGFB1, ENO2, |
| | | | ERBB4, TRAPPC10, MAOB, NGF, |
| | | | MMP12, JAG1, CD40LG, PPARG, |
| | | | FGF2, LRP1, NOTCH4, MAPK8, |
| | | | PREP, NOTCH3, PRNP, CTSG, EGF, |
| | | | REN, CD44, SELP, GHR, ADCYAP1, |
| | | | INSR, GFAP, MMP3, MAPK10, SP1, |
| | | | MYC, CTSE, PPARA, JUN, TIMP1, |
| | | | IL5, IL1A, MMP9, HTR4, HSPG2, |
| | | | KRAS, CYCS, SMG1, IL1R1, |
| | | | PROK1, MAPK3, NTRK1, IL13, |
| | | | MME, TKT, CXCR2, CHRM1, |
| | | | ATXN1, PAWR, NOTCJ2, M6PR, |
| | | | CYP46A1, CSNK1D, MAPK14, |
| | | | PRG2, PRKCA, L1 CAM, CD40, |
| | | | NR1I2, JAG2, CTNND1, CMA1, |
| | | | SORT1, DLK1, THEM4, JUP, CD46, |
| | | | CCL11, CAV3, RNASE3, HSPA8, |
| | | | CASP9, CYP3A4, CCR3, TFAP2A, |
| | | | SCP2, CDK4, JOF1A, TCF7L2, |
| | | | B3GALTL, MDM2, RELA, CASP7, |
| | | | IDE, FANP4, CASK, ADCYAP1R1, |
| | | | ATF4, PDGFA, C21ORF33, SCG5, |
| | | | RMF123, NKFB1, ERBB2, CAV1, |
| | | | MMP7, TGFA, RXRA, STX1A, |
| | | | PSMC4, P2RY2, TNFRSF21, DLG1, |
| | | | NUMBL, SPN, PLSCR1, UBQLN2, |
| | | | UBQLN1, PCSK7, SPON1, SILV, |
| | | | QPCT, HESS, GCC1 |
| Selective IgA Deficiency | Immune system | | Type 1: MSH5; Type 2: TNFRSF13B |
| Severe Combined | Immune system | | JAK3, JAKL, DCLRE1C, ARTEMIS, |
| Immunodeficiency (SCID) and | | | SCIDA, RAG1, RAG2, ADA, PTPRC, |
| SCID-X1, and ADA-SCID | | | CD45, LCA, IL7R, CD3D, T3D, |
| | | | IL2RG, SCIDX1, SCIDX, IMD4, |
| | | | those identified in U.S. Pat. App. Pub. |
| | | | 20110225664, 20110091441, |
| | | | 20100229252, 20090271881 and |
| | | | 20090222937; |
| Sickle cell disease | blood | | HBB, BCL11A, BCL11Ae, cis- |
| | | | regulatory elements of the B-globin |
| | | | locus, HBG 1/2 promoter, HBG distal |
| | | | CCAAT box region between −92 |
| | | | and −130 of the HBG Transcription |
| | | | Start Site, those described in |
| | | | WO2015148863, WO 2013/126794, |
| | | | U.S. Pat. Pub. 20110182867 |
| Sly Syndrome (aka MPS VII) | | | GUSB |
| Spinocerebellar Ataxias (SCA | | | ATXN1, ATXN2, ATX3 |
| types 1, 2, 3, 6, 7, 8, 12 and 17) | | | |
| Sorsby Fundus Dystrophy | eye | | TIMP3 |
| Stargardt disease | eye | | ABCR, ELOVL4, ABCA4, PROM1 |
| Tay-Sachs Disease | Lysosomal | Various - CNS, | HEX-A |
| | Storage disease | brain, eye | |
| Thalassemia (Alpha, Beta, Delta) | blood | | HBA1, HBA2 (Alpha), HBB (Beta), |
| | | | HBB and HBD (delta), LCRB, |
| | | | BCL11A, BCL11Ae, cis-regulatory |
| | | | elements of the B-globin locus, HBG |
| | | | 1/2 promoter, those described in |
| | | | WO2015148860, U.S. Pat. Pub. |
| | | | 20110182867, 2015/148860 |
| Thymic Aplasia (DiGeorge | Immune system, | | deletion of 30 to 40 genes in the |
| Syndrome; 22q11.2 deletion | thymus | | middle of chromosome 22 at |
| syndrome) | | | a location known as 22q11.2, including |
| | | | TBX1, DGCR8 |
| Transthyretin amyloidosis | liver | | TTR (transthyretin) |
| (ATTR) | | | |
| trimethylaminuria | Metabolism | | FMO3 |
| | disease | | |
| Trinucleotide Repeat Disorders | Various | | HTT; SBMA/SMAX1/AR; |
| (generally) | | | FXN/X25 ATX3; |
| | | | ATXN1; ATXN2; |
| | | | DMPK; Atrophin-1 and Atn1 |
| | | | (DRPLA Dx); CBP (Creb-BP - global |
| | | | instability); VLDLR; Atxn7; Atxn10; |
| | | | FEN1, TNRC6A, PABPN1, JPH3, |
| | | | MED15, ATXN1, ATXN3, TBP, |
| | | | CACNA1A, ATXN80S, PPP2R2B, |
| | | | ATXN7, TNRC6B, TNRC6C, CELF3, |
| | | | MAB21L1, MSH2, TMEM185A, |
| | | | SIX5, CNPY3, RAXE, GNB2, RPL14, |
| | | | ATXN8, ISR, TTR, EP400, GIGYF2, |
| | | | OGG1, STC1, CNDP1, C10ORF2, |
| | | | MAML3, DKC1, PAXIP1, CASK, |
| | | | MAPT, SP1, POLG, AFF2, THBS1, |
| | | | TP53, ESR1, CGGBP1, ABT1, KLK3, |
| | | | PRNP, JUN, KCNN3, BAX, FRAXA, |
| | | | KBTBD10, MBNL1, RAD51, |
| | | | NCOA3, ERDA1, TSC1, COMP, |
| | | | GGLC, RRAD, MSH3, DRD2, CD44, |
| | | | CTCF, CCND1, CLSPN, MEF2A, |
| | | | PTPRU, GAPDH, TRIM22, WT1, |
| | | | AHR, GPX1, TPMT, NDP, ARX, |
| | | | TYR, EGR1, UNG, NUMBL, FABP2, |
| | | | EN2, CRYGC, SRP14, CRYGB, |
| | | | PDCD1, HOXA1, ATXN2L, PMS2, |
| | | | GLA, CBL, FTH1, IL12RB2, OTX2, |
| | | | HOXA5, POLG2, DLX2, AHRR, |
| | | | MANF, RMEM158, see also |
| | | | 20110016540 |
| Turner's Syndrome (XO) | Various - | | Monosomy X |
| | reproductive | | |
| | organs, and sex | | |
| | characteristics, | | |
| | vasculature | | |
| Tuberous Sclerosis | CNS, heart, | | TSC1, TSC2 |
| | kidneys | | |
| Usher syndrome (Types I, II, and | Ears, eyes | | ABHD12, CDH23, CIB2, CLRN1, |
| III) | | | DFNB31, GPR98, HARS, MYO7A, |
| | | | PCDH15, USH1C, USH1G, USH2A, |
| | | | USH11A, those described in |
| | | | WO2015134812A1 |
| Velocardiofacial syndrome (aka | Various - | | Many genes are deleted, COM, TBX1, |
| 22q11.2 deletion syndrome, | skeletal, heart, | | and other are associated with |
| DiGeorge syndrome, conotruncal | kidney, immune | | symptoms |
| anomaly face syndrome (CTAF), | system, brain | | |
| autosomal dominant Opitz G/BB | | | |
| syndrome or Cayler cardiofacial | | | |
| syndrome) | | | |
| Von Gierke's Disease (Glycogen | Glycogen | Various - liver, | G6PC and SLC37A4 |
| Storage Disease type I) | Storage disease | kidney | |
| Von Hippel-Lindau Syndrome | Various - cell | CNS, Kidney, | VHL |
| | growth | Eye, visceral | |
| | regulation | organs | |
| | disorder | | |
| Von Willebrand Disease (Types | blood | | VWF |
| I, II and III) | | | |
| Wilson Disease | Various - | Liver, brains, | ATP7B |
| | Copper Storage | eyes, other | |
| | Disease | tissues where | |
| | | copper builds up | |
| Wiskott-Aldrich Syndrome | Immune System | | WAS |
| Xeroderma Pigmentosum | Skin | Nervous system | POLH |
| XXX Syndrome | Endocrine, brain | | X chromosome trisomy |

[0871] In one embodiment, the compositions, systems, or components thereof can be used treat or prevent a disease in a subject by modifying one or more genes associated with one or more cellular functions, such as any one or more of those in Table 4B. In one embodiment, the disease is a genetic disease or disorder. In some of embodiments, the composition, system, or component thereof can modify one or more genes or polynucleotides associated with one or more genetic diseases such as any set forth in Table 4B.

TABLE 4B
Exemplary Genes controlling Cellular Functions

| CELLULAR FUNCTION | GENES |
|---|---|
| PI3K/AKT Signaling | PRKCE; ITGAM; ITGA5; IRAK1; PRKAA2; EIF2AK2; PTEN; EIF4E; |
| | PRKCZ; GRK6; MAPK1; TSC1; PLK1; AKT2; IKBKB; PIK3CA; CDK8; |
| | CDKN1B; NFKB2; BCL2; PIK3CB; PPP2R1A; MAPK8; BCL2L1; MAPK3; |
| | TSC2; ITGA1; KRAS; EIF4EBP1; RELA; PRKCD; NOS3; |
| | PRKAA1; MAPK9; CDK2; PPP2CA; PIM1; ITGB7; |
| | YWHAZ; ILK; TP53; RAF1; IKBKG; RELB; DYRK1A; |
| | CDKN1A; ITGB1; MAP2K2; JAK1; AKT1; JAK2; PIK3R1; |
| | CHUK; PDPK1; PPP2R5C; CTNNB1; MAP2K1; NFKB1; |
| | PAK3; ITGB3; CCND1; GSK3A; FRAP1; SFN; ITGA2; |
| | TTK; CSNK1A1; BRAF; GSK3B; AKT3; FOXO1; SGK; |
| | HSP90AA1; RPS6KB1 |
| ERK/MAPK Signaling | PRKCE; ITGAM; ITGA5; HSPB1; IRAK1; PRKAA2; |
| | EIF2AK2; RAC1; RAP1A; TLN1; EIF4E; ELK1; GRK6; |
| | MAPK1; RAC2; PLK1; AKT2; PIK3CA; CDK8; CREB1; |
| | PRKCI; PTK2; FOS; RPS6KA4; PIK3CB; PPP2R1A; |
| | PIK3C3; MAPK8; MAPK3; ITGA1; ETS1; KRAS; MYCN; |
| | EIF4EBP1; PPARG; PRKCD; PRKAA1; MAPK9; SRC; |
| | CDK2; PPP2CA; PIM1; PIK3C2A; ITGB7; YWHAZ; |
| | PPP1CC; KSR1; PXN; RAF1; FYN; DYRK1A; ITGB1; |
| | MAP2K2; PAK4; PIK3R1; STAT3; PPP2R5C; MAP2K1; |
| | PAK3; ITGB3; ESR1; ITGA2; MYC; TTK; CSNK1A1; |
| | CRKL; BRAF; ATF4; PRKCA; SRF; STAT1; SGK |
| Glucocorticoid Receptor | RAC1; TAF4B; EP300; SMAD2; TRAF6; PCAF; ELK1; |
| Signaling | MAPK1; SMAD3; AKT2; IKBKB; NCOR2; UBE2I; |
| | PIK3CA; CREB1; FOS; HSPA5; NFKB2; BCL2; |
| | MAP3K14; STAT5B; PIK3CB; PIK3C3; MAPK8; BCL2L1; |
| | MAPK3; TSC22D3; MAPK10; NRIP1; KRAS; MAPK13; |
| | RELA; STAT5A; MAPK9; NOS2A; PBX1; NR3C1; |
| | PIK3C2A; CDKN1C; TRAF2; SERPINE1; NCOA3; |
| | MAPK14; TNF; RAF1; IKBKG; MAP3K7; CREBBP; |
| | CDKN1A; MAP2K2; JAK1; IL8; NCOA2; AKT1; JAK2; |
| | PIK3R1; CHUK; STAT3; MAP2K1; NFKB1; TGFBR1; |
| | ESR1; SMAD4; CEBPB; JUN; AR; AKT3; CCL2; MMP1; |
| | STAT1; IL6; HSP90AA1 |
| Axonal Guidance Signaling | PRKCE; ITGAM; ROCK1; ITGA5; CXCR4; ADAM12; |
| | IGF1; RAC1; RAP1A; EIF4E; PRKCZ; NRP1; NTRK2; |
| | ARHGEF7; SMO; ROCK2; MAPK1; PGF; RAC2; |
| | PTPN11; GNAS; AKT2; PIK3CA; ERBB2; PRKCI; PTK2; |
| | CFL1; GNAQ; PIK3CB; CXCL12; PIK3C3; WNT11; |
| | PRKD1; GNB2L1; ABL1; MAPK3; ITGA1; KRAS; RHOA; |
| | PRKCD; PIK3C2A; ITGB7; GLI2; PXN; VASP; RAF1; |
| | FYN; ITGB1; MAP2K2; PAK4; ADAM17; AKT1; PIK3R1; |
| | GLI1; WNT5A; ADAM10; MAP2K1; PAK3; ITGB3; |
| | CDC42; VEGFA; ITGA2; EPHA8; CRKL; RND1; GSK3B; |
| | AKT3; PRKCA |
| Ephrin Receptor Signaling | PRKCE; ITGAM; ROCK1; ITGA5; CXCR4; IRAK1; |
| Actin Cytoskeleton | PRKAA2; EIF2AK2; RAC1; RAP1A; GRK6; ROCK2; |
| Signaling | MAPK1; PGF; RAC2; PTPN11; GNAS; PLK1; AKT2; |
| | DOK1; CDK8; CREB1; PTK2; CFL1; GNAQ; MAP3K14; |
| | CXCL12; MAPK8; GNB2L1; ABL1; MAPK3; ITGA1; |
| | KRAS; RHOA; PRKCD; PRKAA1; MAPK9; SRC; CDK2; |
| | PIM1; ITGB7; PXN; RAF1; FYN; DYRK1A; ITGB1; |
| | MAP2K2; PAK4; AKT1; JAK2; STAT3; ADAM10; |
| | MAP2K1; PAK3; ITGB3; CDC42; VEGFA; ITGA2; |
| | EPHA8; TTK; CSNK1A1; CRKL; BRAF; PTPN13; ATF4; |
| | AKT3; SGK |
| | ACTN4; PRKCE; ITGAM; ROCK1; ITGA5; IRAK1; |
| | PRKAA2; EIF2AK2; RAC1; INS; ARHGEF7; GRK6; |
| | ROCK2; MAPK1; RAC2; PLK1; AKT2; PIK3CA; CDK8; |
| | PTK2; CFL1; PIK3CB; MYH9; DIAPH1; PIK3C3; MAPK8; |
| | F2R; MAPK3; SLC9A1; ITGA1; KRAS; RHOA; PRKCD; |
| | PRKAA1; MAPK9; CDK2; PIM1; PIK3C2A; ITGB7; |
| | PPP1CC; PXN; VIL2; RAF1; GSN; DYRK1A; ITGB1; |
| | MAP2K2; PAK4; PIP5K1A; PIK3R1; MAP2K1; PAK3; |
| | ITGB3; CDC42; APC; ITGA2; TTK; CSNK1A1; CRKL; |
| | BRAF; VAV3; SGK |
| Huntington's Disease | PRKCE; IGF1; EP300; RCOR1; PRKCZ; HDAC4; TGM2; |
| Signaling | MAPK1; CAPNS1; AKT2; EGFR; NCOR2; SP1; CAPN2; |
| | PIK3CA; HDAC5; CREB1; PRKCI; HSPA5; REST; |
| | GNAQ; PIK3CB; PIK3C3; MAPK8; IGF1R; PRKD1; |
| | GNB2L1; BCL2L1; CAPN1; MAPK3; CASP8; HDAC2; |
| | HDAC7A; PRKCD; HDAC11; MAPK9; HDAC9; PIK3C2A; |
| | HDAC3; TP53; CASP9; CREBBP; AKT1; PIK3R1; |
| | PDPK1; CASP1; APAF1; FRAP1; CASP2; JUN; BAX; |
| | ATF4; AKT3; PRKCA; CLTC; SGK; HDAC6; CASP3 |
| Apoptosis Signaling | PRKCE; ROCK1; BID; IRAK1; PRKAA2; EIF2AK2; BAK1; |
| | BIRC4; GRK6; MAPK1; CAPNS1; PLK1; AKT2; IKBKB; |
| | CAPN2; CDK8; FAS; NFKB2; BCL2; MAP3K14; MAPK8; |
| | BCL2L1; CAPN1; MAPK3; CASP8; KRAS; RELA; |
| | PRKCD; PRKAA1; MAPK9; CDK2; PIM1; TP53; TNF; |
| | RAF1; IKBKG; RELB; CASP9; DYRK1A; MAP2K2; |
| | CHUK; APAF1; MAP2K1; NFKB1; PAK3; LMNA; CASP2; |
| | BIRC2; TTK; CSNK1A1; BRAF; BAX; PRKCA; SGK; |
| | CASP3; BIRC3; PARP1 |
| B Cell Receptor Signaling | RAC1; PTEN; LYN; ELK1; MAPK1; RAC2; PTPN11; |
| | AKT2; IKBKB; PIK3CA; CREB1; SYK; NFKB2; CAMK2A; |
| | MAP3K14; PIK3CB; PIK3C3; MAPK8; BCL2L1; ABL1; |
| | MAPK3; ETS1; KRAS; MAPK13; RELA; PTPN6; MAPK9; |
| | EGR1; PIK3C2A; BTK; MAPK14; RAF1; IKBKG; RELB; |
| | MAP3K7; MAP2K2; AKT1; PIK3R1; CHUK; MAP2K1; |
| | NFKB1; CDC42; GSK3A; FRAP1; BCL6; BCL 10; JUN; |
| | GSK3B; ATF4; AKT3; VAV3; RPS6KB1 |
| Leukocyte Extravasation | ACTN4; CD44; PRKCE; ITGAM; ROCK1; CXCR4; CYBA; |
| Signaling | RAC1; RAP1A; PRKCZ; ROCK2; RAC2; PTPN11; |
| | MMP14; PIK3CA; PRKCI; PTK2; PIK3CB; CXCL12; |
| | PIK3C3; MAPK8; PRKD1; ABL1; MAPK10; CYBB; |
| | MAPK13; RHOA; PRKCD; MAPK9; SRC; PIK3C2A; BTK; |
| | MAPK14; NOX1; PXN; VIL2; VASP; ITGB1; MAP2K2; |
| | CTNND1; PIK3R1; CTNNB1; CLDN1; CDC42; F11R; ITK; |
| | CRKL; VAV3; CTTN; PRKCA; MMP1; MMP9 |
| Integrin Signaling | ACTN4; ITGAM; ROCK1; ITGA5; RAC1; PTEN; RAP1A; |
| | TLN1; ARHGEF7; MAPK1; RAC2; CAPNS1; AKT2; |
| | CAPN2; PIK3CA; PTK2; PIK3CB; PIK3C3; MAPK8; |
| | CAV1; CAPN1; ABL1; MAPK3; ITGA1; KRAS; RHOA; |
| | SRC; PIK3C2A; ITGB7; PPP1CC; ILK; PXN; VASP; |
| | RAF1; FYN; ITGB1; MAP2K2; PAK4; AKT1; PIK3R1; |
| | TNK2; MAP2K1; PAK3; ITGB3; CDC42; RND3; ITGA2; |
| | CRKL; BRAF; GSK3B; AKT3 |
| Acute Phase Response | IRAK1; SOD2; MYD88; TRAF6; ELK1; MAPK1; PTPN11; |
| Signaling | AKT2; IKBKB; PIK3CA; FOS; NFKB2; MAP3K14; |
| | PIK3CB; MAPK8; RIPK1; MAPK3; IL6ST; KRAS; |
| | MAPK13; IL6R; RELA; SOCS1; MAPK9; FTL; NR3C1; |
| | TRAF2; SERPINE1; MAPK14; TNF; RAF1; PDK1; |
| | IKBKG; RELB; MAP3K7; MAP2K2; AKT1; JAK2; PIK3R1; |
| | CHUK; STAT3; MAP2K1; NFKB1; FRAP1; CEBPB; JUN; |
| | AKT3; IL1R1; IL6 |
| PTEN Signaling | ITGAM; ITGA5; RAC1; PTEN; PRKCZ; BCL2L11; |
| | MAPK1; RAC2; AKT2; EGFR; IKBKB; CBL; PIK3CA; |
| | CDKN1B; PTK2; NFKB2; BCL2; PIK3CB; BCL2L1; |
| | MAPK3; ITGA1; KRAS; ITGB7; ILK; PDGFRB; INSR; |
| | RAF1; IKBKG; CASP9; CDKN1A; ITGB1; MAP2K2; |
| | AKT1; PIK3R1; CHUK; PDGFRA; PDPK1; MAP2K1; |
| | NFKB1; ITGB3; CDC42; CCND1; GSK3A; ITGA2; |
| | GSK3B; AKT3; FOXO1; CASP3; RPS6KB1 |
| p53 Signaling | PTEN; EP300; BBC3; PCAF; FASN; BRCA1; GADD45A; |
| Aryl Hydrocarbon Receptor | BIRC5; AKT2; PIK3CA; CHEK1; TP53INP1; BCL2; |
| Signaling | PIK3CB; PIK3C3; MAPK8; THBS1; ATR; BCL2L1; E2F1; |
| | PMAIP1; CHEK2; TNFRSF10B; TP73; RB1; HDAC9; |
| | CDK2; PIK3C2A; MAPK14; TP53; LRDD; CDKN1A; |
| | HIPK2; AKT1; PIK3R1; RRM2B; APAF1; CTNNB1; |
| | SIRT1; CCND1; PRKDC; ATM; SFN; CDKN2A; JUN; |
| | SNAI2; GSK3B; BAX; AKT3 |
| | HSPB1; EP300; FASN; TGM2; RXRA; MAPK1; NQO1; |
| | NCOR2; SP1; ARNT; CDKN1B; FOS; CHEK1; |
| | SMARCA4; NFKB2; MAPK8; ALDH1A1; ATR; E2F1; |
| | MAPK3; NRIP1; CHEK2; RELA; TP73; GSTP1; RB1; |
| | SRC; CDK2; AHR; NFE2L2; NCOA3; TP53; TNF; |
| | CDKN1A; NCOA2; APAF1; NFKB1; CCND1; ATM; ESR1; |
| | CDKN2A; MYC; JUN; ESR2; BAX; IL6; CYP1B1; |
| | HSP90AA1 |
| Xenobiotic Metabolism | PRKCE; EP300; PRKCZ; RXRA; MAPK1; NQO1; |
| Signaling | NCOR2; PIK3CA; ARNT; PRKCI; NFKB2; CAMK2A; |
| | PIK3CB; PPP2R1A; PIK3C3; MAPK8; PRKD1; |
| | ALDH1A1; MAPK3; NRIP1; KRAS; MAPK13; PRKCD; |
| | GSTP1; MAPK9; NOS2A; ABCB1; AHR; PPP2CA; FTL; |
| | NFE2L2; PIK3C2A; PPARGC1A; MAPK14; TNF; RAF1; |
| | CREBBP; MAP2K2; PIK3R1; PPP2R5C; MAP2K1; |
| | NFKB1; KEAP1; PRKCA; EIF2AK3; IL6; CYP1B1; |
| | HSP90AA1 |
| SAPK/JNK Signaling | PRKCE; IRAK1; PRKAA2; EIF2AK2; RAC1; ELK1; |
| | GRK6; MAPK1; GADD45A; RAC2; PLK1; AKT2; PIK3CA; |
| | FADD; CDK8; PIK3CB; PIK3C3; MAPK8; RIPK1; |
| | GNB2L1; IRS1; MAPK3; MAPK10; DAXX; KRAS; |
| | PRKCD; PRKAA1; MAPK9; CDK2; PIM1; PIK3C2A; |
| | TRAF2; TP53; LCK; MAP3K7; DYRK1A; MAP2K2; |
| | PIK3R1; MAP2K1; PAK3; CDC42; JUN; TTK; CSNK1A1; |
| | CRKL; BRAF; SGK |
| PPAr/RXR Signaling | PRKAA2; EP300; INS; SMAD2; TRAF6; PPARA; FASN; |
| | RXRA; MAPK1; SMAD3; GNAS; IKBKB; NCOR2; |
| | ABCA1; GNAQ; NFKB2; MAP3K14; STAT5B; MAPK8; |
| | IRS1; MAPK3; KRAS; RELA; PRKAA1; PPARGC1A; |
| | NCOA3; MAPK14; INSR; RAF1; IKBKG; RELB; MAP3K7; |
| | CREBBP; MAP2K2; JAK2; CHUK; MAP2K1; NFKB1; |
| | TGFBR1; SMAD4; JUN; IL1R1; PRKCA; IL6; HSP90AA1; |
| | ADIPOQ |
| NF-KB Signaling | IRAK1; EIF2AK2; EP300; INS; MYD88; PRKCZ; TRAF6; |
| | TBK1; AKT2; EGFR; IKBKB; PIK3CA; BTRC; NFKB2; |
| | MAP3K14; PIK3CB; PIK3C3; MAPK8; RIPK1; HDAC2; |
| | KRAS; RELA; PIK3C2A; TRAF2; TLR4; PDGFRB; TNF; |
| | INSR; LCK; IKBKG; RELB; MAP3K7; CREBBP; AKT1; |
| | PIK3R1; CHUK; PDGFRA; NFKB1; TLR2; BCL10; |
| | GSK3B; AKT3; TNFAIP3; IL1R1 |
| Neuregulin Signaling | ERBB4; PRKCE; ITGAM; ITGA5; PTEN; PRKCZ; ELK1; |
| Wnt & Beta catenin | MAPK1; PTPN11; AKT2; EGFR; ERBB2; PRKCI; |
| Signaling | CDKN1B; STAT5B; PRKD1; MAPK3; ITGA1; KRAS; |
| | PRKCD; STAT5A; SRC; ITGB7; RAF1; ITGB1; MAP2K2; |
| | ADAM17; AKT1; PIK3R1; PDPK1; MAP2K1; ITGB3; |
| | EREG; FRAP1; PSEN1; ITGA2; MYC; NRG1; CRKL; |
| | AKT3; PRKCA; HSP90AA1; RPS6KB1 |
| | CD44; EP300; LRP6; DVL3; CSNK1E; GJA1; SMO; |
| | AKT2; PIN1; CDH1; BTRC; GNAQ; MARK2; PPP2R1A; |
| | WNT11; SRC; DKK1; PPP2CA; SOX6; SFRP2; ILK; |
| | LEF1; SOX9; TP53; MAP3K7; CREBBP; TCF7L2; AKT1; |
| | PPP2R5C; WNT5A; LRP5; CTNNB1; TGFBR1; CCND1; |
| | GSK3A; DVL1; APC; CDKN2A; MYC; CSNK1A1; GSK3B; |
| | AKT3; SOX2 |
| Insulin Receptor Signaling | PTEN; INS; EIF4E; PTPN1; PRKCZ; MAPK1; TSC1; |
| | PTPN11; AKT2; CBL; PIK3CA; PRKCI; PIK3CB; PIK3C3; |
| | MAPK8; IRS1; MAPK3; TSC2; KRAS; EIF4EBP1; |
| | SLC2A4; PIK3C2A; PPP1CC; INSR; RAF1; FYN; |
| | MAP2K2; JAK1; AKT1; JAK2; PIK3R1; PDPK1; MAP2K1; |
| | GSK3A; FRAP1; CRKL; GSK3B; AKT3; FOXO1; SGK; |
| | RPS6KB1 |
| IL-6 Signaling | HSPB1; TRAF6; MAPKAPK2; ELK1; MAPK1; PTPN11; |
| | IKBKB; FOS; NFKB2; MAP3K14; MAPK8; MAPK3; |
| | MAPK10; IL6ST; KRAS; MAPK13; IL6R; RELA; SOCS1; |
| | MAPK9; ABCB1; TRAF2; MAPK14; TNF; RAF1; IKBKG; |
| | RELB; MAP3K7; MAP2K2; IL8; JAK2; CHUK; STAT3; |
| | MAP2K1; NFKB1; CEBPB; JUN; IL1R1; SRF; IL6 |
| Hepatic Cholestasis | PRKCE; IRAK1; INS; MYD88; PRKCZ; TRAF6; PPARA; |
| | RXRA; IKBKB; PRKCI; NFKB2; MAP3K14; MAPK8; |
| | PRKD1; MAPK10; RELA; PRKCD; MAPK9; ABCB1; |
| | TRAF2; TLR4; TNF; INSR; IKBKG; RELB; MAP3K7; IL8; |
| | CHUK; NR1H2; TJP2; NFKB1; ESR1; SREBF1; FGFR4; |
| | JUN; IL1R1; PRKCA; IL6 |
| IGF-1 Signaling | IGF1; PRKCZ; ELK1; MAPK1; PTPN11; NEDD4; AKT2; |
| | PIK3CA; PRKCI; PTK2; FOS; PIK3CB; PIK3C3; MAPK8; |
| | IGF1R; IRS1; MAPK3; IGFBP7; KRAS; PIK3C2A; |
| | YWHAZ; PXN; RAF1; CASP9; MAP2K2; AKT1; PIK3R1; |
| | PDPK1; MAP2K1; IGFBP2; SFN; JUN; CYR61; AKT3; |
| | FOXO1; SRF; CTGF; RPS6KB1 |
| NRF2-mediated Oxidative | PRKCE; EP300; SOD2; PRKCZ; MAPK1; SQSTM1; |
| Stress Response | NQO1; PIK3CA; PRKCI; FOS; PIK3CB; PIK3C3; MAPK8; |
| | PRKD1; MAPK3; KRAS; PRKCD; GSTP1; MAPK9; FTL; |
| | NFE2L2; PIK3C2A; MAPK14; RAF1; MAP3K7; CREBBP; |
| | MAP2K2; AKT1; PIK3R1; MAP2K1; PPIB; JUN; KEAP1; |
| | GSK3B; ATF4; PRKCA; EIF2AK3; HSP90AA1 |
| Hepatic Fibrosis/Hepatic | EDN1; IGF1; KDR; FLT1; SMAD2; FGFR1; MET; PGF; |
| Stellate Cell Activation | SMAD3; EGFR; FAS; CSF1; NFKB2; BCL2; MYH9; |
| | IGF1R; IL6R; RELA; TLR4; PDGFRB; TNF; RELB; IL8; |
| | PDGFRA; NFKB1; TGFBR1; SMAD4; VEGFA; BAX; |
| | IL1R1; CCL2; HGF; MMP1; STAT1; IL6; CTGF; MMP9 |
| PPAR Signaling | EP300; INS; TRAF6; PPARA; RXRA; MAPK1; IKBKB; |
| | NCOR2; FOS; NFKB2; MAP3K14; STAT5B; MAPK3; |
| | NRIP1; KRAS; PPARG; RELA; STAT5A; TRAF2; |
| | PPARGC1A; PDGFRB; TNF; INSR; RAF1; IKBKG; |
| | RELB; MAP3K7; CREBBP; MAP2K2; CHUK; PDGFRA; |
| | MAP2K1; NFKB1; JUN; IL1R1; HSP90AA1 |
| Fc Epsilon RI Signaling | PRKCE; RAC1; PRKCZ; LYN; MAPK1; RAC2; PTPN11; |
| | AKT2; PIK3CA; SYK; PRKCI; PIK3CB; PIK3C3; MAPK8; |
| | PRKD1; MAPK3; MAPK10; KRAS; MAPK13; PRKCD; |
| | MAPK9; PIK3C2A; BTK; MAPK14; TNF; RAF1; FYN; |
| | MAP2K2; AKT1; PIK3R1; PDPK1; MAP2K1; AKT3; |
| | VAV3; PRKCA |
| G-Protein Coupled | PRKCE; RAP1A; RGS16; MAPK1; GNAS; AKT2; IKBKB; |
| Receptor Signaling | PIK3CA; CREB1; GNAQ; NFKB2; CAMK2A; PIK3CB; |
| | PIK3C3; MAPK3; KRAS; RELA; SRC; PIK3C2A; RAF1; |
| | IKBKG; RELB; FYN; MAP2K2; AKT1; PIK3R1; CHUK; |
| | PDPK1; STAT3; MAP2K1; NFKB1; BRAF; ATF4; AKT3; |
| | PRKCA |
| Inositol Phosphate | PRKCE; IRAK1; PRKAA2; EIF2AK2; PTEN; GRK6; |
| Metabolism | MAPK1; PLK1; AKT2; PIK3CA; CDK8; PIK3CB; PIK3C3; |
| | MAPK8; MAPK3; PRKCD; PRKAA1; MAPK9; CDK2; |
| | PIM1; PIK3C2A; DYRK1A; MAP2K2; PIP5K1A; PIK3R1; |
| | MAP2K1; PAK3; ATM; TTK; CSNK1A1; BRAF; SGK |
| PDGF Signaling | EIF2AK2; ELK1; ABL2; MAPK1; PIK3CA; FOS; PIK3CB; |
| | PIK3C3; MAPK8; CAV1; ABL1; MAPK3; KRAS; SRC; |
| | PIK3C2A; PDGFRB; RAF1; MAP2K2; JAK1; JAK2; |
| | PIK3R1; PDGFRA; STAT3; SPHK1; MAP2K1; MYC; |
| | JUN; CRKL; PRKCA; SRF; STAT1; SPHK2 |
| VEGF Signaling | ACTN4; ROCK1; KDR; FLT1; ROCK2; MAPK1; PGF; |
| | AKT2; PIK3CA; ARNT; PTK2; BCL2; PIK3CB; PIK3C3; |
| | BCL2L1; MAPK3; KRAS; HIF1A; NOS3; PIK3C2A; PXN; |
| | RAF1; MAP2K2; ELAVL1; AKT1; PIK3R1; MAP2K1; SFN; |
| | VEGFA; AKT3; FOXO1; PRKCA |
| Natural Killer Cell Signaling | PRKCE; RAC1; PRKCZ; MAPK1; RAC2; PTPN11; |
| | KIR2DL3; AKT2; PIK3CA; SYK; PRKCI; PIK3CB; |
| | PIK3C3; PRKD1; MAPK3; KRAS; PRKCD; PTPN6; |
| | PIK3C2A; LCK; RAF1; FYN; MAP2K2; PAK4; AKT1; |
| | PIK3R1; MAP2K1; PAK3; AKT3; VAV3; PRKCA |
| Cell Cycle: G1/S | HDAC4; SMAD3; SUV39H1; HDAC5; CDKN1B; BTRC; |
| Checkpoint Regulation | ATR; ABL1; E2F1; HDAC2; HDAC7A; RB1; HDAC11; |
| | HDAC9; CDK2; E2F2; HDAC3; TP53; CDKN1A; CCND1; |
| | E2F4; ATM; RBL2; SMAD4; CDKN2A; MYC; NRG1; |
| | GSK3B; RBL1; HDAC6 |
| T Cell Receptor Signaling | RAC1; ELK1; MAPK1; IKBKB; CBL; PIK3CA; FOS; |
| | NFKB2; PIK3CB; PIK3C3; MAPK8; MAPK3; KRAS; |
| | RELA; PIK3C2A; BTK; LCK; RAF1; IKBKG; RELB; FYN; |
| | MAP2K2; PIK3R1; CHUK; MAP2K1; NFKB1; ITK; BCL10; |
| | JUN; VAV3 |
| Death Receptor Signaling | CRADD; HSPB1; BID; BIRC4; TBK1; IKBKB; FADD; |
| | FAS; NFKB2; BCL2; MAP3K14; MAPK8; RIPK1; CASP8; |
| | DAXX; TNFRSF10B; RELA; TRAF2; TNF; IKBKG; RELB; |
| | CASP9; CHUK; APAF1; NFKB1; CASP2; BIRC2; CASP3; |
| | BIRC3 |
| FGF Signaling | RAC1; FGFR1; MET; MAPKAPK2; MAPK1; PTPN11; |
| | AKT2; PIK3CA; CREB1; PIK3CB; PIK3C3; MAPK8; |
| | MAPK3; MAPK13; PTPN6; PIK3C2A; MAPK14; RAF1; |
| | AKT1; PIK3R1; STAT3; MAP2K1; FGFR4; CRKL; ATF4; |
| | AKT3; PRKCA; HGF |
| GM-CSF Signaling | LYN; ELK1; MAPK1; PTPN11; AKT2; PIK3CA; CAMK2A; |
| | STAT5B; PIK3CB; PIK3C3; GNB2L1; BCL2L1; MAPK3; |
| | ETS1; KRAS; RUNX1; PIM1; PIK3C2A; RAF1; MAP2K2; |
| | AKT1; JAK2; PIK3R1; STAT3; MAP2K1; CCND1; AKT3; |
| | STAT1 |
| Amyotrophic Lateral | BID; IGF1; RAC1; BIRC4; PGF; CAPNS1; CAPN2; |
| Sclerosis Signaling | PIK3CA; BCL2; PIK3CB; PIK3C3; BCL2L1; CAPN1; |
| | PIK3C2A; TP53; CASP9; PIK3R1; RAB5A; CASP1; |
| | APAF1; VEGFA; BIRC2; BAX; AKT3; CASP3; BIRC3 |
| JAK/Stat Signaling | PTPN1; MAPK1; PTPN11; AKT2; PIK3CA; STAT5B; |
| | PIK3CB; PIK3C3; MAPK3; KRAS; SOCS1; STAT5A; |
| | PTPN6; PIK3C2A; RAF1; CDKN1A; MAP2K2; JAK1; |
| | AKT1; JAK2; PIK3R1; STAT3; MAP2K1; FRAP1; AKT3; |
| | STAT1 |
| Nicotinate and Nicotinamide | PRKCE; IRAK1; PRKAA2; EIF2AK2; GRK6; MAPK1; |
| Metabolism | PLK1; AKT2; CDK8; MAPK8; MAPK3; PRKCD; PRKAA1; |
| | PBEF1; MAPK9; CDK2; PIM1; DYRK1A; MAP2K2; |
| | MAP2K1; PAK3; NT5E; TTK; CSNK1A1; BRAF; SGK |
| Chemokine Signaling | CXCR4; ROCK2; MAPK1; PTK2; FOS; CFL1; GNAQ; |
| | CAMK2A; CXCL12; MAPK8; MAPK3; KRAS; MAPK13; |
| | RHOA; CCR3; SRC; PPP1CC; MAPK14; NOX1; RAF1; |
| | MAP2K2; MAP2K1; JUN; CCL2; PRKCA |
| IL-2 Signaling | ELK1; MAPK1; PTPN11; AKT2; PIK3CA; SYK; FOS; |
| | STAT5B; PIK3CB; PIK3C3; MAPK8; MAPK3; KRAS; |
| | SOCS1; STAT5A; PIK3C2A; LCK; RAF1; MAP2K2; |
| | JAK1; AKT1; PIK3R1; MAP2K1; JUN; AKT3 |
| Synaptic Long Term | PRKCE; IGF1; PRKCZ; PRDX6; LYN; MAPK1; GNAS; |
| Depression | PRKCI; GNAQ; PPP2R1A; IGF1R; PRKD1; MAPK3; |
| | KRAS; GRN; PRKCD; NOS3; NOS2A; PPP2CA; |
| | YWHAZ; RAF1; MAP2K2; PPP2R5C; MAP2K1; PRKCA |
| Estrogen Receptor | TAF4B; EP300; CARM1; PCAF; MAPK1; NCOR2; |
| Signaling | SMARCA4; MAPK3; NRIP1; KRAS; SRC; NR3C1; |
| | HDAC3; PPARGC1A; RBM9; NCOA3; RAF1; CREBBP; |
| | MAP2K2; NCOA2; MAP2K1; PRKDC; ESR1; ESR2 |
| Protein Ubiquitination | TRAF6; SMURF1; BIRC4; BRCA1; UCHL1; NEDD4; |
| Pathway | CBL; UBE2I; BTRC; HSPA5; USP7; USP10; FBXW7; |
| | USP9X; STUB1; USP22; B2M; BIRC2; PARK2; USP8; |
| | USP1; VHL; HSP90AA1; BIRC3 |
| IL-10 Signaling | TRAF6; CCR1; ELK1; IKBKB; SP1; FOS; NFKB2; |
| | MAP3K14; MAPK8; MAPK13; RELA; MAPK14; TNF; |
| | IKBKG; RELB; MAP3K7; JAK1; CHUK; STAT3; NFKB1; |
| | JUN; IL1R1; IL6 |
| VDR/RXR Activation | PRKCE; EP300; PRKCZ; RXRA; GADD45A; HES1; |
| | NCOR2; SP1; PRKCI; CDKN1B; PRKD1; PRKCD; |
| | RUNX2; KLF4; YY1; NCOA3; CDKN1A; NCOA2; SPP1; |
| | LRP5; CEBPB; FOXO1; PRKCA |
| TGF-beta Signaling | EP300; SMAD2; SMURF1; MAPK1; SMAD3; SMAD1; |
| | FOS; MAPK8; MAPK3; KRAS; MAPK9; RUNX2; |
| | SERPINE1; RAF1; MAP3K7; CREBBP; MAP2K2; |
| | MAP2K1; TGFBR1; SMAD4; JUN; SMAD5 |
| Toll-like Receptor Signaling | IRAK1; EIF2AK2; MYD88; TRAF6; PPARA; ELK1; |
| | IKBKB; FOS; NFKB2; MAP3K14; MAPK8; MAPK13; |
| | RELA; TLR4; MAPK14; IKBKG; RELB; MAP3K7; CHUK; |
| | NFKB1; TLR2; JUN |
| p38 MAPK Signaling | HSPB1; IRAK1; TRAF6; MAPKAPK2; ELK1; FADD; FAS; |
| | CREB1; DDIT3; RPS6KA4; DAXX; MAPK13; TRAF2; |
| | MAPK14; TNF; MAP3K7; TGFBR1; MYC; ATF4; IL1R1; |
| | SRF; STAT1 |
| Neurotrophin/TRK Signaling | NTRK2; MAPK1; PTPN11; PIK3CA; CREB1; FOS; |
| | PIK3CB; PIK3C3; MAPK8; MAPK3; KRAS; PIK3C2A; |
| | RAF1; MAP2K2; AKT1; PIK3R1; PDPK1; MAP2K1; |
| | CDC42; JUN; ATF4 |
| FXR/RXR Activation | INS; PPARA; FASN; RXRA; AKT2; SDC1; MAPK8; |
| | APOB; MAPK10; PPARG; MTTP; MAPK9; PPARGC1A; |
| | TNF; CREBBP; AKT1; SREBF1; FGFR4; AKT3; FOXO1 |
| Synaptic Long Term | PRKCE; RAP1A; EP300; PRKCZ; MAPK1; CREB1; |
| Potentiation | PRKCI; GNAQ; CAMK2A; PRKD1; MAPK3; KRAS; |
| | PRKCD; PPP1CC; RAF1; CREBBP; MAP2K2; MAP2K1; |
| | ATF4; PRKCA |
| Calcium Signaling | RAP1A; EP300; HDAC4; MAPK1; HDAC5; CREB1; |
| | CAMK2A; MYH9; MAPK3; HDAC2; HDAC7A; HDAC11; |
| | HDAC9; HDAC3; CREBBP; CALR; CAMKK2; ATF4; |
| | HDAC6 |
| EGF Signaling | ELK1; MAPK1; EGFR; PIK3CA; FOS; PIK3CB; PIK3C3; |
| | MAPK8; MAPK3; PIK3C2A; RAF1; JAK1; PIK3R1; |
| | STAT3; MAP2K1; JUN; PRKCA; SRF; STAT1 |
| Hypoxia Signaling in the | EDN1; PTEN; EP300; NQO1; UBE2I; CREB1; ARNT; |
| Cardiovascular System | HIF1A; SLC2A4; NOS3; TP53; LDHA; AKT1; ATM; |
| | VEGFA; JUN; ATF4; VHL; HSP90AA1 |
| LPS/IL-1 Mediated Inhibition | IRAK1; MYD88; TRAF6; PPARA; RXRA; ABCA1; |
| of RXR Function | MAPK8; ALDH1A1; GSTP1; MAPK9; ABCB1; TRAF2; |
| | TLR4; TNF; MAP3K7; NR1H2; SREBF1; JUN; IL1R1 |
| LXR/RXR Activation | FASN; RXRA; NCOR2; ABCA1; NFKB2; IRF3; RELA; |
| | NOS2A; TLR4; TNF; RELB; LDLR; NR1H2; NFKB1; |
| | SREBF1; IL1R1; CCL2; IL6; MMP9 |
| Amyloid Processing | PRKCE; CSNK1E; MAPK1; CAPNS1; AKT2; CAPN2; |
| | CAPN1; MAPK3; MAPK13; MAPT; MAPK14; AKT1; |
| | PSEN1; CSNK1A1; GSK3B; AKT3; APP |
| IL-4 Signaling | AKT2; PIK3CA; PIK3CB; PIK3C3; IRS1; KRAS; SOCS1; |
| | PTPN6; NR3C1; PIK3C2A; JAK1; AKT1; JAK2; PIK3R1; |
| | FRAP1; AKT3; RPS6KB1 |
| Cell Cycle: G2/M DNA | EP300; PCAF; BRCA1; GADD45A; PLK1; BTRC; |
| Damage Checkpoint | CHEK1; ATR; CHEK2; YWHAZ; TP53; CDKN1A; |
| Regulation | PRKDC; ATM; SFN; CDKN2A |
| Nitric Oxide Signaling in the | KDR; FLT1; PGF; AKT2; PIK3CA; PIK3CB; PIK3C3; |
| Cardiovascular System | CAV1; PRKCD; NOS3; PIK3C2A; AKT1; PIK3R1; |
| | VEGFA; AKT3; HSP90AA1 |
| Purine Metabolism | NME2; SMARCA4; MYH9; RRM2; ADAR; EIF2AK4; |
| | PKM2; ENTPD1; RAD51; RRM2B; TJP2; RAD51C; |
| | NT5E; POLD1; NME1 |
| CAMP-mediated Signaling | RAP1A; MAPK1; GNAS; CREB1; CAMK2A; MAPK3; |
| | SRC; RAF1; MAP2K2; STAT3; MAP2K1; BRAF; ATF4 |
| Mitochondrial Dysfunction | SOD2; MAPK8; CASP8; MAPK10; MAPK9; CASP9; |
| Notch Signaling | PARK7; PSEN1; PARK2; APP; CASP3 |
| | HES1; JAG1; NUMB; NOTCH4; ADAM17; NOTCH2; |
| | PSEN1; NOTCH3; NOTCH1; DLL4 |
| Endoplasmic Reticulum | HSPA5; MAPK8; XBP1; TRAF2; ATF6; CASP9; ATF4; |
| Stress Pathway | EIF2AK3; CASP3 |
| Pyrimidine Metabolism | NME2; AICDA; RRM2; EIF2AK4; ENTPD1; RRM2B; |
| | NT5E; POLD1; NME1 |
| Parkinson's Signaling | UCHL1; MAPK8; MAPK13; MAPK14; CASP9; PARK7; |
| | PARK2; CASP3 |
| Cardiac & Beta Adrenergic | GNAS; GNAQ; PPP2R1A; GNB2L1; PPP2CA; PPP1CC; |
| Signaling | PPP2R5C |
| Glycolysis/Gluconeogenesis | HK2; GCK; GPI; ALDH1A1; PKM2; LDHA; HK1 |
| Interferon Signaling | IRF1; SOCS1; JAK1; JAK2; IFITM1; STAT1; IFIT3 |
| Sonic Hedgehog Signaling | ARRB2; SMO; GLI2; DYRK1A; GLI1; GSK3B; DYRK1B |
| Glycerophospholipid | PLD1; GRN; GPAM; YWHAZ; SPHK1; SPHK2 |
| Metabolism | |
| Phospholipid Degradation | PRDX6; PLD1; GRN; YWHAZ; SPHK1; SPHK2 |
| Tryptophan Metabolism | SIAH2; PRMT5; NEDD4; ALDH1A1; CYP1B1; SIAH1 |
| Lysine Degradation | SUV39H1; EHMT2; NSD1; SETD7; PPP2R5C |
| Nucleotide Excision Repair | ERCC5; ERCC4; XPA; XPC; ERCC1 |
| Pathway | |
| Starch and Sucrose | UCHL1; HK2; GCK; GPI; HK1 |
| Metabolism | |
| Aminosugars Metabolism | NQO1; HK2; GCK; HK1 |
| Arachidonic Acid | PRDX6; GRN; YWHAZ; CYP1B1 |
| Metabolism | |
| Circadian Rhythm Signaling | CSNK1E; CREB1; ATF4; NR1D1 |
| Coagulation System | BDKRB1; F2R; SERPINE1; F3 |
| Dopamine Receptor | PPP2R1A; PPP2CA; PPP1CC; PPP2R5C |
| Signaling | |
| Glutathione Metabolism | IDH2; GSTP1; ANPEP; IDH1 |
| Glycerolipid Metabolism | ALDH1A1; GPAM; SPHK1; SPHK2 |
| Linoleic Acid Metabolism | PRDX6; GRN; YWHAZ; CYP1B1 |
| Methionine Metabolism | DNMT1; DNMT3B; AHCY; DNMT3A |
| Pyruvate Metabolism | GLO1; ALDH1A1; PKM2; LDHA |
| Arginine and Proline | ALDH1A1; NOS3; NOS2A |
| Metabolism | |
| Eicosanoid Signaling | PRDX6; GRN; YWHAZ |
| Fructose and Mannose | HK2; GCK; HK1 |
| Metabolism | |
| Galactose Metabolism | HK2; GCK; HK1 |
| Stilbene, Coumarine and | PRDX6; PRDX1; TYR |
| Lignin Biosynthesis | |
| Antigen Presentation | CALR; B2M |
| Pathway | |
| Biosynthesis of Steroids | NQO1; DHCR7 |
| Butanoate Metabolism | ALDH1A1; NLGN1 |
| Citrate Cycle | IDH2; IDH1 |
| Fatty Acid Metabolism | ALDH1A1; CYP1B1 |
| Glycerophospholipid | PRDX6; CHKA |
| Metabolism | |
| Histidine Metabolism | PRMT5; ALDH1A1 |
| Inositol Metabolism | ERO1L; APEX1 |
| Metabolism of Xenobiotics | GSTP1; CYP1B1 |
| by Cytochrome p450 | |
| Methane Metabolism | PRDX6; PRDX1 |
| Phenylalanine Metabolism | PRDX6; PRDX1 |
| Propanoate Metabolism | ALDH1A1; LDHA |
| Selenoamino Acid | PRMT5; AHCY |
| Metabolism | |
| Sphingolipid Metabolism | SPHK1; SPHK2 |
| Aminophosphonate | PRMT5 |
| Metabolism | |
| Androgen and Estrogen | PRMT5 |
| Metabolism | |
| Ascorbate and Aldarate | ALDH1A1 |
| Metabolism | |
| Bile Acid Biosynthesis | ALDH1A1 |
| Cysteine Metabolism | LDHA |
| Fatty Acid Biosynthesis | FASN |
| Glutamate Receptor | GNB2L1 |
| Signaling | |
| NRF2-mediated Oxidative | PRDX1 |
| Stress Response | |
| Pentose Phosphate | GPI |
| Pathway | |
| Pentose and Glucuronate | UCHL1 |
| Interconversions | |
| Retinol Metabolism | ALDH1A1 |
| Riboflavin Metabolism | TYR |
| Tyrosine Metabolism | PRMT5, TYR |
| Ubiquinone Biosynthesis | PRMT5 |
| Valine, Leucine and | ALDH1A1 |
| Isoleucine Degradation | |
| Glycine, Serine and | CHKA |
| Threonine Metabolism | |
| Lysine Degradation | ALDH1A1 |
| Pain/Taste | TRPM5; TRPA1 |
| Pain | TRPM7; TRPC5; TRPC6; TRPC1; Cnr1; cnr2; Grk2; |
| | Trpa1; Pomc; Cgrp; Crf; Pka; Era; Nr2b; TRPM5; Prkaca; |
| | Prkacb; Prkar1a; Prkar2a |
| Mitochondrial Function | AIF; CytC; SMAC (Diablo); Aifm-1; Aifm-2 |
| Developmental Neurology | BMP-4; Chordin (Chrd); Noggin (Nog); WNT (Wnt2; |
| | Wnt2b; Wnt3a; Wnt4; Wnt5a; Wnt6; Wnt7b; Wnt8b; |
| | Wnt9a; Wnt9b; Wnt10a; Wnt10b; Wnt16); beta-catenin; |
| | Dkk-1; Frizzled related proteins; Otx-2; Gbx2; FGF-8; |
| | Reelin; Dab1; unc-86 (Pou4f1 or Brn3a); Numb; Reln |

[0872] In an aspect, the invention provides a method of individualized or personalized treatment of a genetic disease in a subject in need of such treatment comprising: (a) introducing one or more mutations ex vivo in a tissue, organ or a cell line, or in vivo in a transgenic non-human mammal, comprising delivering to cell(s) of the tissue, organ, cell or mammal a composition comprising the particle delivery system or the delivery system or the virus particle of any one of the above embodiment or the cell of any one of the above embodiment, wherein the specific mutations or precise sequence substitutions are or have been correlated to the genetic disease; (b) testing treatment(s) for the genetic disease on the cells to which the vector has been delivered that have the specific mutations or precise sequence substitutions correlated to the genetic disease; and (c) treating the subject based on results from the testing of treatment(s) of step (b).

### Infectious Diseases

[0873] In one embodiment, the composition, system(s) or component(s) thereof can be used to diagnose, prognose, treat, and/or prevent an infectious disease caused by a microorganism, such as bacteria, virus, fungi, parasites, or combinations thereof.

[0874] In one embodiment, the system(s) or component(s) thereof can be capable of targeting specific microorganism within a mixed population. Exemplary methods of such techniques are described in e.g., Gomaa A A, Klumpe H E, Luo M L, Selle K, Barrangou R, Beisel C L. 2014. Programmable removal of bacterial strains by use of genome-targeting composition, systems, mBio 5:e00928-13; Citorik R J, Mimee M, Lu T K. 2014. Sequence-specific antimicrobials using efficiently delivered RNA-guided nucleases. Nat Biotechnol 32:1141-1145, the teachings of which can be adapted for use with the compositions, systems, and components thereof described herein.

[0875] In one embodiment, the composition, system(s) and/or components thereof can be capable of targeting pathogenic and/or drug-resistant microorganisms, such as bacteria, virus, parasites, and fungi. In one embodiment, the composition, system(s) and/or components thereof can be capable of targeting and modifying one or more polynucleotides in a pathogenic microorganism such that the microorganism is less virulent, killed, inhibited, or is otherwise rendered incapable of causing disease and/or infecting and/or replicating in a host cell.

[0876] In one embodiment, the pathogenic bacteria that can be targeted and/or modified by the composition, system, (s) and/or component(s) thereof described herein include, but are not limited to, those of the genus Actinomyces (e.g. A. israelii), Bacillus (e.g. B. anthracis, B. cereus), Bactereoides (e.g. B. fragilis), Bartonella (B. henselae, B. quintana), Bordetella (B. pertussis), Borrelia (e.g. B. burgdorferi, B. garinii, B. afzelii, and B. recurreentis), Brucella (e.g. B. abortus, B. canis, B. melitensis, and B. suis), Campylobacter (e.g. C. jejuni), Chlamydia (e.g. C. pneumoniae and C. trachomatis), Chlamydophila (e.g. C. psittaci), Clostridium (e.g. C. botulinum, C. difficile, C. perfringens. C. tetani), Corynebacterium (e.g. C. diptheriae), Enterococcus (e.g. E. Faecalis, E. faecium), Ehrlichia (E. canis and E. chaffensis) Escherichia (e.g. E. coli), Francisella (e.g. F. tularensis), Haemophilus (e.g. H. influenzae), Helicobacter (H. pylori), Klebsiella (E.g. K. pneumoniae), Legionella (e.g. L. pneumophila), Leptospira (e.g. L. interrogans, L. santarosai, L. weilii, L. noguchii), Listereia (e.g. L. monocytogeenes), Mycobacterium (e.g. M. leprae, M. tuberculosis, M. ulcerans), Mycoplasma (M. pneumoniae), Neisseria (N. gonorrhoeae and N. menigitidis), Nocardia (e.g. N. asteeroides), Pseudomonas (P. aeruginosa), Rickettsia (R. rickettsia), Salmonella (S. typhi and S. typhimurium), Shigella (S. sonnei and S. dysenteriae), Staphylococcus (S. aureus, S. epidermidis, and S. saprophyticus), Streeptococcus (S. agalactiaee, S. pneumoniae, S. pyogenes), Treponema (T. pallidum), Ureeaplasma (e.g. U. urealyticum), Vibrio (e.g. V. cholerae), Yersinia (e.g. Y. pestis, Y. enteerocolitica, and Y. pseudotuberculosis).

[0877] In one embodiment, the pathogenic virus that can be targeted and/or modified by the composition, system(s) and/or component(s) thereof described herein include, but are not limited to, a double-stranded DNA virus, a partly double-stranded DNA virus, a single-stranded DNA virus, a positive single-stranded RNA virus, a negative single-stranded RNA virus, or a double stranded RNA virus. In one embodiment, the pathogenic virus can be from the family Adenoviridae (e.g. Adenovirus), Herpeesviridae (e.g. Herpes simplex, type 1, Herpes simplex, type 2, Varicella-zoster virus, Epstein-Barr virus, Human cytomegalovirus, Human herpesvirus, type 8), Papillomaviridae (e.g. Human papillomavirus), Polyomaviridae (e.g. BK virus, JC virus), Poxviridae (e.g. smallpox), Hepadnaviridae (e.g. Hepatitis B), Parvoviridae (e.g. Parvovirus B19), Astroviridae (e.g. Human astrovirus), Caliciviridae (e.g. Norwalk virus), Picornaviridae (e.g. coxsackievirus, hepatitis A virus, poliovirus, rhinovirus), Coronaviridae (e.g. Severe acute respiratory syndrome-related coronavirus, strains: Severe acute respiratory syndrome virus, Severe acute respiratory syndrome coronavirus 2 (COVID-19 and variants)), Flaviviridae (e.g. Hepatitis C virus, yellow fever virus, dengue virus, West Nile virus, TBE virus), Togaviridae (e.g. Rubella virus), Hepeviridae (e.g. Hepatitis E virus), Retroviridae (Human immunodeficiency virus (HIV)), Orthomyxoviridae (e.g. Influenza virus), Arenaviridae (e.g. Lassa virus), Bunyaviridae (e.g. Crimean-Congo hemorrhagic fever virus, Hantaan virus), Filoviridae (e.g. Ebola virus and Marburg virus), Paramyxoviridae (e.g. Measles virus, Mumps virus, Parainfluenza virus, Respiratory syncytial virus), Rhabdoviridae (Rabies virus), Hepatits D virus, Reoviridae (e.g. Rotavirus, Orbivirus, Coltivirus, Banna virus).

[0878] In one embodiment, the pathogenic fungi that can be targeted and/or modified by the composition, system(s) and/or component(s) thereof described herein include, but are not limited to, those of the genus Candida (e.g. C. albicans), Aspergillus (e.g. A. fumigatus, A. flavus, A. clavatus), Cryptococcus (e.g. C. neoformans, C. gattii), Histoplasma (H. capsulatum), Pneumocystis (e.g. P. jiroveecii), Stachybotrys (e.g. S. chartarum).

[0879] In one embodiment, the pathogenic parasites that can be targeted and/or modified by the composition, system(s) and/or component(s) thereof described herein include, but are not limited to, protozoa, helminths, and ectoparasites. In one embodiment, the pathogenic protozoa that can be targeted and/or modified by the composition, system(s) and/or component(s) thereof described herein include, but are not limited to, those from the groups Sarcodina (e.g. ameba such as Entamoeba), Mastigophora (e.g. flagellates such as Giardia and Leishmania), Cilophora (e.g. ciliates such as Balantidum), and sporozoa (e.g. plasmodium and cryptosporidium). In one embodiment, the pathogenic helminths that can be targeted and/or modified by the composition, system(s) and/or component(s) thereof described herein include, but are not limited to, flatworms (platyhelminths), thorny-headed worms (acanthoceephalins), and roundworms (nematodes). In one embodiment, the pathogenic ectoparasites that can be targeted and/or modified by the composition, system(s) and/or component(s) thereof described herein include, but are not limited to, ticks, fleas, lice, and mites.

[0880] In one embodiment, the pathogenic parasite that can be targeted and/or modified by the composition, system(s) and/or component(s) thereof described herein include, but are not limited to, Acanthamoeba spp., Balamuthia mandrillaris, Babesiosis spp. (e.g. Babesia B. divergens, B. bigemina, B. equi, B. microfti, B. duncani), Balantidiasis spp. (e.g. Balantidium coli), Blastocystis spp., Cryptosporidium spp., Cyclosporiasis spp. (e.g. Cyclospora cayetanensis), Dientamoebiasis spp. (e.g. Dientamoeba fragilis), Amoebiasis spp. (e.g. Entamoeba histolytica), Giardiasis spp. (e.g. Giardia lamblia), Isosporiasis spp. (e.g. Isospora belli), Leishmania spp., Naegleria spp. (e.g. Naegleria fowleri), Plasmodium spp. (e.g. Plasmodium falciparum, Plasmodium vivax, Plasmodium ovale curtisi, Plasmodium ovale wallikeri, Plasmodium malariae, Plasmodium knowlesi), Rhinosporidiosis spp. (e.g. Rhinosporidium seeberi), Sarcocystosis spp. (e.g. Sarcocystis bovihominis, Sarcocystis suihominis), Toxoplasma spp. (e.g. Toxoplasma gondii), Trichomonas spp. (e.g. Trichomonas vaginalis), Trypanosoma spp. (e.g. Trypanosoma brucei), Trypanosoma spp. (e.g. Trypanosoma cruzi), Tapeworm (e.g. Cestoda, Taenia multiceps, Taenia saginata, Taenia solium), Diphyllobothrium latum spp., Echinococcus spp. (e.g. Echinococcus granulosus, Echinococcus multilocularis, E. vogeli, E. oligarthrus), Hymenolepis spp. (e.g. Hymenolepis nana, Hymenolepis diminuta), Bertiella spp. (e.g. Bertiella mucronata, Bertiella studeri), Spirometra (e.g. Spirometra erinaceieuropaei), Clonorchis spp. (e.g. Clonorchis sinensis; Clonorchis viverrini), Dicrocoelium spp. (e.g. Dicrocoelium dendriticum), Fasciola spp. (e.g. Fasciola hepatica, Fasciola gigantica), Fasciolopsis spp. (e.g. Fasciolopsis buski), Metagonimus spp. (e.g. Metagonimus yokogawai), Metorchis spp. (e.g. Metorchis conjunctus), Opisthorchis spp. (e.g. Opisthorchis viverrini, Opisthorchis felineus), Clonorchis spp. (e.g. Clonorchis sinensis), Paragonimus spp. (e.g. Paragonimus westermani; Paragonimus africanus; Paragonimus caliensis; Paragonimus kellicotti; Paragonimus skrjabini; Paragonimus uterobilateralis), Schistosoma sp., Schistosoma spp. (e.g. Schistosoma mansoni, Schistosoma haematobium, Schistosoma japonicum, Schistosoma mekongi, and Schistosoma intercalatum), Echinostoma spp. (e.g. E. echinatum), Trichobilharzia spp. (e.g. Trichobilharzia regent), Ancylostoma spp. (e.g. Ancylostoma duodenale), Necator spp. (e.g. Necator americanus), Angiostrongylus spp., Anisakis spp., Ascaris spp. (e.g. Ascaris lumbricoides), Baylisascaris spp. (e.g. Baylisascaris procyonis), Brugia spp. (e.g. Brugia malayi, Brugia timori), Dioctophyme spp. (e.g. Dioctophyme renale), Dracunculus spp. (e.g. Dracunculus medinensis), Enterobius spp. (e.g. Enterobius vermicularis, Enterobius gregorii), Gnathostoma spp. (e.g. Gnathostoma spinigerum, Gnathostoma hispidum), Halicephalobus spp. (e.g. Halicephalobus gingivalis), Loa loa spp. (e.g. Loa loa flaria), Mansonella spp. (e.g. Mansonella streptocerca), Onchocerca spp. (e.g. Onchocerca volvulus), Strongyloides spp. (e.g. Strongyloides stercoralis), Thelazia spp. (e.g. Thelazia californiensis, Thelazia callipaeda), Toxocara spp. (e.g. Toxocara canis, Toxocara cati, Toxascaris leonine), Trichinella spp. (e.g. Trichinella spiralis, Trichinella britovi, Trichinella nelsoni, Trichinella nativa), Trichuris spp. (e.g. Trichuris trichiura, Trichuris vulpis), Wuchereria spp. (e.g. Wuchereria bancrofti), Dermatobia spp. (e.g. Dermatobia hominis), Tunga spp. (e.g. Tunga penetrans), Cochliomyia spp. (e.g. Cochliomyia hominivorax), Linguatula spp. (e.g. Linguatula serrata), Archiacanthocephala sp., Moniliformis sp. (e.g. Moniliformis moniliformis), Pediculus spp. (e.g. Pediculus humanus capitis, Pediculus humanus humanus), Pthirus spp. (e.g. Pthirus pubis), Arachnida spp. (e.g. Trombiculidae, xodidae, Argaside), Siphonaptera spp (e.g. Siphonaptera: Pulicinae), Cimicidae spp. (e.g. Cimex lectularius and Cimex hemipterus), Diptera spp., Demodex spp. (e.g. Demodex folliculorum brevis/canis), Sarcoptes spp. (e.g. Sarcoptes scabiei), Dermanyssus spp. (e.g. Dermanyssus gallinae), Ornithonyssus spp. (e.g. Ornithonyssus sylviarum, Ornithonyssus bursa, Ornithonyssus bacoti), Laelaps spp. (e.g. Laelaps echidnina), Liponyssoides spp. (e.g. Liponyssoides sanguineus).

[0881] In one embodiment the gene targets can be any of those as set forth in Table 1 of Strich and Chertow, 2019. J. Clin. Microbio. 57:4 e01307-18, which is incorporated herein as if expressed in its entirety herein.

[0882] In one embodiment, the method can include delivering a composition, system, and/or component thereof to a pathogenic organism described herein, allowing the composition, system, and/or component thereof to specifically bind and modify one or more targets in the pathogenic organism, whereby the modification kills, inhibits, reduces the pathogenicity of the pathogenic organism, or otherwise renders the pathogenic organism non-pathogenic. In one embodiment, delivery of the composition, system, occurs in vivo (i.e., in the subject being treated). In one embodiment occurs by an intermediary, such as microorganism or phage that is non-pathogenic to the subject but is capable of transferring polynucleotides and/or infecting the pathogenic microorganism. In one embodiment, the intermediary microorganism can be an engineered bacteria, virus, or phage that contains the composition, system(s) and/or component(s) thereof and/or vectors and/or vector systems. The method can include administering an intermediary microorganism containing the composition, system(s) and/or component(s) thereof and/or vectors and/or vector systems to the subject to be treated. The intermediary microorganism can then produce the compositions and/or component thereof or transfer a composition, system, polynucleotide to the pathogenic organism. In embodiments, where the compositions and/or component thereof, vector, or vector system is transferred to the pathogenic microorganism, the composition, system, or component thereof is then produced in the pathogenic microorganism and modifies the pathogenic microorganism such that it is less virulent, killed, inhibited, or is otherwise rendered incapable of causing disease and/or infecting and/or replicating in a host or cell thereof.

[0883] In one embodiment, where the pathogenic microorganism inserts its genetic material into the host cell's genome (e.g., a virus), the composition, system, can be designed such that it modifies the host cell's genome such that the viral DNA or cDNA cannot be replicated by the host cell's machinery into a functional virus. In one embodiment, where the pathogenic microorganism inserts its genetic material into the host cell's genome (e.g., a virus), the composition, system, can be designed such that it modifies the host cell's genome such that the viral DNA or cDNA is deleted from the host cell's genome.

[0884] It will be appreciated that inhibiting or killing the pathogenic microorganism, the disease and/or condition that its infection causes in the subject can be treated or prevented. Thus, also provided herein are methods of treating and/or preventing one or more diseases or symptoms thereof caused by any one or more pathogenic microorganisms, such as any of those described herein.

### Mitochondrial Diseases

[0885] Some of the most challenging mitochondrial disorders arise from mutations in mitochondrial DNA (mtDNA), a high copy number genome that is maternally inherited. In one embodiment, mtDNA mutations can be modified using a composition, system, described herein. In one embodiment, the mitochondrial disease that can be diagnosed, prognosed, treated, and/or prevented can be MELAS (mitochondrial myopathy encephalopathy, and lactic acidosis and stroke-like episodes), CPEO/PEO (chronic progressive external ophthalmoplegia syndrome/progressive external ophthalmoplegia), KSS (Kearns-Sayre syndrome), MIDD (maternally inherited diabetes and deafness), MERRF (myoclonic epilepsy associated with ragged red fibers), NIDDM (noninsulin-dependent diabetes mellitus), LHON (Leber hereditary optic neuropathy), LS (Leigh Syndrome) an aminoglycoside induced hearing disorder, NARP (neuropathy, ataxia, and pigmentary retinopathy), Extrapyramidal disorder with akinesia-rigidity, psychosis and SNHL, Nonsyndromic hearing loss a cardiomyopathy, an encephalomyopathy, Pearson's syndrome, or a combination thereof.

[0886] In one embodiment, the mtDNA of a subject can be modified in vivo or ex vivo. In one embodiment, where the mtDNA is modified ex vivo, after modification the cells containing the modified mitochondria can be administered back to the subject. In one embodiment, the composition, system, or component thereof can be capable of correcting an mtDNA mutation, or a combination thereof.

[0887] In one embodiment, at least one of the one or more mtDNA mutations is selected from the group consisting of: A3243G, C3256T, T3271C, G1019A, A1304T, A15533G, C1494T, C4467A, T1658C, G12315A, A3421G, A8344G, T8356C, G8363A, A13042T, T3200C, G3242A, A3252G, T3264C, G3316A, T3394C, T14577C, A4833G, G3460A, G9804A, G11778A, G14459A, A14484G, G15257A, T8993C, T8993G, G10197A, G13513A, T1095C, C1494T, A1555G, G1541A, C1634T, A3260G, A4269G, T7587C, A8296G, A8348G, G8363A, T9957C, T9997C, G12192A, C12297T, A14484G, G15059A, duplication of CCCCCTCCCC-tandem (SEQ ID NO: 3905) repeats at positions 305-314 and/or 956-965, deletion at positions from 8,469-13,447, 4,308-14,874, and/or 4,398-14,822, 961ins/delC, the mitochondrial common deletion (e.g. mtDNA 4,977 bp deletion), and combinations thereof.

[0888] In one embodiment, the mitochondrial mutation can be any mutation as set forth in or as identified by use of one or more bioinformatic tools available at Mitomap available at mitomap.org. Such tools include, but are not limited to, “Variant Search, aka Market Finder”, Find Sequences for Any Haplogroup, aka “Sequence Finder”, “Variant Info”, “POLG Pathogenicity Prediction Server”, “MITOMASTER”, “Allele Search”, “Sequence and Variant Downloads”, “Data Downloads”. MitoMap contains reports of mutations in mtDNA that can be associated with disease and maintains a database of reported mitochondrial DNA Base Substitution Diseases: rRNA/tRNA mutations.

[0889] In one embodiment, the method includes delivering a composition, system, and/or a component thereof to a cell, and more specifically one or more mitochondria in a cell, allowing the composition, system, and/or component thereof to modify one or more target polynucleotides in the cell, and more specifically one or more mitochondria in the cell. The target polynucleotides can correspond to a mutation in the mtDNA, such as any one or more of those described herein. In one embodiment, the modification can alter a function of the mitochondria such that the mitochondria functions normally or at least is/are less dysfunctional as compared to an unmodified mitochondria. Modification can occur in vivo or ex vivo. Where modification is performed ex vivo, cells containing modified mitochondria can be administered to a subject in need thereof in an autologous or allogenic manner.

### Microbiome Modification

[0890] Microbiomes play important roles in health and disease. For example, the gut microbiome can play a role in health by controlling digestion, preventing growth of pathogenic microorganisms and have been suggested to influence mood and emotion. Imbalanced microbiomes can promote disease and are suggested to contribute to weight gain, unregulated blood sugar, high cholesterol, cancer, and other disorders. A healthy microbiome has a series of joint characteristics that can be distinguished from non-healthy individuals, thus detection and identification of the disease-associated microbiome can be used to diagnose and detect disease in an individual. The compositions, systems, and components thereof can be used to screen the microbiome cell population and be used to identify a disease associated microbiome. Cell screening methods utilizing compositions, systems, and components thereof are described elsewhere herein and can be applied to screening a microbiome, such as a gut, skin, vagina, and/or oral microbiome, of a subject.

[0891] In one embodiment, the microbe population of a microbiome in a subject can be modified using a composition, system, and/or component thereof described herein. In one embodiment, the composition, system, and/or component thereof can be used to identify and select one or more cell types in the microbiome and remove them from the microbiome population. Exemplary methods of selecting cells using a composition, system, and/or component thereof are described elsewhere herein. In this way the make-up or microorganism profile of the microbiome can be altered. In one embodiment, the alteration causes a change from a diseased microbiome composition to a healthy microbiome composition. In this way the ratio of one type or species of microorganism to another can be modified, such as going from a diseased ratio to a healthy ratio. In one embodiment, the cells selected are pathogenic microorganisms.

[0892] In one embodiment, the compositions and systems described herein can be used to modify a polynucleotide in a microorganism of a microbiome in a subject. In one embodiment, the microorganism is a pathogenic microorganism. In one embodiment, the microorganism is a commensal and non-pathogenic microorganism. Methods of modifying polynucleotides in a cell in the subject are described elsewhere herein and can be applied to these embodiments.

### Gene Drives

[0893] The present invention also contemplates use of the systems, compositions, system components, vectors, engineered cells, described herein to generate a gene drive via delivery of one or more system polypeptides and/or polynucleotides capable of producing a gene drive. In some embodiments, the gene drive can be a Cas-mediated RNA-guided gene drive e.g., Cas- to provide RNA-guided gene drives, for example in systems analogous to gene drives described in PCT Patent Publication WO 2015/105928. Systems of this kind may for example provide methods for altering eukaryotic germline cells, by introducing into the germline cell a nucleic acid sequence encoding an RNA-guided DNA nuclease and one or more guide RNAs. The guide RNAs may be designed to be complementary to one or more target locations on genomic DNA of the germline cell. The nucleic acid sequence encoding the RNA guided DNA nuclease and the nucleic acid sequence encoding the guide RNAs may be provided on constructs between flanking sequences, with promoters arranged such that the germline cell may express the RNA guided DNA nuclease and the guide RNAs, together with any desired cargo-encoding sequences that are also situated between the flanking sequences. The flanking sequences will typically include a sequence which is identical to a corresponding sequence on a selected target chromosome, so that the flanking sequences work with the components encoded by the construct to facilitate insertion of the foreign nucleic acid construct sequences into genomic DNA at a target cut site by mechanisms such as homologous recombination, to render the germline cell homozygous for the foreign nucleic acid sequence. In this way, gene-drive systems are capable of introgressing desired cargo genes throughout a breeding population (Gantz et al., 2015, Highly efficient Cas9-mediated gene drive for population modification of the malaria vector mosquito Anopheles stephensi, PNAS 2015, published ahead of print Nov. 23, 2015, doi:10.1073/pnas.1521077112; Esvelt et al., 2014, Concerning RNA-guided gene drives for the alteration of wild populations eLife 2014; 3:e03401). In select embodiments, target sequences may be selected which have few potential off-target sites in a genome. Targeting multiple sites within a target locus, using multiple guide RNAs, may increase the cutting frequency and hinder the evolution of drive resistant alleles. Truncated guide RNAs may reduce off-target cutting. Paired nickases may be used instead of a single nuclease, to further increase specificity. Gene drive constructs (such as gene drive engineered delivery system constructrs) may include cargo sequences encoding transcriptional regulators, for example to activate homologous recombination genes and/or repress non-homologous end-joining. Target sites may be chosen within an essential gene, so that non-homologous end-joining events may cause lethality rather than creating a drive-resistant allele. The gene drive constructs can be engineered to function in a range of hosts at a range of temperatures (Cho et al. 2013, Rapid and Tunable Control of Protein Stability in Caenorhabditis elegans Using a Small Molecule, PLoS ONE 8(8): e72393. doi:10.1371/journal.pone.0072393).

### Transplantation and Xenotransplantation

[0894] The present invention also contemplates use of the composition described herein, e.g., Fanzor polypeptide protein systems, to provide RNA-guided DNA nucleases adapted to be used to provide modified tissues for transplantation (transplantation between two subjects of the same species) and/or xenotransplantation (transplantation between species). For example, RNA-guided DNA nucleases may be used to knockout, knockdown or disrupt selected genes in an animal, such as a transgenic pig (such as the human heme oxygenase-1 transgenic pig line), for example by disrupting expression of genes that encode epitopes recognized by the human immune system, i.e., xenoantigen genes. Candidate porcine genes for disruption may for example include α(1,3)-galactosyltransferase and cytidine monophosphate-N-acetylneuraminic acid hydroxylase genes (see PCT Patent Publication WO 2014/066505). In addition, genes encoding endogenous retroviruses may be disrupted, for example the genes encoding all porcine endogenous retroviruses (see Yang et al., 2015, Genome-wide inactivation of porcine endogenous retroviruses (PERVs), Science 27 Nov. 2015: Vol. 350 no. 6264 pp. 1101-1104). In addition, RNA-guided DNA nucleases may be used to target a site for integration of additional genes in xenotransplant donor animals, such as a human CD55 gene to improve protection against hyperacute rejection.

[0895] In other examples, such as in the context of transplantation, the systems and compositions described herein can be used to modify the organ or tissue to be transplanted to reduce, for example, immunogenicity, acute rejection, GvD, and other disorders and complications associated with transplantation. Such methods can allow for utilization of tissues that would otherwise not be a good or ideal match to a recipient for transplantation insofar as they can be modified prior to transplantation to improve the match characteristics and/or minimize tissue antigens and/or the like. For example, where it is interspecies transplantation (such as human to human) the systems, compositions, vectors, cells, and/or the like described herein, can be used to deliver cargo polynucleotides and/or otherwise be involved to modify the tissue to be transplanted. In some embodiments, the modification can include modifying one or more HLA antigens or other tissue type determinants, such that the immunogenic profile is more similar or identical to the recipient's immunogenic profile than to the donor's so as to reduce the occurrence of rejection by the recipient. Relevant tissue type determinants are known in the art (such as those used to determine organ matching) and techniques to determine the immunogenic profile (which is made up of the expression signature of the tissue type determinants) are generally known in the art.

[0896] In some embodiments, the donor (such as before harvest) or recipient (after transplantation) can receive one or more of the systems, composition, vectors, cells, and/or the like of the present invention described herein that are capable of modifying the immunogenic profile of the transplanted cells, tissue, and/or organ. In some embodiments, the transplanted cells, tissue, and/or organ can be harvested from the donor and the systems, composition, vectors, cells, and/or the like of the present invention described herein capable of modifying the harvested cells, tissue, and/or organ to be, for example, less immunogenic or be modified to have some specific characteristic when transplanted in the recipient can be delivered to the harvested cells, tissue, and/or organ ex vivo. After delivery the cells, tissue, and/or organs can be transplanted into the donor.

[0897] Embodiments of the invention also relate to methods and compositions related to knocking out genes, amplifying genes and repairing particular mutations associated with DNA repeat instability and neurological disorders (Robert D. Wells, Tetsuo Ashizawa, Genetic Instabilities and Neurological Diseases, Second Edition, Academic Press, Oct. 13, 2011—Medical). Specific aspects of tandem repeat sequences have been found to be responsible for more than twenty human diseases (New insights into repeat instability: role of RNA•DNA hybrids. McIvor E I, Polak U, Napierala M. RNA Biol. 2010 September-October; 7(5):551-8). The present effector protein systems may be harnessed to correct these defects of genomic instability.

[0898] Several further aspects of the invention relate to correcting defects associated with a wide range of genetic diseases which are further described on the website of the National Institutes of Health under the topic subsection Genetic Disorders (website at health.nih.gov/topic/GeneticDisorders). The genetic brain diseases may include but are not limited to Adrenoleukodystrophy, Agenesis of the Corpus Callosum, Aicardi Syndrome, Alpers' Disease, Alzheimer's Disease, Barth Syndrome, Batten Disease, CADASIL, Cerebellar Degeneration, Fabry's Disease, Gerstmann-Straussler-Scheinker Disease, Huntington's Disease and other Triplet Repeat Disorders, Leigh's Disease, Lesch-Nyhan Syndrome, Menkes Disease, Mitochondrial Myopathies and NINDS Colpocephaly. These diseases are further described on the website of the National Institutes of Health under the subsection Genetic Brain Disorders.

### Considerations for Therapeutic Applications

[0899] A consideration in genome editing therapy is the choice of sequence-specific nuclease, such as a variant of a Fanzor polypeptide. Each nuclease variant may possess its own unique set of strengths and weaknesses, many of which must be balanced in the context of treatment to maximize therapeutic benefit. For a specific editing therapy to be efficacious, a sufficiently high level of modification must be achieved in target cell populations to reverse disease symptoms. This therapeutic modification ‘threshold’ is determined by the fitness of edited cells following treatment and the amount of gene product necessary to reverse symptoms. With regard to fitness, editing creates three potential outcomes for treated cells relative to their unedited counterparts: increased, neutral, or decreased fitness. In the case of increased fitness, corrected cells may be able and expand relative to their diseased counterparts to mediate therapy. In this case, where edited cells possess a selective advantage, even low numbers of edited cells can be amplified through expansion, providing a therapeutic benefit to the patient. Where the edited cells possess no change in fitness, an increase the therapeutic modification threshold can be warranted. As such, significantly greater levels of editing may be needed to treat diseases, where editing creates a neutral fitness advantage, relative to diseases where editing creates increased fitness for target cells. If editing imposes a fitness disadvantage, as would be the case for restoring function to a tumor suppressor gene in cancer cells, modified cells would be outcompeted by their diseased counterparts, causing the benefit of treatment to be low relative to editing rates. This may be overcome with supplemental therapies to increase the potency and/or fitness of the edited cells relative to the diseased counterparts.

[0900] In addition to cell fitness, the amount of gene product necessary to treat disease can also influence the minimal level of therapeutic genome editing that can treat or prevent a disease or a symptom thereof. In cases where a small change in the gene product levels can result in significant changes in clinical outcome, the minimal level of therapeutic genome editing is less relative to cases where a larger change in the gene product levels is needed to gain a clinically relevant response. In one embodiment, the minimal level of therapeutic genome editing can range from 0.1 to 1%, 1-5%, 5-10%, 10-15%, 15-20%, 20-25%, 25-30%, 30-35%, 35-40%, 40-45%. 45-50%, or 50-55%. Thus, where a small change in gene product levels can influence clinical outcomes and diseases where there is a fitness advantage for edited cells, are ideal targets for genome editing therapy, as the therapeutic modification threshold is low enough to permit a high chance of success.

[0901] The activity of NHEJ and HDR DSB repair can vary by cell type and cell state. NHEJ is not highly regulated by the cell cycle and is efficient across cell types, allowing for high levels of gene disruption in accessible target cell populations. In contrast, HDR acts primarily during S/G2 phase, and is therefore restricted to cells that are actively dividing, limiting treatments that require precise genome modifications to mitotic cells [Ciccia, A. & Elledge, S. J. Molecular cell 40, 179-204 (2010); Chapman, J. R., et al. Molecular cell 47, 497-510 (2012)].

[0902] The efficiency of correction via HDR may be controlled by the epigenetic state or sequence of the targeted locus, or the specific repair template configuration (single vs. double stranded, long vs. short homology arms) used [Hacein-Bey-Abina, S., et al. The New England journal of medicine 346, 1185-1193 (2002); Gaspar, H. B., et al. Lancet 364, 2181-2187 (2004); Beumer, K. J., et al. G3 (2013)]. The relative activity of NHEJ and HDR machineries in target cells may also affect gene correction efficiency, as these pathways may compete to resolve DSBs [Beumer, K. J., et al. Proceedings of the National Academy of Sciences of the United States of America 105, 19821-19826 (2008)]. HDR also imposes a delivery challenge not seen with NHEJ strategies, as it uses the concurrent delivery of nucleases and repair templates. Thus, these differences can be kept in mind when designing, optimizing, and/or selecting a Fanzor polypeptide based therapeutic as described in greater detail elsewhere herein.

[0903] Fanzor polypeptide-based polynucleotide modification application can include combinations of proteins, small RNA molecules, and/or repair templates, and can make, In one embodiment, delivery of these multiple parts substantially more challenging than, for example, traditional small molecule therapeutics. Two main strategies for delivery of compositions, systems, and components thereof have been developed: ex vivo and in vivo. In one embodiment of ex vivo treatments, diseased cells are removed from a subject, edited and then transplanted back into the patient. In other embodiments, cells from a healthy allogeneic donor are collected, modified using a composition or component thereof, to impart various functionalities and/or reduce immunogenicity, and administered to an allogeneic recipient in need of treatment. Ex vivo editing has the advantage of allowing the target cell population to be well defined and the specific dosage of therapeutic molecules delivered to cells to be specified. The latter consideration may be particularly important when off-target modifications are a concern, as titrating the amount of nuclease may decrease such mutations (Hsu et al., 2013). Another advantage of ex vivo approaches is the typically high editing rates that can be achieved, due to the development of efficient delivery systems for proteins and nucleic acids into cells in culture for research and gene therapy applications.

[0904] In vivo polynucleotide modification via compositions, systems, and/or components thereof involves direct delivery of the compositions, systems, and/or components thereof to cell types in their native tissues. In vivo polynucleotide modification via compositions, systems, and/or components thereof allows diseases in which the affected cell population is not amenable to ex vivo manipulation to be treated. Furthermore, delivering compositions, systems, and/or components thereof to cells in situ allows for the treatment of multiple tissue and cell types.

[0905] In one embodiment, such as those where viral vector systems are used to generate viral particles to deliver the composition and/or component thereof to a cell, the total cargo size of the composition and/or component thereof should be considered as vector systems can have limits on the size of a polynucleotide that can be expressed therefrom and/or packaged into cargo inside of a viral particle. In one embodiment, the tropism of a vector system, such as a viral vector system, should be considered as it can impact the cell type to which the composition or component thereof can be efficiently and/or effectively delivered.

[0906] When delivering a system or component thereof via a viral-based system, it can be important to consider the amount of viral particles that will be needed to achieve a therapeutic effect so as to account for the potential immune response that can be elicited by the viral particles when delivered to a subject or cell(s). When delivering a system or component thereof via a viral based system, it can be important to consider mechanisms of controlling the distribution and/or dosage of the system in vivo. Generally, to reduce the potential for off-target effects, it is optimal but not necessarily required, that the amount of the system be as close to the minimum or least effective dose. In practice this can be challenging to do.

[0907] In one embodiment, it can be important to consider the immunogenicity of the system or component thereof. In embodiments, where the immunogenicity of the system or component thereof is of concern, the immunogenicity system or component thereof can be reduced. By way of example only, the immunogenicity of the system or component thereof can be reduced using the approach set out in Tangri et al. Accordingly, directed evolution or rational design may be used to reduce the immunogenicity of the Fanzor polypeptide in the host species (human or other species).

### Therapeutic Agent Development

[0908] The compositions, systems, and components thereof described herein can be used to develop Fanzor polypeptide-based biologically active agents, such as small molecule therapeutics. Thus, described herein are methods for developing a biologically active agent that modulates a cell function and/or signaling event associated with a disease and/or disease gene. In one embodiment, the method comprises (a) contacting a test compound with a diseased cell and/or a cell containing a disease gene cell; and (b) detecting a change in a readout that is indicative of a reduction or an augmentation of a cell signaling event or other cell functionality associated with said disease or disease gene, thereby developing said biologically active agent that modulates said cell signaling event or other functionality associated with said disease gene. In one embodiment, the diseased cell is a model cell described elsewhere herein. In one embodiment, the diseased cell is a diseased cell isolated from a subject in need of treatment. In one embodiment, the test compound is a small molecule agent. In one embodiment, test compound is a small molecule agent. In one embodiment, the test compound is a biologic molecule agent.

[0909] In one embodiment, the method involves developing a therapeutic based on the composition, system, described herein. In particular embodiments, the therapeutic comprises a Fanzor polypeptide and/or a nucleic acid component with a reprogrammable spacer capable of hybridizing to a target sequence of interest. In particular embodiments, the therapeutic is a vector or vector system that can contain a) a first regulatory element operably linked to a nucleotide sequence encoding the Fanzor polypeptide; and b) a second regulatory element operably linked to one or more nucleotide sequences encoding one or more nucleic acid molecules comprising a nucleic acid component comprising a reprogrammable spacer sequence, a conserved RNA sequence; wherein components (a) and (b) are located on same or different vectors. In particular embodiments, the biologically active agent is a composition comprising a delivery system operably configured to deliver composition, system, or components thereof, and/or or one or more polynucleotide sequences, vectors, or vector systems containing or encoding said components into a cell and capable of forming a complex with the components of the composition and system herein, and wherein said complex is operable in the cell. In one embodiment, the complex can include the Fanzor polypeptide as described herein, nucleic acid component scaffold comprising the guide sequence (reprogrammable spacer sequence), and a conserved nucleotide sequence. In any such compositions, the delivery system can be a yeast system, a lipofection system, a microinjection system, a biolistic system, virosomes, liposomes, immunoliposomes, polycations, lipid:nucleic acid conjugates or artificial virions, or any other system as described herein. In particular embodiments, the delivery is via a particle, a nanoparticle, a lipid or a cell penetrating peptide (CPP).

[0910] Also described herein are methods for developing or designing a composition, system, optionally a composition, system, based therapy or therapeutic, comprising (a) selecting for a (therapeutic) locus of interest nucleic acid component target sites, wherein said target sites have minimal sequence variation across a population, and from said selected target sites subselecting target sites, wherein a nucleic acid component directed against said target sites recognizes a minimal number of off-target sites across said population, or (b) selecting for a (therapeutic) locus of interest nucleic acid component target sites, wherein said target sites have minimal sequence variation across a population, or selecting for a (therapeutic) locus of interest nucleic acid component target sites, wherein a nucleic acid component directed against said target sites recognizes a minimal number of off-target sites across said population, and optionally estimating the number of (sub)selected target sites needed to treat or otherwise modulate or manipulate a population, and optionally validating one or more of the (sub)selected target sites for an individual subject, optionally designing one or more nucleic acid component recognizing one or more of said (sub)selected target sites.

[0911] In one embodiment, the method for developing or designing a nucleic acid component for use in a composition, system, optionally a composition, system, based therapy or therapeutic, can include (a) selecting for a (therapeutic) locus of interest nucleic acid component target sites, wherein said target sites have minimal sequence variation across a population, and from said selected target sites subselecting target sites, wherein a nucleic acid component molecule directed against said target sites recognizes a minimal number of off-target sites across said population, or (b) selecting for a (therapeutic) locus of interest nucleic acid component molecule target sites, wherein said target sites have minimal sequence variation across a population, or selecting for a (therapeutic) locus of interest nucleic acid component molecule target sites, wherein a nucleic acid component molecule directed against said target sites recognizes a minimal number of off-target sites across said population, and optionally estimating the number of (sub)selected target sites needed to treat or otherwise modulate or manipulate a population, optionally validating one or more of the (sub)selected target sites for an individual subject, optionally designing one or more nucleic acid component molecule recognizing one or more of said (sub)selected target sites.

[0912] In one embodiment, thee method for developing or designing a composition, system, optionally a composition, system, based therapy or therapeutic in a population, can include (a) selecting for a (therapeutic) locus of interest reprogrammable spacer target sites, wherein said target sites have minimal sequence variation across a population, and from said selected target sites subselecting target sites, wherein a nucleic acid component directed against said target sites recognizes a minimal number of off-target sites across said population, or (b) selecting for a (therapeutic) locus of interest nucleic acid component reprogrammable spacer target sites, wherein said target sites have minimal sequence variation across a population, or selecting for a (therapeutic) locus of interest nucleic acid component reprogrammable spacer target sites, wherein a nucleic acid component directed against said target sites recognizes a minimal number of off-target sites across said population, and optionally estimating the number of (sub)selected target sites needed to treat or otherwise modulate or manipulate a population, optionally validating one or more of the (sub)selected target sites for an individual subject, optionally designing one or more nucleic acid component recognizing one or more of said (sub)selected target sites.

[0913] In one embodiment the method for developing or designing a nucleic acid component molecule for use in a composition, system, optionally a composition, system, based therapy or therapeutic in a population, can include (a) selecting for a (therapeutic) locus of interest nucleic acid component molecule target sites, wherein said target sites have minimal sequence variation across a population, and from said selected target sites subselecting target sites, wherein a nucleic acid component molecule directed against said target sites recognizes a minimal number of off-target sites across said population, or (b) selecting for a (therapeutic) locus of interest nucleic acid component molecule target sites, wherein said target sites have minimal sequence variation across a population, or selecting for a (therapeutic) locus of interest nucleic acid component molecule target sites, wherein a nucleic acid component molecule directed against said target sites recognizes a minimal number of off-target sites across said population, and optionally estimating the number of (sub)selected target sites needed to treat or otherwise modulate or manipulate a population, optionally validating one or more of the (sub)selected target sites for an individual subject, optionally designing one or more nucleic acid component reprogrammable spacer recognizing one or more of said (sub)selected target sites.

[0914] In one embodiment, the method for developing or designing a composition, system, such as a composition, system, based therapy or therapeutic, optionally in a population; or for developing or designing a nucleic acid component reprogrammable spacer for use in a composition, system, optionally a composition, system, based therapy or therapeutic, optionally in a population, can include selecting a set of target sequences for one or more loci in a target population, wherein the target sequences do not contain variants occurring above a threshold allele frequency in the target population (i.e. platinum target sequences); removing from said selected (platinum) target sequences any target sequences having high frequency off-target candidates (relative to other (platinum) targets in the set) to define a final target sequence set; preparing one or more, such as a set of compositions, systems, based on the final target sequence set, optionally wherein a number of composition prepared is based (at least in part) on the size of a target population.

[0915] In one embodiment, off-target candidates/off-targets, TAMrestrictiveness, target cleavage efficiency, or effector protein specificity is identified or determined using a sequencing-based double-strand break (DSB) detection assay, such as described herein elsewhere. In one embodiment, off-target candidates/off-targets are identified or determined using a sequencing-based double-strand break (DSB) detection assay, such as described herein elsewhere. In one embodiment, off-targets, or off target candidates have at least 1, preferably 1-3, mismatches or (distal) TAMmismatches, such as 1 or more, such as 1, 2, 3, or more (distal) TAMmismatches. In one embodiment, sequencing-based DSB detection assay comprises labeling a site of a DSB with an adapter comprising a primer binding site, labeling a site of a DSB with a barcode or unique molecular identifier, or combination thereof, as described herein elsewhere.

[0916] It will be understood that the reprogrammable spacer sequence of the nucleic acid component is 100% complementary to the target site, i.e., does not comprise any mismatch with the target site. It will be further understood that “recognition” of an (off-)target site by a reprogrammable spacer presupposes composition, system, functionality, i.e., an (off-)target site is only recognized by a reprogrammable spacer RNA if binding of the reprogrammable spacer RNA to the (off-)target site leads to composition, system, activity (such as induction of single or double strand DNA cleavage, transcriptional modulation, etc.).

[0917] In one embodiment, the target sites having minimal sequence variation across a population are characterized by absence of sequence variation in at least 99%, preferably at least 99.9%, more preferably at least 99.99% of the population. In one embodiment, optimizing target location comprises selecting target sequences or loci having an absence of sequence variation in at least 99%, preferably at least 99.9%, more preferably at least 99.99% of a population. These targets are referred to herein elsewhere also as “platinum targets”. In one embodiment, said population comprises at least 1000 individuals, such as at least 5000 individuals, such as at least 10000 individuals, such as at least 50000 individuals.

[0918] In one embodiment, the off-target sites are characterized by at least one mismatch between the off-target site and the nucleic acid component. In one embodiment, the off-target sites are characterized by at most five, preferably at most four, more preferably at most three mismatches between the off-target site and the nucleic acid component. In one embodiment, the off-target sites are characterized by at least one mismatch between the off-target site and the nucleic acid component and by at most five, preferably at most four, more preferably at most three mismatches between the off-target site and the nucleic acid component.

[0919] In one embodiment, said minimal number of off-target sites across said population is determined for high-frequency haplotypes in said population. In one embodiment, said minimal number of off-target sites across said population is determined for high-frequency haplotypes of the off-target site locus in said population. In one embodiment, said minimal number of off-target sites across said population is determined for high-frequency haplotypes of the target site locus in said population. In one embodiment, the high-frequency haplotypes are characterized by occurrence in at least 0.1% of the population.

[0920] In one embodiment, the number of (sub)selected target sites needed to treat a population is estimated based on based low frequency sequence variation, such as low frequency sequence variation captured in large scale sequencing datasets. In one embodiment, the number of (sub)selected target sites needed to treat a population of a given size is estimated.

[0921] In one embodiment, the method further comprises obtaining genome sequencing data of a subject to be treated; and treating the subject with a composition, system, selected from the set of compositions, systems, wherein the composition, system, selected is based (at least in part) on the genome sequencing data of the individual. In one embodiment, the ((sub)selected) target is validated by genome sequencing, preferably whole genome sequencing.

[0922] In one embodiment, target sequences or loci as described herein are (further) selected based on optimization of one or more parameters, such as TAMtype (natural or modified), TAMnucleotide content, TAMlength, target sequence length, TAMrestrictiveness, target cleavage efficiency, and target sequence position within a gene, a locus or other genomic region. Methods of optimization are discussed in greater detail elsewhere herein.

[0923] In one embodiment, target sequences or loci as described herein are (further) selected based on optimization of one or more of target loci location, target length, target specificity, and TAMcharacteristics. As used herein, TAMcharacteristics may comprise for instance TAMsequence, TAMlength, and/or TAM GC contents. In one embodiment, optimizing TAMcharacteristics comprises optimizing nucleotide content of aTAM. In one embodiment, optimizing nucleotide content of TAMis selecting a TAMwith a motif that maximizes abundance in the one or more target loci, minimizes mutation frequency, or both. Minimizing mutation frequency can for instance be achieved by selecting TAMsequences devoid of or having low or minimal CpG.

[0924] In one embodiment, the effector protein for each composition and system, in the set of compositions, systems, is selected based on optimization of one or more parameters selected from the group consisting of, effector protein size, ability of effector protein to access regions of high chromatin accessibility, degree of uniform enzyme activity across genomic targets, epigenetic tolerance, mismatch/budge tolerance, effector protein specificity, effector protein stability or half-life, effector protein immunogenicity or toxicity. Methods of optimization are discussed in greater detail elsewhere herein.

### Exemplary Applications in Plants and Fungi

[0925] The compositions, systems, and methods described herein can be used to perform gene or genome interrogation or editing or manipulation in plants and fungi. For example, the applications include investigation and/or selection and/or interrogations and/or comparison and/or manipulations and/or transformation of plant genes or genomes; e.g., to create, identify, develop, optimize, or confer trait(s) or characteristic(s) to plant(s) or to transform a plant or fugus genome. There can accordingly be improved production of plants, new plants with new combinations of traits or characteristics or new plants with enhanced traits. The compositions, systems, and methods can be used with regard to plants in Site-Directed Integration (SDI) or Gene Editing (GE) or any Near Reverse Breeding (NRB) or Reverse Breeding (RB) techniques.

[0926] The compositions, systems, and methods herein may be used to confer desired traits (e.g., enhanced nutritional quality, increased resistance to diseases and resistance to biotic and abiotic stress, and increased production of commercially valuable plant products or heterologous compounds) on essentially any plants and fungi, and their cells and tissues. The compositions, systems, and methods may be used to modify endogenous genes or to modify their expression without the permanent introduction into the genome of any foreign gene.

[0927] In one embodiment, compositions, systems, and methods may be used in genome editing in plants or where RNAi or similar genome editing techniques have been used previously; see, e.g., Nekrasov, “Plant genome editing made easy: targeted mutagenesis in model and crop plants using the CRISPR-Cas system,” Plant Methods 2013, 9:39 (doi: 10.1186/1746-4811-9-39); Brooks, “Efficient gene editing in tomato in the first generation using the CRISPR-Cas9 system,” Plant Physiology September 2014 pp 114.247577; Shan, “Targeted genome modification of crop plants using a CRISPR-Cas system,” Nature Biotechnology 31, 686-688 (2013); Feng, “Efficient genome editing in plants using a CRISPR/Cas system,” Cell Research (2013) 23:1229-1232. doi:10.1038/cr.2013.114; published online 20 Aug. 2013; Xie, “RNA-guided genome editing in plants using a CRISPR-Cas system,” Mol Plant. 2013 November; 6(6):1975-83. doi: 10.1093/mp/sstl 19. Epub 2013 Aug. 17; Xu, “Gene targeting using the Agrobacterium tumefaciens-mediated CRISPR-Cas system in rice,” Rice 2014, 7:5 (2014), Zhou et al., “Exploiting SNPs for biallelic CRISPR mutations in the outcrossing woody perennial Populus reveals 4-coumarate: CoA ligase specificity and Redundancy,” New Phytologist (2015) (Forum) 1-4 (available online only at www.newphytologist.com); Caliando et al, “Targeted DNA degradation using a CRISPR device stably carried in the host genome, NATURE COMMUNICATIONS 6:6989, DOI: 10.1038/ncomms7989, www.nature.com/naturecommunications DOI: 10.1038/ncomms7989; U.S. Pat. No. 6,603,061—Agrobacterium-Mediated Plant Transformation Method; U.S. Pat. No. 7,868,149—Plant Genome Sequences and Uses Thereof and US 2009/0100536—Transgenic Plants with Enhanced Agronomic Traits, Morrell et al “Crop genomics: advances and applications,” Nat Rev Genet. 2011 Dec. 29; 13(2):85-96, all the contents and disclosure of each of which are herein incorporated by reference in their entirety. Aspects of utilizing the compositions, systems, and methods may be analogous to the use of the composition in plants, and mention is made of the University of Arizona website “CRISPR-PLANT” (genome.arizona.edu/crispr/) (supported by Penn State and AGI) for directions to nucleic acid modification in plant systems.

[0928] The compositions, systems, and methods may also be used on protoplasts. A “protoplast” refers to a plant cell that has had its protective cell wall completely or partially removed using, for example, mechanical or enzymatic means resulting in an intact biochemical competent unit of living plant that can reform their cell wall, proliferate and regenerate grow into a whole plant under proper growing conditions.

[0929] The compositions, systems, and methods may be used for screening genes (e.g., endogenous, mutations) of interest. In some examples, genes of interest include those encoding enzymes involved in the production of a component of added nutritional value or generally genes affecting agronomic traits of interest, across species, phyla, and plant kingdom. By selectively targeting e.g., genes encoding enzymes of metabolic pathways, the genes responsible for certain nutritional aspects of a plant can be identified. Similarly, by selectively targeting genes which may affect a desirable agronomic trait, the relevant genes can be identified. Accordingly, the present invention encompasses screening methods for genes encoding enzymes involved in the production of compounds with a particular nutritional value and/or agronomic traits.

[0930] It is also understood that reference herein to animal cells may also apply, mutatis mutandis, to plant or fungal cells unless otherwise apparent; and the enzymes herein having reduced off-target effects and systems employing such enzymes can be used in plant applications, including those mentioned herein.

[0931] In some cases, nucleic acids introduced to plants and fungi may be codon optimized for expression in the plants and fungi. Methods of codon optimization include those described in Kwon K C, et al., Codon Optimization to Enhance Expression Yields Insights into Chloroplast Translation, Plant Physiol. 2016 September; 172(1):62-77.

[0932] The components (e.g., Fanzor polypeptide) in the compositions and systems may further comprise one or more functional domains described herein. In some examples, the functional domains may be an exonuclease. Such exonuclease may increase the efficiency of the Fanzor polypeptide’ function, e.g., mutagenesis efficiency. An example of the functional domain is Trex2, as described in Weiss T et al., www.biorxiv.org/content/10.1101/2020.04.11.037572v1, doi: doi.org/10.1101/2020.04.11.037572.

### Examples of Plants

[0933] The compositions, systems, and methods herein can be used to confer desired traits on essentially any plant. A wide variety of plants and plant cell systems may be engineered for the desired physiological and agronomic characteristics. In general, the term “plant” relates to any various photosynthetic, eukaryotic, unicellular or multicellular organism of the kingdom Plantae characteristically growing by cell division, containing chloroplasts, and having cell walls comprised of cellulose. The term plant encompasses monocotyledonous and dicotyledonous plants.

[0934] The compositions, systems, and methods may be used over a broad range of plants, such as for example with dicotyledonous plants belonging to the orders Magniolales, Illiciales, Laurales, Piperales, Aristochiales, Nymphaeales, Ranunculales, Papeverales, Sarraceniaceae, Trochodendrales, Hamamelidales, Eucomiales, Leitneriales, Myricales, Fagales, Casuarinales, Caryophyllales, Batales, Polygonales, Plumbaginales, Dilleniales, Theales, Malvales, Urticales, Lecythidales, Violales, Salicales, Capparales, Ericales, Diapensales, Ebenales, Primulales, Rosales, Fabales, Podostemales, Haloragales, Myrtales, Cornales, Proteales, San tales, Rafflesiales, Celastrales, Euphorbiales, Rhamnales, Sapindales, Juglandales, Geraniales, Polygalales, Umbellales, Gentianales, Polemoniales, Lamiales, Plantaginales, Scrophulariales, Campanulales, Rubiales, Dipsacales, and Asterales; monocotyledonous plants such as those belonging to the orders Alismatales, Hydrocharitales, Najadales, Triuridales, Commelinales, Eriocaulales, Restionales, Poales, Juncales, Cyperales, Typhales, Bromeliales, Zingiberales, Arecales, Cyclanthales, Pandanales, Arales, Lilliales, and Orchid ales, or with plants belonging to Gymnospermae, e.g., those belonging to the orders Pinales, Ginkgoales, Cycadales, Araucariales, Cupressales and Gnetales.

[0935] The compositions, systems, and methods herein can be used over a broad range of plant species, included in the non-limitative list of dicot, monocot or gymnosperm genera hereunder: Atropa, Alseodaphne, Anacardium, Arachis, Beilschmiedia, Brassica, Carthamus, Cocculus, Croton, Cucumis, Citrus, Citrullus, Capsicum, Catharanthus, Cocos, Coffea, Cucurbita, Daucus, Duguetia, Eschscholzia, Ficus, Fragaria, Glaucium, Glycine, Gossypium, Helianthus, Hevea, Hyoscyamus, Lactuca, Landolphia, Linum, Litsea, Lycopersicon, Lupinus, Manihot, Majorana, Malus, Medicago, Nicotiana, Olea, Parthenium, Papaver, Persea, Phaseolus, Pistacia, Pisum, Pyrus, Prunus, Raphanus, Ricinus, Senecio, Sinomenium, Stephania, Sinapis, Solanum, Theobroma, Trifolium, Trigonella, Vicia, Vinca, Vilis, and Vigna; and the genera Allium, Andropogon, Aragrostis, Asparagus, Avena, Cynodon, Elaeis, Festuca, Festulolium, Heterocallis, Hordeum, Lemna, Lolium, Musa, Oryza, Panicum, Pannesetum, Phleum, Poa, Secale, Sorghum, Triticum, Zea, Abies, Cunninghamia, Ephedra, Picea, Pinus, and Pseudotsuga.

[0936] In one embodiment, target plants and plant cells for engineering include those monocotyledonous and dicotyledonous plants, such as crops including grain crops (e.g., wheat, maize, rice, millet, barley), fruit crops (e.g., tomato, apple, pear, strawberry, orange), forage crops (e.g., alfalfa), root vegetable crops (e.g., carrot, potato, sugar beets, yam), leafy vegetable crops (e.g., lettuce, spinach); flowering plants (e.g., petunia, rose, chrysanthemum), conifers and pine trees (e.g., pine fir, spruce); plants used in phytoremediation (e.g., heavy metal accumulating plants); oil crops (e.g., sunflower, rape seed) and plants used for experimental purposes (e.g., Arabidopsis). Specifically, the plants are intended to comprise without limitation angiosperm and gymnosperm plants such as acacia, alfalfa, amaranth, apple, apricot, artichoke, ash tree, asparagus, avocado, banana, barley, beans, beet, birch, beech, blackberry, blueberry, broccoli, Brussel's sprouts, cabbage, canola, cantaloupe, carrot, cassava, cauliflower, cedar, a cereal, celery, chestnut, cherry, Chinese cabbage, citrus, clementine, clover, coffee, corn, cotton, cowpea, cucumber, cypress, eggplant, elm, endive, eucalyptus, fennel, figs, fir, geranium, grape, grapefruit, groundnuts, ground cherry, gum hemlock, hickory, kale, kiwifruit, kohlrabi, larch, lettuce, leek, lemon, lime, locust, pine, maidenhair, maize, mango, maple, melon, millet, mushroom, mustard, nuts, oak, oats, oil palm, okra, onion, orange, an ornamental plant or flower or tree, papaya, palm, parsley, parsnip, pea, peach, peanut, pear, peat, pepper, persimmon, pigeon pea, pine, pineapple, plantain, plum, pomegranate, potato, pumpkin, radicchio, radish, rapeseed, raspberry, rice, rye, sorghum, safflower, sallow, soybean, spinach, spruce, squash, strawberry, sugar beet, sugarcane, sunflower, sweet potato, sweet corn, tangerine, tea, tobacco, tomato, trees, triticale, turf grasses, turnips, vine, walnut, watercress, watermelon, wheat, yams, yew, and zucchini.

[0937] The term plant also encompasses Algae, which are mainly photoautotrophs unified primarily by their lack of roots, leaves and other organs that characterize higher plants. The compositions, systems, and methods can be used over a broad range of “algae” or “algae cells.” Examples of algae include eukaryotic phyla, including the Rhodophyta (red algae), Chlorophyta (green algae), Phaeophyta (brown algae), Bacillariophyta (diatoms), Eustigmatophyta and dinoflagellates as well as the prokaryotic phylum Cyanobacteria (blue-green algae). Examples of algae species include those of Amphora, Anabaena, Anikstrodesmis, Botryococcus, Chaetoceros, Chlamydomonas, Chlorella, Chlorococcum, Cyclotella, Cylindrotheca, Dunaliella, Emiliana, Euglena, Hematococcus, Isochrysis, Monochrysis, Monoraphidium, Nannochloris, Nannnochloropsis, Navicula, Nephrochloris, Nephroselmis, Nitzschia, Nodularia, Nostoc, Oochromonas, Oocystis, Oscillartoria, Pavlova, Phaeodactylum, Playtmonas, Pleurochrysis, Porhyra, Pseudoanabaena, Pyramimonas, Stichococcus, Synechococcus, Synechocystis, Tetraselmis, Thalassiosira, and Trichodesmium.

### Plant Promoters

[0938] In order to ensure appropriate expression in a plant cell, the components of the components and systems herein may be placed under control of a plant promoter. A plant promoter is a promoter operable in plant cells. A plant promoter is capable of initiating transcription in plant cells, whether or not its origin is a plant cell. The use of different types of promoters is envisaged.

[0939] In some examples, the plant promoter is a constitutive plant promoter, which is a promoter that is able to express the open reading frame (ORF) that it controls in all or nearly all of the plant tissues during all or nearly all developmental stages of the plant (referred to as “constitutive expression”). One example of a constitutive promoter is the cauliflower mosaic virus 35S promoter. In some examples, the plant promoter is a regulated promoter, which directs gene expression not constitutively, but in a temporally- and/or spatially-regulated manner, and includes tissue-specific, tissue-preferred and inducible promoters. Different promoters may direct the expression of a gene in different tissues or cell types, or at different stages of development, or in response to different environmental conditions. In some examples, the plant promoter is a tissue-preferred promoters, which can be utilized to target enhanced expression in certain cell types within a particular plant tissue, for instance vascular cells in leaves or roots or in specific cells of the seed.

[0940] Exemplary plant promoters include those obtained from plants, plant viruses, and bacteria such as Agrobacterium or Rhizobium which comprise genes expressed in plant cells. Additional examples of promoters include those described in Kawamata et al., (1997) Plant Cell Physiol 38:792-803; Yamamoto et al., (1997) Plant J 12:255-65; Hire et al, (1992) Plant Mol Biol 20:207-18, Kuster et al, (1995) Plant Mol Biol 29:759-72, and Capana et al., (1994) Plant Mol Biol 25:681-91.

[0941] In some examples, a plant promoter may be an inducible promoter, which is inducible and allows for spatiotemporal control of gene editing or gene expression may use a form of energy. The form of energy may include sound energy, electromagnetic radiation, chemical energy and/or thermal energy. Examples of inducible systems include tetracycline inducible promoters (Tet-On or Tet-Off), small molecule two-hybrid transcription activations systems (FKBP, ABA, etc.), or light inducible systems (Phytochrome, LOV domains, or cryptochrome), such as a Light Inducible Transcriptional Effector (LITE) that direct changes in transcriptional activity in a sequence-specific manner. In a particular example, of the components of a light inducible system include a Fanzor polypeptide, a light-responsive cytochrome heterodimer (e.g., from Arabidopsis thaliana), and a transcriptional activation/repression domain.

[0942] In some examples, the promoter may be a chemical-regulated promotor (where the application of an exogenous chemical induces gene expression) or a chemical-repressible promoter (where application of the chemical represses gene expression). Examples of chemical-inducible promoters include maize ln2-2 promoter (activated by benzene sulfonamide herbicide safeners), the maize GST promoter (activated by hydrophobic electrophilic compounds used as pre-emergent herbicides), the tobacco PR-1 a promoter (activated by salicylic acid), promoters regulated by antibiotics (such as tetracycline-inducible and tetracycline-repressible promoters).

[0943] Vectors and other regulatory polynucleotides, tags, reporters, and/or the like are described elsewhere herein and, in some embodiments, can be utilized in and/or to produce a modified plant described herein.

### Stable Integration in the Genome of Plants

[0944] In one embodiment, polynucleotides encoding the components of the compositions and systems may be introduced for stable integration into the genome of a plant cell. In some cases, vectors or expression systems may be used for such integration. The design of the vector or the expression system can be adjusted depending on for when, where and under what conditions the nucleic acid component molecule and/or the Fanzor polypeptide gene are expressed. In some cases, the polynucleotides may be integrated into an organelle of a plant, such as a plastid, mitochondrion or a chloroplast. The elements of the expression system may be on one or more expression constructs which are either circular such as a plasmid or transformation vector, or non-circular such as linear double stranded DNA.

[0945] In one embodiment, the method of integration generally comprises the steps of selecting a suitable host cell or host tissue, introducing the construct(s) into the host cell or host tissue, and regenerating plant cells or plants therefrom. In some examples, the expression system for stable integration into the genome of a plant cell may contain one or more of the following elements: a promoter element that can be used to express the RNA and/or Fanzor polypeptide in a plant cell; a 5′ untranslated region to enhance expression; an intron element to further enhance expression in certain cells, such as monocot cells; a multiple-cloning site to provide convenient restriction sites for inserting the nucleic acid component molecule and/or the Fanzor polypeptide gene sequences and other desired elements; and a 3′ untranslated region to provide for efficient termination of the expressed transcript.

### Transient Expression in Plants

[0946] In one embodiment, the components of the compositions and systems may be transiently expressed in the plant cell. In some examples, the compositions and systems may modify a target nucleic acid only when both the nucleic acid component molecule and the Fanzor polypeptide are present in a cell, such that genomic modification can further be controlled. As the expression of the Fanzor polypeptide is transient, plants regenerated from such plant cells typically contain no foreign DNA. In certain examples, the Fanzor polypeptide is stably expressed and the nucleic acid component molecule sequence is transiently expressed.

[0947] DNA and/or RNA (e.g., mRNA) may be introduced to plant cells for transient expression. In such cases, the introduced nucleic acid may be provided in sufficient quantity to modify the cell but do not persist after a contemplated period of time has passed or after one or more cell divisions.

[0948] The transient expression may be achieved using suitable vectors. Exemplary vectors that may be used for transient expression include a pEAQ vector (may be tailored for Agrobacterium-mediated transient expression) and Cabbage Leaf Curl virus (CaLCuV), and vectors described in Sainsbury F. et al., Plant Biotechnol J. 2009 September; 7(7):682-93; and Yin K et al., Scientific Reports volume 5, Article number: 14926 (2015).

[0949] Combinations of the different methods described above are also envisaged.

Translocation to and/or Expression in Specific Plant Organelles

[0950] The compositions and systems herein may comprise elements for translocation to and/or expression in a specific plant organelle.

### Chloroplast Targeting

[0951] In one embodiment, it is envisaged that the compositions and systems are used to specifically modify chloroplast genes or to ensure expression in the chloroplast. The compositions and systems (e.g., Fanzor polypeptide, nucleic acid components, or their encoding polynucleotides) may be transformed, compartmentalized, and/or targeted to the chloroplast. In an example, the introduction of genetic modifications in the plastid genome can reduce biosafety issues such as gene flow through pollen.

[0952] Examples of methods of chloroplast transformation include Particle bombardment, PEG treatment, and microinjection, and the translocation of transformation cassettes from the nuclear genome to the plastid. In some examples, targeting of chloroplasts may be achieved by incorporating in chloroplast localization sequence, and/or the expression construct a sequence encoding a chloroplast transit peptide (CTP) or plastid transit peptide, operably linked to the 5′ region of the sequence encoding the components of the compositions and systems. Additional examples of transforming, targeting and localization of chloroplasts include those described in WO2010061186, Protein Transport into Chloroplasts, 2010, Annual Review of Plant Biology, Vol. 61: 157-180, and US 20040142476, which are incorporated by reference herein in their entireties.

### Modification of Polyploid Plants

[0953] The compositions, systems, and methods may be used to modify polyploid plants. Polyploid plants carry duplicate copies of their genomes (e.g., as many as six, such as in wheat). In some cases, the compositions, systems, and methods can be multiplexed to affect all copies of a gene, or to target dozens of genes at once. For instance, the compositions, systems, and methods may be used to simultaneously ensure a loss of function mutation in different genes responsible for suppressing defenses against a disease. The modification may be simultaneous suppression the expression of the TaMLO-A1, TaMLO-B1 and TaMLO-D1 nucleic acid sequence in a wheat plant cell and regenerating a wheat plant therefrom, in order to ensure that the wheat plant is resistant to powdery mildew (e.g., as described in WO2015109752).

### Plant Cultures and Regeneration

[0954] In one embodiment, the modified plants or plant cells may be cultured to regenerate a whole plant which possesses the transformed or modified genotype and thus the desired phenotype. Examples of regeneration techniques include those relying on manipulation of certain phytohormones in a tissue culture growth medium, relying on a biocide and/or herbicide marker which has been introduced together with the desired nucleotide sequences, obtaining from cultured protoplasts, plant callus, explants, organs, pollens, embryos or parts thereof.

### Exemplary Applications in Plants

[0955] The compositions, systems, and methods may be used to generate genetic variation(s) in a plant (e.g., crop) of interest. One or more, e.g., a library of, nucleic acid components targeting one or more locations in a genome may be provided and introduced into plant cells together with the Fanzor polypeptide. For example, a collection of genome-scale point mutations and gene knock-outs can be generated. In some examples, the compositions, systems, and methods may be used to generate a plant part or plant from the cells so obtained and screening the cells for a trait of interest. The target genes may include both coding and non-coding regions. In some cases, the trait is stress tolerant and the method is a method for the generation of stress-tolerant crop varieties.

[0956] In one embodiment, the compositions, systems, and methods are used to modify endogenous genes or to modify their expression. The expression of the components may induce targeted modification of the genome, either by direct activity of the Fanzor polypeptide and optionally introduction of recombination template DNA, or by modification of genes targeted. The different strategies described herein above allow Fanzor polypeptide-mediated targeted genome editing without requiring the introduction of the components into the plant genome.

[0957] In some cases, the modification may be performed without the permanent introduction into the genome of the plant of any foreign gene, including those encoding components of the composition herein, so as to avoid the presence of foreign DNA in the genome of the plant. This can be of interest as the regulatory requirements for non-transgenic plants are less rigorous. Components which are transiently introduced into the plant cell are typically removed upon crossing.

[0958] For example, the modification may be performed by transient expression of the components of the compositions and systems. The transient expression may be performed by delivering the components of the compositions and systems with viral vectors, delivery into protoplasts, with the aid of particulate molecules such as nanoparticles or CPPs.

Generation of Plants with Desired Traits

[0959] The compositions, systems, and methods herein may be used to introduce desired traits to plants. The approaches include introduction of one or more foreign genes to confer a trait of interest, editing or modulating endogenous genes to confer a trait of interest.

### Agronomic Traits

[0960] In one embodiment, crop plants can be improved by influencing specific plant traits. Examples of the traits include improved agronomic traits such as herbicide resistance, disease resistance, abiotic stress tolerance, high yield, and superior quality, pesticide-resistance, disease resistance, insect and nematode resistance, resistance against parasitic weeds, drought tolerance, nutritional value, stress tolerance, self-pollination voidance, forage digestibility biomass, and grain yield.

[0961] In one embodiment, genes that confer resistance to pests or diseases may be introduced to plants. In cases there are endogenous genes that confer such resistance in plants, their expression and function may be enhanced (e.g., by introducing extra copies, modifications that enhance expression and/or activity).

[0962] Examples of genes that confer resistance include plant disease resistance genes (e.g., Cf-9, Pto, RSP2, SlDMR6-1), genes conferring resistance to a pest (e.g., those described in WO96/30517), Bacillus thuringiensis proteins, lectins, Vitamin-binding proteins (e.g., avidin), enzyme inhibitors (e.g., protease or proteinase inhibitors or amylase inhibitors), insect-specific hormones or pheromones (e.g., ecdysteroid or a juvenile hormone, variant thereof, a mimetic based thereon, or an antagonist or agonist thereof) or genes involved in the production and regulation of such hormone and pheromones, insect-specific peptides or neuropeptide, Insect-specific venom (e.g., produced by a snake, a wasp, etc., or analog thereof), Enzymes responsible for a hyperaccumulation of a monoterpene, a sesquiterpene, a steroid, hydroxamic acid, a phenylpropanoid derivative or another nonprotein molecule with insecticidal activity, Enzymes involved in the modification of biologically active molecule (e.g., a glycolytic enzyme, a proteolytic enzyme, a lipolytic enzyme, a nuclease, a cyclase, a transaminase, an esterase, a hydrolase, a phosphatase, a kinase, a phosphorylase, a polymerase, an elastase, a chitinase and a glucanase, whether natural or synthetic), molecules that stimulates signal transduction, Viral-invasive proteins or a complex toxin derived therefrom, Developmental-arrestive proteins produced in nature by a pathogen or a parasite, a developmental-arrestive protein produced in nature by a plant, or any combination thereof.

[0963] The compositions, systems, and methods may be used to identify, screen, introduce or remove mutations or sequences lead to genetic variability that give rise to susceptibility to certain pathogens, e.g., host specific pathogens. Such approach may generate plants that are non-host resistance, e.g., the host and pathogen are incompatible or there can be partial resistance against all races of a pathogen, typically controlled by many genes and/or also complete resistance to some races of a pathogen but not to other races.

[0964] In one embodiment, the compositions, systems, and methods may be used to modify genes involved in plant diseases. Such genes may be removed, inactivated, or otherwise regulated or modified. Examples of plant diseases include those described in [0045]-[0080] of US20140213619A1, which is incorporated by reference herein in its entirety.

[0965] In one embodiment, genes that confer resistance to herbicides may be introduced to plants. Examples of genes that confer resistance to herbicides include genes conferring resistance to herbicides that inhibit the growing point or meristem, such as an imidazolinone or a sulfonylurea, genes conferring glyphosate tolerance (e.g., resistance conferred by, e.g., mutant 5-enolpyruvylshikimate-3-phosphate synthase genes, aroA genes and glyphosate acetyl transferase (GAT) genes, respectively), or resistance to other phosphono compounds such as by glufosinate (phosphinothricin acetyl transferase (PAT) genes from Streptomyces species, including Streptomyces hygroscopicus and Streptomyces viridichromogenes), and to pyridinoxy or phenoxy proprionic acids and cyclohexones by ACCase inhibitor-encoding genes), genes conferring resistance to herbicides that inhibit photosynthesis (such as a triazine (psbA and gs+ genes) or a benzonitrile (nitrilase gene), and glutathione S-transferase), genes encoding enzymes detoxifying the herbicide or a mutant glutamine synthase enzyme that is resistant to inhibition, genes encoding a detoxifying enzyme is an enzyme encoding a phosphinothricin acetyltransferase (such as the bar or pat protein from Streptomyces species), genes encoding hydroxyphenylpyruvatedioxygenases (HPPD) inhibitors, e.g., naturally occurring HPPD resistant enzymes, and genes encoding a mutated or chimeric HPPD enzyme.

[0966] In one embodiment, genes involved in Abiotic stress tolerance may be introduced to plants. Examples of genes include those capable of reducing the expression and/or the activity of poly(ADP-ribose) polymerase (PARP) gene, transgenes capable of reducing the expression and/or the activity of the PARG encoding genes, genes coding for a plant-functional enzyme of the nicotineamide adenine dinucleotide salvage synthesis pathway including nicotinamidase, nicotinate phosphoribosyltransferase, nicotinic acid mononucleotide adenyl transferase, nicotinamide adenine dinucleotide synthetase or nicotine amide phosphorybosyltransferase, enzymes involved in carbohydrate biosynthesis, enzymes involved in the production of polyfructose (e.g., the inulin and levan-type), the production of alpha-1,6 branched alpha-1,4-glucans, the production of alternan, the production of hyaluronan.

[0967] In one embodiment, genes that improve drought resistance may be introduced to plants. Examples of genes Ubiquitin Protein Ligase protein (UPL) protein (UPL3), DR02, DR03, ABC transporter, and DREB1A.

### Nutritionally Improved Plants

[0968] In one embodiment, the compositions, systems, and methods may be used to produce nutritionally improved plants. In some examples, such plants may provide functional foods, e.g., a modified food or food ingredient that may provide a health benefit beyond the traditional nutrients it contains. In certain examples, such plants may provide nutraceuticals foods, e.g., substances that may be considered a food or part of a food and provides health benefits, including the prevention and treatment of disease. The nutraceutical foods may be useful in the prevention and/or treatment of diseases in animals and humans, e.g., cancers, diabetes, cardiovascular disease, and hypertension.

[0969] An improved plant may naturally produce one or more desired compounds and the modification may enhance the level or activity or quality of the compounds. In some cases, the improved plant may not naturally produce the compound(s), while the modification enables the plant to produce such compound(s). In some cases, the compositions, systems, and methods used to modify the endogenous synthesis of these compounds indirectly, e.g. by modifying one or more transcription factors that controls the metabolism of this compound.

[0970] Examples of nutritionally improved plants include plants comprising modified protein quality, content and/or amino acid composition, essential amino acid contents, oils and fatty acids, carbohydrates, vitamins and carotenoids, functional secondary metabolites, and minerals. In some examples, the improved plants may comprise or produce compounds with health benefits. Examples of nutritionally improved plants include those described in Newell-McGloughlin, Plant Physiology, July 2008, Vol. 147, pp. 939-953.

[0971] Examples of compounds that can be produced include carotenoids (e.g., α-Carotene or β-Carotene), lutein, lycopene, Zeaxanthin, Dietary fiber (e.g., insoluble fibers, β-Glucan, soluble fibers, fatty acids (e.g., ω-3 fatty acids, Conjugated linoleic acid, GLA,), Flavonoids (e.g., Hydroxycinnamates, flavonols, catechins and tannins), Glucosinolates, indoles, isothiocyanates (e.g., Sulforaphane), Phenolics (e.g., stilbenes, caffeic acid and ferulic acid, epicatechin), Plant stanols/sterols, Fructans, inulins, fructo-oligosaccharides, Saponins, Soybean proteins, Phytoestrogens (e.g., isoflavones, lignans), Sulfides and thiols such as diallyl sulphide, Allyl methyl trisulfide, dithiolthiones, Tannins, such as proanthocyanidins, or any combination thereof.

[0972] The compositions, systems, and methods may also be used to modify protein/starch functionality, shelf life, taste/aesthetics, fiber quality, and allergen, antinutrient, and toxin reduction traits.

[0973] Examples of genes and nucleic acids that can be modified to introduce the traits include stearyl-ACP desaturase, DNA associated with the single allele which may be responsible for maize mutants characterized by low levels of phytic acid, Tf RAP2.2 and its interacting partner SINAT2, Tf Dof1, and DOF Tf AtDof1.1 (OBP2).

### Regulation of Fruit-Ripening

[0974] The compositions, systems, and methods may be used to regulate ripening of fruits. Ripening is a normal phase in the maturation process of fruits and vegetables. Only a few days after it starts it may render a fruit or vegetable inedible, which can bring significant losses to both farmers and consumers.

[0975] In one embodiment, the compositions, systems, and methods are used to reduce ethylene production. In some examples, the compositions, systems, and methods may be used to suppress the expression and/or activity of ACC synthase, insert an ACC deaminase gene or a functional fragment thereof, insert a SAM hydrolase gene or functional fragment thereof, suppress ACC oxidase gene expression

[0976] Alternatively or additionally, the compositions, systems, and methods may be used to modify ethylene receptors (e.g., suppressing ETR1) and/or Polygalacturonase (PG). Suppression of a gene may be achieved by introducing a mutation, an antisense sequence, and/or a truncated copy of the gene to the genome.

### Increasing Storage Life of Plants

[0977] In one embodiment, the compositions, systems, and methods are used to modify genes involved in the production of compounds which affect storage life of the plant or plant part. The modification may be in a gene that prevents the accumulation of reducing sugars in potato tubers. Upon high-temperature processing, these reducing sugars react with free amino acids, resulting in brown, bitter-tasting products and elevated levels of acrylamide, which is a potential carcinogen. In particular embodiments, the methods provided herein are used to reduce or inhibit expression of the vacuolar invertase gene (VInv), which encodes a protein that breaks down sucrose to glucose and fructose.

### Reducing Allergens in Plants

[0978] In one embodiment, the compositions, systems, and methods are used to generate plants with a reduced level of allergens, making them safer for consumers. To this end, the compositions, systems, and methods may be used to identify and modify (e.g., suppress) one or more genes responsible for the production of plant allergens. Examples of such genes include Lol p5, as well as those in peanuts, soybeans, lentils, peas, lupin, green beans, mung beans, such as those described in Nicolaou et al., Current Opinion in Allergy and Clinical Immunology 2011; 11(3):222), which is incorporated by reference herein in its entirety.

### Generation of Male Sterile Plants

[0979] The compositions, systems, and methods may be used to generate male sterile plants. Hybrid plants typically have advantageous agronomic traits compared to inbred plants. However, for self-pollinating plants, the generation of hybrids can be challenging. In different plant types (e.g., maize and rice), genes have been identified which are important for plant fertility, more particularly male fertility. Plants that are as such genetically altered can be used in hybrid breeding programs.

[0980] The compositions, systems, and methods may be used to modify genes involved male fertility, e.g., inactivating (such as by introducing mutations to) genes required for male fertility. Examples of the genes involved in male fertility include cytochrome P450-like gene (MS26) or the meganuclease gene (MS45), and those described in Wan X et al., Mol Plant. 2019 Mar. 4; 12(3):321-342; and Kim Y J, et al., Trends Plant Sci. 2018 January; 23(1):53-65.

### Increasing the Fertility Stage in Plants

[0981] In one embodiment, the compositions, systems, and methods may be used to prolong the fertility stage of a plant such as of a rice. For instance, a rice fertility stage gene such as Ehd3 can be targeted in order to generate a mutation in the gene and plantlets can be selected for a prolonged regeneration plant fertility stage.

### Production of Early Yield of Products

[0982] In one embodiment, the compositions, systems, and methods may be used to produce early yield of the product. For example, flowering process may be modulated, e.g., by mutating flowering repressor gene such as SP5G. Examples of such approaches include those described in Soyk S, et al., Nat Genet. 2017 January; 49(1):162-168.

### Oil and Biofuel Production

[0983] The compositions, systems, and methods may be used to generate plants for oil and biofuel production. Biofuels include fuels made from plant and plant-derived resources. Biofuels may be extracted from organic matter whose energy has been obtained through a process of carbon fixation or are made through the use or conversion of biomass. This biomass can be used directly for biofuels or can be converted to convenient energy containing substances by thermal conversion, chemical conversion, and biochemical conversion. This biomass conversion can result in fuel in solid, liquid, or gas form. Biofuels include bioethanol and biodiesel. Bioethanol can be produced by the sugar fermentation process of cellulose (starch), which may be derived from maize and sugar cane. Biodiesel can be produced from oil crops such as rapeseed, palm, and soybean. Biofuels can be used for transportation.

### Generation of Plants for Production of Vegetable Oils and Biofuels

[0984] The compositions, systems, and methods may be used to generate algae (e.g., diatom) and other plants (e.g., grapes) that express or overexpress high levels of oil or biofuels.

[0985] In some cases, the compositions, systems, and methods may be used to modify genes involved in the modification of the quantity of lipids and/or the quality of the lipids. Examples of such genes include those involved in the pathways of fatty acid synthesis, e.g., acetyl-CoA carboxylase, fatty acid synthase, 3-ketoacyl_acyl-carrier protein synthase III, glycerol-3-phospate deshydrogenase (G3PDH), Enoyl-acyl carrier protein reductase (Enoyl-ACP-reductase), glycerol-3-phosphate acyltransferase, lysophosphatidic acyl transferase or diacylglycerol acyltransferase, phospholipid:diacylglycerol acyltransferase, phoshatidate phosphatase, fatty acid thioesterase such as palmitoyi protein thioesterase, or malic enzyme activities.

[0986] In further embodiments, it is envisaged to generate diatoms that have increased lipid accumulation. This can be achieved by targeting genes that decrease lipid catabolization. Examples of genes include those involved in the activation of triacylglycerol and free fatty acids, β-oxidation of fatty acids, such as genes of acyl-CoA synthetase, 3-ketoacyl-CoA thiolase, acyl-CoA oxidase activity and phosphoglucomutase.

[0987] In some examples, algae may be modified for production of oil and biofuels, including fatty acids (e.g., fatty esters such as acid methyl esters (FAME) and fatty acid ethyl esters (FAEE)). Examples of methods of modifying microalgae include those described in Stovicek et al. Metab. Eng. Comm., 2015; 2:1; U.S. Pat. No. 8,945,839; and International Patent Publication No. WO 2015/086795.

[0988] In some examples, one or more genes may be introduced (e.g., overexpressed) to the plants (e.g., algae) to produce oils and biofuels (e.g., fatty acids) from a carbon source (e.g., alcohol). Examples of the genes include genes encoding acyl-CoA synthases, ester synthases, thioesterases (e.g., tesA, ‘tesA, tesB, fatB, fatB2, fatB3, fatA1, or fatA), acyl-CoA synthases (e.g., fadD, JadK, BH3103, pfl-4354, EAV15023, fadD1, fadD2, RPC_4074, fadDD35, fadDD22, faa39), ester synthases (e.g., synthase/acyl-CoA:diacylglycerl acyltransferase from Simmondsia chinensis, Acinetobacter sp. ADP, Alcanivorax borkumensis, Pseudomonas aeruginosa, Fundibacter jadensis, Arabidopsis thaliana, or Alkaligenes eutrophus, or variants thereof).

[0989] Additionally or alternatively, one or more genes in the plants (e.g., algae) may be inactivated (e.g., expression of the genes is decreased). For examples, one or more mutations may be introduced to the genes. Examples of such genes include genes encoding acyl-CoA dehydrogenases (e.g., fade), outer membrane protein receptors, and transcriptional regulator (e.g., repressor) of fatty acid biosynthesis (e.g., fabR), pyruvate formate lyases (e.g., pflB), lactate dehydrogenases (e.g., IdhA).

### Organic Acid Production

[0990] In one embodiment, plants may be modified to produce organic acids such as lactic acid. The plants may produce organic acids using sugars, pentose or hexose sugars. To this end, one or more genes may be introduced (e.g., and overexpressed) in the plants. An example of such genes includes LDH gene.

[0991] In some examples, one or more genes may be inactivated (e.g., expression of the genes is decreased). For examples, one or more mutations may be introduced to the genes. The genes may include those encoding proteins involved an endogenous metabolic pathway which produces a metabolite other than the organic acid of interest and/or wherein the endogenous metabolic pathway consumes the organic acid.

[0992] Examples of genes that can be modified or introduced include those encoding pyruvate decarboxylases (pdc), fumarate reductases, alcohol dehydrogenases (adh), acetaldehyde dehydrogenases, phosphoenolpyruvate carboxylases (ppc), D-lactate dehydrogenases (d-ldh), L-lactate dehydrogenases (l-ldh), lactate 2-monooxygenases, lactate dehydrogenase, cytochrome-dependent lactate dehydrogenases (e.g., cytochrome B2-dependent L-lactate dehydrogenases).

### Enhancing Plant Properties for Biofuel Production

[0993] In one embodiment, the compositions, systems, and methods are used to alter the properties of the cell wall of plants to facilitate access by key hydrolyzing agents for a more efficient release of sugars for fermentation. By reducing the proportion of lignin in a plant the proportion of cellulose can be increased. In particular embodiments, lignin biosynthesis may be downregulated in the plant so as to increase fermentable carbohydrates.

[0994] In some examples, one or more lignin biosynthesis genes may be down regulated. Examples of such genes include 4-coumarate 3-hydroxylases (C3H), phenylalanine ammonia-lyases (PAL), cinnamate 4-hydroxylases (C4H), hydroxycinnamoyl transferases (HCT), caffeic acid O-methyltransferases (COMT), caffeoyl CoA 3-O-methyltransferases (CCoAOMT), ferulate 5-hydroxylases (F5H), cinnamyl alcohol dehydrogenases (CAD), cinnamoyl CoA-reductases (CCR), 4-coumarate-CoA ligases (4CL), monolignol-lignin-specific glycosyltransferases, and aldehyde dehydrogenases (ALDH), and those described in WO 2008064289.

[0995] In some examples, plant mass that produces lower level of acetic acid during fermentation may be reduced. To this end, genes involved in polysaccharide acetylation (e.g., Cas1L and those described in WO 2010096488) may be inactivated.

### Other Microorganisms for Oils and Biofuel Production

[0996] In one embodiment, microorganisms other than plants may be used for production of oils and biofuels using the compositions, systems, and methods herein. Examples of the microorganisms include those of the genus of Escherichia, Bacillus, Lactobacillus, Rhodococcus, Synechococcus, Synechoystis, Pseudomonas, Aspergillus, Trichoderma, Neurospora, Fusarium, Humicola, Rhizomucor, Kluyveromyces, Pichia, Mucor, Myceliophtora, Penicillium, Phanerochaete, Pleurotus, Trametes, Chrysosporium, Saccharomyces, Stenotrophamonas, Schizosaccharomyces, Yarrowia, or Streptomyces. This is also further discussed elsewhere herein.

### Detecting Modifications in the Plant Genome-Selectable Markers

[0997] When the compositions, systems, and methods are used to modify a plant, suitable methods may be used to confirm and detect the modification made in the plant. In some examples, when a variety of modifications are made, one or more desired modifications or traits resulting from the modifications may be selected and detected. The detection and confirmation may be performed by biochemical and molecular biology techniques such as Southern analysis, PCR, Northern blot, S1 RNase protection, primer-extension or reverse transcriptase-PCR, enzymatic assays, ribozyme activity, gel electrophoresis, Western blot, immunoprecipitation, enzyme-linked immunoassays, in situ hybridization, enzyme staining, and immunostaining.

[0998] In some cases, one or more markers, such as selectable and detectable markers, may be introduced to the plants. Such markers may be used for selecting, monitoring, isolating cells and plants with desired modifications and traits. A selectable marker can confer positive or negative selection and is conditional or non-conditional on the presence of external substrates. Examples of such markers include genes and proteins that confer resistance to antibiotics, such as hygromycin (hpt) and kanamycin (nptII), and genes that confer resistance to herbicides, such as phosphinothricin (bar) and chlorosulfuron (als), enzyme capable of producing or processing a colored substances (e.g., the β-glucuronidase, luciferase, B or C1 genes).

[0999] Other methods and compositions of detection and screening using the systems and compositions of the present invention are described in greater detail elsewhere herein and can be applied to plants and plant tissues and cells.

### Further Exemplary Applications in Plants

[1000] Further applications of the compositions, systems, and methods on plants and fungi include visualization of genetic element dynamics (e.g., as described in Chen B, et al., Cell. 2013 Dec. 19; 155(7):1479-91), targeted gene disruption positive-selection in vitro and in vivo (as described in Malina A et al., Genes Dev. 2013 Dec. 1; 27(23):2602-14), epigenetic modification such as using fusion of Fanzor polypeptide and histone-modifying enzymes (e.g., as described in Rusk N, Nat Methods. 2014 January; 11(1):28), identifying transcription regulators (e.g., as described in Waldrip Z J, Epigenetics. 2014 September; 9(9):1207-11), anti-virus treatment for both RNA and DNA viruses (e.g., as described in Price A A, et al., Proc Natl Acad Sci USA. 2015 May 12; 112(19):6164-9; Ramanan V et al., Sci Rep. 2015 Jun. 2; 5:10833), alteration of genome complexity such as chromosome numbers (e.g., as described in Karimi-Ashtiyani R et al., Proc Natl Acad Sci USA. 2015 Sep. 8; 112(36):11211-6; Anton T, et al., Nucleus. 2014 March-April; 5(2):163-72), self-cleavage of the composition for controlled inactivation/activation (e.g., as described Sugano S S et al., Plant Cell Physiol. 2014 March; 55(3):475-81), multiplexed gene editing (as described in Kabadi A M et al., Nucleic Acids Res. 2014 Oct. 29; 42(19):e147), development of kits for multiplex genome editing (as described in Xing H L et al., BMC Plant Biol. 2014 Nov. 29; 14:327), starch production (as described in Hebelstrup K H et al., Front Plant Sci. 2015 Apr. 23; 6:247), targeting multiple genes in a family or pathway (e.g., as described in Ma X et al., Mol Plant. 2015 August; 8(8):1274-84), regulation of non-coding genes and sequences (e.g., as described in Lowder L G, et al., Plant Physiol. 2015 October; 169(2):971-85), editing genes in trees (e.g., as described in Belhaj K et al., Plant Methods. 2013 Oct. 11; 9(1):39; Harrison M M, et al., Genes Dev. 2014 Sep. 1; 28(17):1859-72; Zhou X et al., New Phytol. 2015 October; 208(2):298-301), introduction of mutations for resistance to host-specific pathogens and pests.

[1001] Additional examples of modifications of plants and fungi that may be performed using the compositions, systems, and methods include analogous modifications described in International Patent Publication Nos. WO2016/099887, WO2016/025131, WO2016/073433, WO2017/066175, WO2017/100158, WO 2017/105991, WO2017/106414, WO2016/100272, WO2016/100571, WO 2016/100568, WO 2016/100562, and WO 2017/019867.

### Applications in Fungi

[1002] The compositions, systems, and methods described herein can be used to perform efficient and cost effective gene or genome interrogation or editing or manipulation in fungi or fungal cells, such as yeast. The approaches and applications in plants may be applied to fungi as well.

[1003] A fungal cell may be any type of eukaryotic cell within the kingdom of fungi, such as phyla of Ascomycota, Basidiomycota, Blastocladiomycota, Chytridiomycota, Glomeromycota, Microsporidia, and Neocallimastigomycota. Examples of fungi or fungal cells in include yeasts, molds, and filamentous fungi.

[1004] In one embodiment, the fungal cell is a yeast cell. A yeast cell refers to any fungal cell within the phyla Ascomycota and Basidiomycota. Examples of yeasts include budding yeast, fission yeast, and mold, S. cerervisiae, Kluyveromyces marxianus, Issatchenkia orientalis, Candida spp. (e.g., Candida albicans), Yarrowia spp. (e.g., Yarrowia lipolytica), Pichia spp. (e.g., Pichia pastoris), Kluyveromyces spp. (e.g., Kluyveromyces lactis and Kluyveromyces marxianus), Neurospora spp. (e.g., Neurospora crassa), Fusarium spp. (e.g., Fusarium oxysporum), and Issatchenkia spp. (e.g., Issatchenkia orientalis, Pichia kudriavzevii and Candida acidothermophilum).

[1005] In one embodiment, the fungal cell is a filamentous fungal cell, which grow in filaments, e.g., hyphae or mycelia. Examples of filamentous fungal cells include Aspergillus spp. (e.g., Aspergillus niger), Trichoderma spp. (e.g., Trichoderma reesei), Rhizopus spp. (e.g., Rhizopus oryzae), and Mortierella spp. (e.g., Mortierella isabellina).

[1006] In one embodiment, the fungal cell is of an industrial strain. Industrial strains include any strain of fungal cell used in or isolated from an industrial process, e.g., production of a product on a commercial or industrial scale. Industrial strain may refer to a fungal species that is typically used in an industrial process, or it may refer to an isolate of a fungal species that may be also used for non-industrial purposes (e.g., laboratory research). Examples of industrial processes include fermentation (e.g., in production of food or beverage products), distillation, biofuel production, production of a compound, and production of a polypeptide. Examples of industrial strains include, without limitation, JAY270 and ATCC4124.

[1007] In one embodiment, the fungal cell is a polyploid cell whose genome is present in more than one copy. Polyploid cells include cells naturally found in a polyploid state, and cells that has been induced to exist in a polyploid state (e.g., through specific regulation, alteration, inactivation, activation, or modification of meiosis, cytokinesis, or DNA replication). A polyploid cell may be a cell whose entire genome is polyploid, or a cell that is polyploid in a particular genomic locus of interest. In some examples, the abundance of nucleic acid component molecule may more often be a rate-limiting component in genome engineering of polyploid cells than in haploid cells, and thus the methods using the composition described herein may take advantage of using certain fungal cell types.

[1008] In one embodiment, the fungal cell is a diploid cell, whose genome is present in two copies. Diploid cells include cells naturally found in a diploid state, and cells that have been induced to exist in a diploid state (e.g., through specific regulation, alteration, inactivation, activation, or modification of meiosis, cytokinesis, or DNA replication). A diploid cell may refer to a cell whose entire genome is diploid, or it may refer to a cell that is diploid in a particular genomic locus of interest.

[1009] In one embodiment, the fungal cell is a haploid cell, whose genome is present in one copy. Haploid cells include cells naturally found in a haploid state, or cells that have been induced to exist in a haploid state (e.g., through specific regulation, alteration, inactivation, activation, or modification of meiosis, cytokinesis, or DNA replication). A haploid cell may refer to a cell whose entire genome is haploid, or it may refer to a cell that is haploid in a particular genomic locus of interest.

[1010] The compositions and systems, and nucleic acid encoding thereof may be introduced to fungi cells using the delivery systems and methods herein. Examples of delivery systems include lithium acetate treatment, bombardment, electroporation, and those described in Kawai et al., 2010, Bioeng Bugs. 2010 November-December; 1(6): 395-403.

[1011] In some examples, a yeast expression vector (e.g., those with one or more regulatory elements) may be used. Examples of such vectors include a centromeric (CEN) sequence, an autonomous replication sequence (ARS), a promoter, such as an RNA Polymerase III promoter, operably linked to a sequence or gene of interest, a terminator such as an RNA polymerase III terminator, an origin of replication, and a marker gene (e.g., auxotrophic, antibiotic, or other selectable markers). Examples of expression vectors for use in yeast may include plasmids, yeast artificial chromosomes, 2 plasmids, yeast integrative plasmids, yeast replicative plasmids, shuttle vectors, and episomal plasmids.

### Biofuel and Materials Production by Fungi

[1012] In one embodiment, the compositions, systems, and methods may be used for generating modified fungi for biofuel and material productions. For instance, the modified fungi for production of biofuel or biopolymers from fermentable sugars and optionally to be able to degrade plant-derived lignocellulose derived from agricultural waste as a source of fermentable sugars. Foreign genes required for biofuel production and synthesis may be introduced into fungi. In some examples, the genes may encode enzymes involved in the conversion of pyruvate to ethanol or another product of interest, degrade cellulose (e.g., cellulase), endogenous metabolic pathways which compete with the biofuel production pathway.

[1013] In some examples, the compositions, systems, and methods may be used for generating and/or selecting yeast strains with improved xylose or cellobiose utilization, isoprenoid biosynthesis, and/or lactic acid production. One or more genes involved in the metabolism and synthesis of these compounds may be modified and/or introduced to yeast cells. Examples of the methods and genes include lactate dehydrogenase, PDC1 and PDC5, and those described in Ha, S. J, et al. (2011) Proc. Natl. Acad. Sci. USA 108(2):504-9 and Galazka, J. M., et al. (2010) Science 330(6000):84-6; Jakocinnas T et al., Metab Eng. 2015 March; 28:213-222; Stovicek V, et al., FEMS Yeast Res. 2017 Aug. 1; 17(5).

### Improved Plants and Yeast Cells

[1014] The present disclosure further provides improved plants and fungi. The improved and fungi may comprise one or more genes introduced, and/or one or more genes modified by the compositions, systems, and methods herein. The improved plants and fungi may have increased food or feed production (e.g., higher protein, carbohydrate, nutrient or vitamin levels), oil and biofuel production (e.g., methanol, ethanol), tolerance to pests, herbicides, drought, low or high temperatures, excessive water, etc.

[1015] The plants or fungi may have one or more parts that are improved, e.g., leaves, stems, roots, tubers, seeds, endosperm, ovule, and pollen. The parts may be viable, nonviable, regeneratable, and/or non-regeneratable.

[1016] The improved plants and fungi may include gametes, seeds, embryos, either zygotic or somatic, progeny and/or hybrids of improved plants and fungi. The progeny may be a clone of the produced plant or fungi, or may result from sexual reproduction by crossing with other individuals of the same species to introgress further desirable traits into their offspring. The cell may be in vivo or ex vivo in the cases of multicellular organisms, particularly plants.

### Exemplary Applications in Non-Human Animals

[1017] The compositions, systems, and methods may be used to study, diagnose, treat, and modify non-human animals, e.g., introducing desirable traits, minimizing or eliminating undesirable traits, and evaluating disease resilience and/or susceptibility, treatin and/or preventing diseases, facilitating breeding, etc. In one embodiment, the compositions, systems, and methods may be used to improve breeding and introducing desired traits, e.g., increasing the frequency of trait-associated alleles, introgression of alleles from other breeds/species without linkage drag, and creation of de novo favorable alleles. Genes and other genetic elements that can be targeted may be screened and identified. Examples of application and approaches include those described in Tait-Burkard C, et al., Livestock 2.0—genome editing for fitter, healthier, and more productive farmed animals. Genome Biol. 2018 Nov. 26; 19(1):204; Lillico S, Agricultural applications of genome editing in farmed animals. Transgenic Res. 2019 August; 28(Suppl 2):57-60; Houston R D, et al., Harnessing genomics to fast-track genetic improvement in aquaculture. Nat Rev Genet. 2020 Apr. 16. doi: 10.1038/s41576-020-0227-y, which are incorporated herein by reference in their entireties. Applications described in other sections such as therapeutic, diagnostic, etc. can also be used on the animals herein.

[1018] The compositions, systems, and methods may be used on animals such as fish, amphibians, reptiles, mammals, and birds. The animals may be farm and agriculture animals, or pets. Examples of farm and agriculture animals include horses, goats, sheep, swine, cattle, llamas, alpacas, and birds, e.g., chickens, turkeys, ducks, and geese. The animals may be a non-human primate, e.g., baboons, capuchin monkeys, chimpanzees, lemurs, macaques, marmosets, tamarins, spider monkeys, squirrel monkeys, and vervet monkeys. Examples of pets include dogs, cats, horses, wolfs, rabbits, ferrets, gerbils, hamsters, chinchillas, fancy rats, guinea pigs, canaries, parakeets, and parrots.

[1019] In one embodiment, one or more genes may be introduced (e.g., overexpressed) in the animals to obtain or enhance one or more desired traits. Growth hormones, insulin-like growth factors (IGF-1) may be introduced to increase the growth of the animals, e.g., pigs or salmon (such as described in Pursel V G et al., J Reprod Fertil Suppl. 1990; 40:235-45; Waltz E, Nature. 2017; 548:148). Fat-1 gene (e.g., from C. elegans) may be introduced for production of larger ratio of n-3 to n-6 fatty acids may be induced, e.g., in pigs (such as described in Li M, et al., Genetics. 2018; 8:1747-54). Phytase (e.g., from E. coli) xylanase (e.g., from Aspergillus niger), beta-glucanase (e.g., from bacillus lichenformis) may be introduced to reduce the environmental impact through phosphorous and nitrogen release reduction, e.g., in pigs (such as described in Golovan S P, et al., Nat Biotechnol. 2001; 19:741-5; Zhang X et al., elife. 2018). snucleic acid component decoy may be introduced to induce avian influenza resilience e.g., in chicken (such as described in Lyall et al., Science. 2011; 331:223-6). Lysozyme or lysostaphin may be introduced to induce mastitis resilience e.g., in goat and cow (such as described in Maga E A et al., Foodborne Pathog Dis. 2006; 3:384-92; Wall R J, et al., Nat Biotechnol. 2005; 23:445-51). Histone deacetylase such as HDAC6 may be introduced to induce PRRSV resilience, e.g., in pig (such as described in Lu T., et al., PLoS One. 2017; 12:e0169317). CD163 may be modified (e.g., inactivated or removed) to introduce PRRSV resilience in pigs (such as described in Prather R S et al., Sci Rep. 2017 Oct. 17; 7(1):13371). Similar approaches may be used to inhibit or remove viruses and bacteria (e.g., Swine Influenza Virus (SIV) strains which include influenza C and the subtypes of influenza A known as H1N1, H1N2, H2N1, H3N1, H3N2, and H2N3, as well as pneumonia, meningitis and oedema) that may be transmitted from animals to humans.

[1020] In one embodiment, one or more genes may be modified or edited for disease resistance and production traits. Myostatin (e.g., GDF8) may be modified to increase muscle growth, e.g., in cow, sheep, goat, catfish, and pig (such as described in Crispo M et al., PLoS One. 2015; 10:e0136690; Wang X, et al., Anim Genet. 2018; 49:43-51; Khalil K, et al., Sci Rep. 2017; 7:7301; Kang J-D, et al., RSC Adv. 2017; 7:12541-9). Pc POLLED may be modified to induce horlessness, e.g., in cow (such as described in Carlson D F et al., Nat Biotechnol. 2016; 34:479-81). KISS1R may be modified to induce boretaint (hormone release during sexual maturity leading to undesired meat taste), e.g., in pigs. Dead end protein (dnd) may be modified to induce sterility, e.g., in salmon (such as described in Wargelius A, et al., Sci Rep. 2016; 6:21284). Nano2 and DDX may be modified to induce sterility (e.g., in surrogate hosts), e.g., in pigs and chicken (such as described Park K-E, et al., Sci Rep. 2017; 7:40176; Taylor L et al., Development. 2017; 144:928-34). CD163 may be modified to induce PRRSV resistance, e.g., in pigs (such as described in Whitworth K M, et al., Nat Biotechnol. 2015; 34:20-2). RELA may be modified to induce ASFV resilience, e.g., in pigs (such as described in Lillico S G, et al., Sci Rep. 2016; 6:21645). CD18 may be modified to induce Mannheimia (Pasteurella) haemolytica resilience, e.g., in cows (such as described in Shanthalingam S, et al., roc Natl Acad Sci USA. 2016; 113:13186-90). NRAMP1 may be modified to induce tuberculosis resilience, e.g., in cows (such as described in Gao Y et al., Genome Biol. 2017; 18:13). Endogenous retrovirus genes may be modified or removed for xenotransplantation such as described in Yang L, et al. Science. 2015; 350:1101-4; Niu D et al., Science. 2017; 357:1303-7). Negative regulators of muscle mass (e.g., Myostatin) may be modified (e.g., inactivated) to increase muscle mass, e.g., in dogs (as described in Zou Q et al., J Mol Cell Biol. 2015 December; 7(6):580-3).

[1021] Animals such as pigs with severe combined immunodeficiency (SCID) may generated (e.g., by modifying RAG2) to provide useful models for regenerative medicine, xenotransplantation (discussed also elsewhere herein), and tumor development. Examples of methods and approaches include those described Lee K, et al., Proc Natl Acad Sci USA. 2014 May 20; 111(20):7260-5; and Schomberg et al. FASEB Journal, April 2016; 30(1):Suppl 571.1.

[1022] SNPs in the animals may be modified. Examples of methods and approaches include those described Tan W. et al., Proc Natl Acad Sci USA. 2013 Oct. 8; 110(41):16526-31; Mali P, et al., Science. 2013 Feb. 15; 339(6121):823-6.

[1023] Stem cells (e.g., induced pluripotent stem cells) may be modified and differentiated into desired progeny cells, e.g., as described in Heo Y T et al., Stem Cells Dev. 2015 Feb. 1; 24(3):393-402.

[1024] Profile analysis (such as Igenity) may be performed on animals to screen and identify genetic variations related to economic traits. The genetic variations may be modified to introduce or improve the traits, such as carcass composition, carcass quality, maternal and reproductive traits and average daily gain.

[1025] It will be appreciated that the systems and compositions of the present invention can be used on animals of agriculture importance as well as companion animals, particularly for the treatment and diagnosis of disease, disease susceptibility and/or risk, prevention, coat color, performance (e.g., athletic or reproductive), and lineage/parentage, and breed identity. Exemplary profile analysis for companion animals includes Embark Pet DNA tests, Wisdom Panel pet DNA tests, Basepaws DNA test, Optimal Selection DNA test, and/or the like. These screen for a variety of health and disease risk markers, breed identification markers, and lineage markers. The systems and compositions described herein can be used in similar type profile analysis.

[1026] Compositions and methods for detection of markers relevant to these and other profile analysis of non-human animals are described in greater detail elsewhere herein.

### Detection, Selection, and Screening Compositions, Devices, and Methods

[1027] The Fanzor compositions and systems described herein can be used to detect, select, and screen for target nucleic acid targets, such as those in a sample. In some embodiments, the method of detection includes other processes and methods such as one or more sample and/or nucleic acid preparation or extraction methods, target nucleic amplification. These and others are described herein. Exemplary applications of the detection, selection, and screening methods described herein are also described herein.

### Detection Compositions and Methods of Detection

### Detection Compositions

[1028] In another aspect, embodiments disclosed herein are directed to polynucleotide detection compositions, systems and methods. The detection composition may comprise any of the Fanzor polypeptides and any one or more ωRNAs discussed above. In the addition, the compositions and system may comprise a detection construct. In one example embodiment, the detection construct comprises at least a portion of single-stranded polynucleotide. The one or more ωRNAs are configured to bind a target sequence on a target polypeptide. Binding of the Fanzor complex to the target sequence activates Fanzor cleavage activity and may further activate Fanzor collateral activity whereby Fanzor subsequently cleaves non-target single-stranded polynucleotides in an ωRNA-independent fashion. Accordingly, the detection construct can be configured so that a detectable signal is generated upon cleavage of the single-stranded portion of the detection constructs thereby indicating the present of the target sequence in a sample. Example detection constructs are discussed in further detail below. In further example embodiments, the compositions may further comprise amplification reagents. Amplification reagents may comprise primers and polymerase and/or reverse transcriptases needed to amplify the target sequence. In an example embodiment, the amplification reagents are isothermal amplification reagents. In other example embodiments, the compositions and systems may further comprise quick extraction solutions that allow for detection of target sequences in crude samples or with minimal purification prior to amplification and/or detection.

### Detection Construct

[1029] The systems and methods described herein comprise a detection construct. As used herein, a “detection construct” refers to a molecule that can be cleaved or otherwise deactivated by an activated Fanzor system protein described herein. The term “detection construct” may also be referred to in the alternative as a “masking construct.” Depending on the nuclease activity of the Fanzor protein and the methods utilized, the masking construct may be an RNA-based masking construct or a DNA-based masking construct. The Nucleic Acid-based masking constructs comprises a nucleic acid element that is cleavable by a Fanzor protein. Cleavage of the nucleic acid element releases agents or produces conformational changes that allow a detectable signal to be produced. Example constructs demonstrating how the nucleic acid element may be used to prevent or mask generation of detectable signal are described below and embodiments of the invention comprise variants of the same. Prior to cleavage, or when the masking construct is in an ‘active’ state, the masking construct blocks the generation or detection of a positive detectable signal. In one embodiment, detection constructs are designed for cutting motifs of particular Fanzor proteins.

[1030] It will be understood that in certain example embodiments a minimal background signal may be produced in the presence of an active masking construct. A positive detectable signal may be any signal that can be detected using optical, fluorescent, chemiluminescent, electrochemical or other detection methods known in the art. The term “positive detectable signal” is used to differentiate from other detectable signals that may be detectable in the presence of the masking construct. For example, in one embodiment a first signal may be detected when the masking agent is present or when a Fanzor system has not been activated (i.e., a negative detectable signal), which then converts to a second signal (e.g., the positive detectable signal) upon detection of the target molecules and cleavage or deactivation of the masking agent, or upon activation of the Fanzor protein. The positive detectable signal, then, is a signal detected upon activation of the Fanzor protein, and may be, in a colorimetric or fluorescent assay, a decrease in fluorescence or color relative to a control or an increase in fluorescence or color relative to a control, depending on the configuration of the lateral flow substrate, and as described further herein.

[1031] In certain example embodiments, the masking construct may comprise a HCR initiator sequence and a cutting motif, or a cleavable structural element, such as a loop or hairpin, that prevents the initiator from initiating the HCR reaction. The cutting motif may be preferentially cut by one of the activated Fanzor effector proteins. Upon cleavage of the cutting motif or structure element by an activated Fanzor protein, the initiator is then released to trigger the HCR reaction, detection thereof indicating the presence of one or more targets in the sample. In certain example embodiments, the masking construct comprises a hairpin with a RNA loop. When an activated Fanzor protein cuts the RNA loop, the initiator can be released to trigger the HCR reaction.

[1032] In certain example embodiments, the masking construct may suppress generation of a gene product. The gene product may be encoded by a reporter construct that is added to the sample. The masking construct may be an interfering RNA involved in a RNA interference pathway, such as a short hairpin RNA (shRNA) or small interfering RNA (siRNA). The masking construct may also comprise microRNA (miRNA). While present, the masking construct suppresses expression of the gene product. The gene product may be a fluorescent protein or other RNA transcript or proteins that would otherwise be detectable by a labeled probe, aptamer, or antibody but for the presence of the masking construct. Upon activation of the effector protein the masking construct is cleaved or otherwise silenced allowing for expression and detection of the gene product as the positive detectable signal. In preferred embodiments, the masking constructs comprise two or more detectable signals, for example, fluorescent signals, that can be read on different channels of a fluorimeter.

[1033] In specific embodiments, the masking construct comprises a silencing RNA that suppresses generation of a gene product encoded by a reporting construct, wherein the gene product generates the detectable positive signal when expressed.

[1034] In certain example embodiments, the masking construct may sequester one or more reagents needed to generate a detectable positive signal such that release of the one or more reagents from the masking construct results in generation of the detectable positive signal. The one or more reagents may combine to produce a colorimetric signal, a chemiluminescent signal, a fluorescent signal, or any other detectable signal and may comprise any reagents known to be suitable for such purposes. In certain example embodiments, the one or more reagents are sequestered by RNA aptamers that bind the one or more reagents. The one or more reagents are released when the effector protein is activated upon detection of a target molecule and the RNA or DNA aptamers are degraded.

[1035] In certain example embodiments, the masking construct may be immobilized on a solid substrate in an individual discrete volume (defined further below) and sequesters a single reagent. For example, the reagent may be a bead comprising a dye. When sequestered by the immobilized reagent, the individual beads are too diffuse to generate a detectable signal, but upon release from the masking construct are able to generate a detectable signal, for example by aggregation or simple increase in solution concentration. In certain example embodiments, the immobilized masking agent is an RNA- or DNA-based aptamer that can be cleaved by the activated effector protein upon detection of a target molecule.

[1036] In certain other example embodiments, the masking construct binds to an immobilized reagent in solution thereby blocking the ability of the reagent to bind to a separate labeled binding partner that is free in solution. Thus, upon application of a washing step to a sample, the labeled binding partner can be washed out of the sample in the absence of a target molecule. However, if the effector protein is activated, the masking construct is cleaved to a degree sufficient to interfere with the ability of the masking construct to bind the reagent thereby allowing the labeled binding partner to bind to the immobilized reagent. Thus, the labeled binding partner remains after the wash step indicating the presence of the target molecule in the sample. In certain aspects, the masking construct that binds the immobilized reagent is a DNA or RNA aptamer. The immobilized reagent may be a protein and the labeled binding partner may be a labeled antibody. Alternatively, the immobilized reagent may be streptavidin and the labeled binding partner may be labeled biotin. The label on the binding partner used in the above embodiments may be any detectable label known in the art. In addition, other known binding partners may be used in accordance with the overall design described herein.

[1037] In certain example embodiments, the masking construct may comprise a ribozyme. Ribozymes are RNA molecules having catalytic properties. Ribozymes, both naturally and engineered, comprise or consist of RNA that may be targeted by the effector proteins disclosed herein. The ribozyme may be selected or engineered to catalyze a reaction that either generates a negative detectable signal or prevents generation of a positive control signal. Upon deactivation of the ribozyme by the activated effector protein the reaction generating a negative control signal, or preventing generation of a positive detectable signal, is removed thereby allowing a positive detectable signal to be generated. In one example embodiment, the ribozyme may catalyze a colorimetric reaction causing a solution to appear as a first color. When the ribozyme is deactivated, the solution then turns to a second color, the second color being the detectable positive signal. An example of how ribozymes can be used to catalyze a colorimetric reaction are described in Zhao et al. “Signal amplification of glucosamine-6-phosphate based on ribozyme glmS,” Biosens Bioelectron. 2014; 16:337-42 and provide an example of how such a system could be modified to work in the context of the embodiments disclosed herein. Alternatively, ribozymes, when present can generate cleavage products of, for example, RNA transcripts. Thus, detection of a positive detectable signal may comprise detection of non-cleaved RNA transcripts that are only generated in the absence of the ribozyme.

[1038] In one embodiment, the masking construct may be a ribozyme that generates a negative detectable signal, and wherein a positive detectable signal is generated when the ribozyme is deactivated.

[1039] In certain example embodiments, the one or more reagents is a protein, such as an enzyme, capable of facilitating generation of a detectable signal, such as a colorimetric, chemiluminescent, or fluorescent signal, that is inhibited or sequestered such that the protein cannot generate the detectable signal by the binding of one or more DNA or RNA aptamers to the protein. Upon activation of the effector proteins disclosed herein, the DNA or RNA aptamers are cleaved or degraded to an extent that they no longer inhibit the protein's ability to generate the detectable signal. In certain example embodiments, the aptamer is a thrombin inhibitor aptamer. In certain example embodiments, the thrombin inhibitor aptamer has a sequence of GGGAACAAAGCUGAAGUACUUACCC (SEQ ID NO: 561). When this aptamer is cleaved, thrombin will become active and will cleave a peptide colorimetric or fluorescent substrate. In certain example embodiments, the colorimetric substrate is para-nitroanilide (pNA) covalently linked to the peptide substrate for thrombin. Upon cleavage by thrombin, pNA is released and becomes yellow in color and easily visible to the eye. In certain example embodiments, the fluorescent substrate is 7-amino-4-methylcoumarin a blue fluorophore that can be detected using a fluorescence detector. Inhibitory aptamers may also be used for horseradish peroxidase (HRP), beta-galactosidase, or calf alkaline phosphatase (CAP) and within the general principals laid out above.

[1040] In one embodiment, RNAse or DNAse activity is detected colorimetrically via cleavage of enzyme-inhibiting aptamers. One potential mode of converting DNAse or RNAse activity into a colorimetric signal is to couple the cleavage of a DNA or RNA aptamer with the re-activation of an enzyme that is capable of producing a colorimetric output. In the absence of RNA or DNA cleavage, the intact aptamer will bind to the enzyme target and inhibit its activity. The advantage of this readout system is that the enzyme provides an additional amplification step: once liberated from an aptamer via collateral activity (e.g., Fanzor collateral activity), the colorimetric enzyme will continue to produce colorimetric product, leading to a multiplication of signal.

[1041] In one embodiment, an existing aptamer that inhibits an enzyme with a colorimetric readout is used. Several aptamer/enzyme pairs with colorimetric readouts exist, such as thrombin, protein C, neutrophil elastase, and subtilisin. These proteases have colorimetric substrates based upon pNA and are commercially available. In one embodiment, a novel aptamer targeting a common colorimetric enzyme is used. Common and robust enzymes, such as beta-galactosidase, horseradish peroxidase, or calf intestinal alkaline phosphatase, could be targeted by engineered aptamers designed by selection strategies such as SELEX. Such strategies allow for quick selection of aptamers with nanomolar binding efficiencies and could be used for the development of additional enzyme/aptamer pairs for colorimetric readout.

[1042] In one embodiment, the masking construct may be a DNA or RNA aptamer and/or may comprise a DNA or RNA-tethered inhibitor.

[1043] In one embodiment, the masking construct may comprise a DNA or RNA oligonucleotide to which a detectable ligand and a masking component are attached.

[1044] In one embodiment, RNAse or DNase activity is detected colorimetrically via cleavage of RNA-tethered inhibitors. Many common colorimetric enzymes have competitive, reversible inhibitors: for example, beta-galactosidase can be inhibited by galactose. Many of these inhibitors are weak, but their effect can be increased by increases in local concentration. By linking local concentration of inhibitors to DNase RNAse activity, colorimetric enzyme and inhibitor pairs can be engineered into DNase and RNAse sensors. The colorimetric DNase or RNAse sensor based upon small-molecule inhibitors involves three components: the colorimetric enzyme, the inhibitor, and a bridging RNA or DNA that is covalently linked to both the inhibitor and enzyme, tethering the inhibitor to the enzyme. In the uncleaved configuration, the enzyme is inhibited by the increased local concentration of the small molecule; when the DNA or RNA is cleaved (e.g. by Fanzor collateral cleavage), the inhibitor will be released and the colorimetric enzyme will be activated.

[1045] In one embodiment, the aptamer or DNA- or RNA-tethered inhibitor may sequester an enzyme, wherein the enzyme generates a detectable signal upon release from the aptamer or DNA or RNA tethered inhibitor by acting upon a substrate. In one embodiment, the aptamer may be an inhibitor aptamer that inhibits an enzyme and prevents the enzyme from catalyzing generation of a detectable signal from a substance. In one embodiment, the DNA- or RNA-tethered inhibitor may inhibit an enzyme and may prevent the enzyme from catalyzing generation of a detectable signal from a substrate.

[1046] In one embodiment, RNAse activity is detected colorimetrically via formation and/or activation of G-quadruplexes. G quadruplexes in DNA can complex with heme (iron (III)-protoporphyrin IX) to form a DNAzyme with peroxidase activity. When supplied with a peroxidase substrate (e.g., ABTS: (2,2′-Azinobis [3-ethylbenzothiazoline-6-sulfonic acid]-diammonium salt)), the G-quadruplex-heme complex in the presence of hydrogen peroxide causes oxidation of the substrate, which then forms a green color in solution. An example G-quadruplex forming DNA sequence is: GGGTAGGGCGGGTTGGGA (SEQ ID NO: 562). By hybridizing an additional DNA or RNA sequence, referred to herein as a “staple,” to this DNA aptamer, formation of the G-quadraplex structure will be limited. Upon collateral activation, the staple will be cleaved allowing the G quadraplex to form and heme to bind. This strategy is particularly appealing because color formation is enzymatic, meaning there is additional amplification beyond collateral activation.

[1047] In one embodiment, the masking construct may comprise an RNA oligonucleotide designed to bind a G-quadruplex forming sequence, wherein a G-quadruplex structure is formed by the G-quadruplex forming sequence upon cleavage of the masking construct, and wherein the G-quadruplex structure generates a detectable positive signal.

[1048] In certain example embodiments, the masking construct may be immobilized on a solid substrate in an individual discrete volume (defined further below) and sequesters a single reagent. For example, the reagent may be a bead comprising a dye. When sequestered by the immobilized reagent, the individual beads are too diffuse to generate a detectable signal, but upon release from the masking construct are able to generate a detectable signal, for example by aggregation or simple increase in solution concentration. In certain example embodiments, the immobilized masking agent is a DNA- or RNA-based aptamer that can be cleaved by the activated effector protein upon detection of a target molecule.

[1049] In one example embodiment, the masking construct comprises a detection agent that changes color depending on whether the detection agent is aggregated or dispersed in solution. For example, certain nanoparticles, such as colloidal gold, undergo a visible purple to red color shift as they move from aggregates to dispersed particles. Accordingly, in certain example embodiments, such detection agents may be held in aggregate by one or more bridge molecules. At least a portion of the bridge molecule comprises RNA or DNA. Upon activation of the effector proteins disclosed herein, the RNA or DNA portion of the bridge molecule is cleaved allowing the detection agent to disperse and resulting in the corresponding change in color. In certain example embodiments, the detection agent is a colloidal metal. The colloidal metal material may include water-insoluble metal particles or metallic compounds dispersed in a liquid, a hydrosol, or a metal sol. The colloidal metal may be selected from the metals in groups IA, IB, IIB and IIIB of the periodic table, as well as the transition metals, especially those of group VIII. Preferred metals include gold, silver, aluminum, ruthenium, zinc, iron, nickel and calcium. Other suitable metals also include the following in all of their various oxidation states: lithium, sodium, magnesium, potassium, scandium, titanium, vanadium, chromium, manganese, cobalt, copper, gallium, strontium, niobium, molybdenum, palladium, indium, tin, tungsten, rhenium, platinum, and gadolinium. The metals are preferably provided in ionic form, derived from an appropriate metal compound, for example the Al³⁺, Ru³⁺, Zn²⁺, Fe³⁺, Ni²⁺ and Ca²⁺ ions.

[1050] When the RNA or DNA bridge is cut by the activated Fanzor polypeptide, the aforementioned color shift is observed. In certain example embodiments the particles are colloidal metals. In certain other example embodiments, the colloidal metal is a colloidal gold. In certain example embodiments, the colloidal nanoparticles are 15 nm gold nanoparticles (AuNPs). Due to the unique surface properties of colloidal gold nanoparticles, maximal absorbance is observed at 520 nm when fully dispersed in solution and appear red in color to the naked eye. Upon aggregation of AuNPs, they exhibit a red-shift in maximal absorbance and appear darker in color, eventually precipitating from solution as a dark purple aggregate. In certain example embodiments the nanoparticles are modified to include DNA linkers extending from the surface of the nanoparticle. Individual particles are linked together by single-stranded RNA (ssRNA) or single-stranded DNA (ssDNA) bridges that hybridize on each end to at least a portion of the DNA linkers. Thus, the nanoparticles will form a web of linked particles and aggregate, appearing as a dark precipitate. Upon activation of the Fanzor polypeptides disclosed herein, the ssRNA or ssDNA bridge will be cleaved, releasing the AU NPS from the linked mesh and produce a visible red color. Example DNA linkers and bridge sequences are listed below. Thiol linkers on the end of the DNA linkers may be used for surface conjugation to the AuNPS. Other forms of conjugation may be used. In certain example embodiments, two populations of AuNPs may be generated, one for each DNA linker. This will help facilitate proper binding of the ssRNA bridge with proper orientation. In certain example embodiments, a first DNA linker is conjugated by the 3′ end while a second DNA linker is conjugated by the 5′ end.

[1051] In certain other example embodiments, the masking construct may comprise an RNA or DNA oligonucleotide to which are attached a detectable label and a masking agent of that detectable label. An example of such a detectable label/masking agent pair is a fluorophore and a quencher of the fluorophore. Quenching of the fluorophore can occur as a result of the formation of a non-fluorescent complex between the fluorophore and another fluorophore or non-fluorescent molecule. This mechanism is known as ground-state complex formation, static quenching, or contact quenching. Accordingly, the RNA or DNA oligonucleotide may be designed so that the fluorophore and quencher are in sufficient proximity for contact quenching to occur. Fluorophores and their cognate quenchers are known in the art and can be selected for this purpose by one having ordinary skill in the art. The particular fluorophore/quencher pair is not critical in the context of this invention, only that selection of the fluorophore/quencher pairs ensures masking of the fluorophore. Upon activation of the effector proteins disclosed herein, the RNA or DNA oligonucleotide is cleaved thereby severing the proximity between the fluorophore and quencher needed to maintain the contact quenching effect. Accordingly, detection of the fluorophore may be used to determine the presence of a target molecule in a sample.

[1052] In certain other example embodiments, the masking construct may comprise one or more RNA oligonucleotides to which are attached one or more metal nanoparticles, such as gold nanoparticles. In one embodiment, the masking construct comprises a plurality of metal nanoparticles crosslinked by a plurality of RNA or DNA oligonucleotides forming a closed loop. In one embodiment, the masking construct comprises three gold nanoparticles crosslinked by three RNA or DNA oligonucleotides forming a closed loop. In one embodiment, the cleavage of the RNA or DNA oligonucleotides by the Fanzor protein leads to a detectable signal produced by the metal nanoparticles.

[1053] In certain other example embodiments, the masking construct may comprise one or more RNA or DNA oligonucleotides to which are attached one or more quantum dots. In one embodiment, the cleavage of the RNA or DNA oligonucleotides by the Fanzor protein leads to a detectable signal produced by the quantum dots.

[1054] In one example embodiment, the masking construct may comprise a quantum dot. The quantum dot may have multiple linker molecules attached to the surface. At least a portion of the linker molecule comprises RNA or DNA. The linker molecule is attached to the quantum dot at one end and to one or more quenchers along the length or at terminal ends of the linker such that the quenchers are maintained in sufficient proximity for quenching of the quantum dot to occur. The linker may be branched. As above, the quantum dot/quencher pair is not critical, only that selection of the quantum dot/quencher pair ensures masking of the fluorophore. Quantum dots and their cognate quenchers are known in the art and can be selected for this purpose by one having ordinary skill in the art. Upon activation of the effector proteins disclosed herein, the RNA or DNA portion of the linker molecule is cleaved thereby eliminating the proximity between the quantum dot and one or more quenchers needed to maintain the quenching effect. In certain example embodiments the quantum dot is streptavidin conjugated. RNA or DNA are attached via biotin linkers and recruit quenching molecules with the sequences /5Biosg/UCUCGUACGUUC/3IAbRQSp/ (SEQ ID NO: 563) or /5Biosg/UCUCGUACGUUCUCUCGUACGUUC/3IAbRQSp/ (SEQ ID NO: 564) where /5Biosg/ is a biotin tag and /31AbRQSp/ is an Iowa black quencher (Iowa Black FQ). Upon cleavage, by the activated effectors disclosed herein the quantum dot will fluoresce visibly.

[1055] In specific embodiments, the detectable ligand may be a fluorophore and the masking component may be a quencher molecule.

[1056] In a similar fashion, fluorescence energy transfer (FRET) may be used to generate a detectable positive signal. FRET is a non-radiative process by which a photon from an energetically excited fluorophore (i.e., “donor fluorophore”) raises the energy state of an electron in another molecule (i.e. “the acceptor”) to higher vibrational levels of the excited singlet state. The donor fluorophore returns to the ground state without emitting a fluoresce characteristic of that fluorophore. The acceptor can be another fluorophore or non-fluorescent molecule. If the acceptor is a fluorophore, the transferred energy is emitted as fluorescence characteristic of that fluorophore. If the acceptor is a non-fluorescent molecule the absorbed energy is loss as heat. Thus, in the context of the embodiments disclosed herein, the fluorophore/quencher pair is replaced with a donor fluorophore/acceptor pair attached to the oligonucleotide molecule. When intact, the masking construct generates a first signal (negative detectable signal) as detected by the fluorescence or heat emitted from the acceptor. Upon activation of the effector proteins disclosed herein the RNA oligonucleotide is cleaved and FRET is disrupted such that fluorescence of the donor fluorophore is now detected (positive detectable signal).

[1057] In certain example embodiments, the masking construct comprises the use of intercalating dyes which change their absorbance in response to cleavage of long RNAs or DNAs to short nucleotides. Several such dyes exist. For example, pyronine-Y will complex with RNA and form a complex that has an absorbance at 572 nm. Cleavage of the RNA results in loss of absorbance and a color change. Methylene blue may be used in a similar fashion, with changes in absorbance at 688 nm upon RNA cleavage. Accordingly, in certain example embodiments the masking construct comprises a RNA and intercalating dye complex that changes absorbance upon the cleavage of RNA by the effector proteins disclosed herein.

[1058] In certain example embodiments, the masking construct may comprise an initiator for an HCR reaction. See e.g., Dirks and Pierce. PNAS 101, 15275-15728 (2004). HCR reactions utilize the potential energy in two hairpin species. When a single-stranded initiator having a portion of complementary to a corresponding region on one of the hairpins is released into the previously stable mixture, it opens a hairpin of one species. This process, in turn, exposes a single-stranded region that opens a hairpin of the other species. This process, in turn, exposes a single stranded region identical to the original initiator. The resulting chain reaction may lead to the formation of a nicked double helix that grows until the hairpin supply is exhausted. Detection of the resulting products may be done on a gel or colorimetrically. Example colorimetric detection methods include, for example, those disclosed in Lu et al. “Ultra-sensitive colorimetric assay system based on the hybridization chain reaction-triggered enzyme cascade amplification ACS Appl Mater Interfaces, 2017, 9(1):167-175, Wang et al. “An enzyme-free colorimetric assay using hybridization chain reaction amplification and split aptamers” Analyst 2015, 150, 7657-7662, and Song et al. “Non-covalent fluorescent labeling of hairpin DNA probe coupled with hybridization chain reaction for sensitive DNA detection.” Applied Spectroscopy, 70(4): 686-694 (2016).

[1059] In certain example embodiments, the masking construct suppresses generation of a detectable positive signal until cleaved or modified by an activated Fanzor protein. In one embodiment, the masking construct may suppress generation of a detectable positive signal by masking the detectable positive signal or generating a detectable negative signal instead.

### Detection Methods

### Methods for Detecting Nucleic Acids

[1060] The low cost and adaptability of one or more embodiments of an assay platform lends itself to a number of applications including (i) general RNA/DNA quantitation, (ii) rapid, multiplexed RNA/DNA and protein expression detection, and (iii) sensitive detection of target nucleic acids, peptides, and proteins in both clinical and environmental samples. Additionally, the systems disclosed herein may be adapted for detection of transcripts within biological settings, such as cells. Given the highly specific nature of the Fanzor effectors described herein, it may be possible to track allelic specific expression of transcripts or disease-associated mutations in live cells.

[1061] In some embodiments, methods include detecting target nucleic acids in samples, comprising distributing a sample or set of samples into one or more individual discrete volumes comprising a Fanzor system as described herein. The sample or set of samples may then be incubated under conditions sufficient to allow binding of the one or more ωRNAs to one or more target molecules, and the Fanzor protein may be activated via binding of the one or more ωRNA to the one or more target molecules, wherein activating the Fanzor effector protein results in modification of the detection construct such that a detectable positive signal is generated. The one or more detectable positive signals may then be detected, with detection indicating the presence of one or more target molecules in the sample.

[1062] In some embodiments, methods of the invention include detecting polypeptides in samples, comprising distributing a sample or set of samples into a set of individual discrete volumes comprising peptide detection aptamers and a Fanzor as described herein. The sample or set of samples may then be incubated under conditions sufficient to allow binding of the peptide detection aptamers to the one or more target molecules, wherein binding of the aptamer to a corresponding target molecule exposes the RNA polymerase binding site or primer binding site resulting in generation of a trigger RNA. The Fanzor may then be activated via binding of the one or more ωRNAs to the trigger RNA, wherein activating the Fanzor protein results in modification of the detection construct such that a detectable positive signal is produced. The detectable positive signal may then be detected, with detection of the detectable positive signal indicating the presence of one or more target molecules in a sample.

[1063] In certain example embodiments, a single guide sequence specific to a single target is placed in separate volumes. Each volume may then receive a different sample or aliquot of the same sample. In certain example embodiments, multiple ωRNAs each to separate target may be placed in a single well such that multiple targets may be screened in a different well. In order to detect multiple ωRNA in a single volume, in certain example embodiments, multiple Fanzor proteins with different specificities may be used.

[1064] In embodiments, different Fanzor orthologs with different sequence specificities may be used. Cutting motifs may be used to take advantage of the sequence specificities of different orthologs. The detection construct can comprise a cutting motif preferentially cut by a given Fanzor ortholog. A cutting motif sequence can be a particular nucleotide base, a repeat nucleotide base in a homopolymer, or a heteropolymer of bases. The cutting motif can be a dinucleotide sequence, a trinucleotide sequence or more complex motifs comprising 4, 5, 6, 7, 8, 9, or 10 nucleotide motifs. For example, one orthologue may preferentially cut A, while others preferentially cut C, G, U/T. Accordingly, detection constructs completely comprising, or comprised of a substantial portion, of a single nucleotide may be generated, each with a different fluorophore that can be detected at differing wavelengths. In this way up to four different targets may be screened in a single individual discrete volume. In certain other example embodiments, different orthologues with different nucleotide editing preferences may be used such as Fanzor s in combination with a Cas13 or Cas12.

[1065] In addition to single base editing preferences, additional detection constructs can be designed based on other motif cutting preferences of Fanzor, Cas12, and Cas13 orthologs. For example, Cas13 or Cas12 orthologs may preferentially cut a dinucleotide sequence, a trinucleotide sequence or more complex motifs comprising 4, 5, 6, 7, 8, 9, or 10 nucleotide motifs. As an example, LwaCas13a showed strong preference for a hexanucleotide motif sequences, with CcaCas13b showing strong preference for other hexanucleotide motifs. Thus, the upper bound for multiplex assays using the embodiments disclosed herein is primarily limited by the number of distinguishable detectable labels and the detection channels needed to detect them. In certain example embodiments, 2, 3, 4, 5, 6, 7, 8, 9, 10, 11, 12, 13, 14, 15, 16, 17, 18, 19, 20, 21, 22, 23, 24, 25, 26, 27, 28, 29, or 30 different targets are detected. Example methods for identifying such motifs are further disclosed in the Working Examples below.

[1066] In specific embodiments, the target molecule may be a target DNA and the method may further comprise binding the target DNA with a primer comprising an RNA polymerase site, as described herein.

[1067] In specific embodiments, the one or more ωRNA may be designed to detect a single nucleotide polymorphism in a target RNA or DNA, or a splice variant of an RNA transcript.

[1068] In some embodiments, the one or more co RNAs may be designed to bind to cell free nucleic acids. In some embodiments, the one or more ωRNAs may be designed to detect a single nucleotide polymorphism in a target RNA or DNA, or a splice variant of an RNA transcript. In some embodiments, the one or more guide RNAs are designed to bind to one or more target molecules that are diagnostic for a disease state, as described herein.

[1069] In some embodiments, the disease state may be an infection, an organ disease, a blood disease, an immune system disease, a cancer, a brain and nervous system disease, an endocrine disease, a pregnancy or childbirth-related disease, an inherited disease, or an environmentally-acquired disease.

[1070] In certain example embodiments, the systems, devices, and methods, disclosed herein are directed to detecting the presence of one or more microbial agents in a sample, such as a biological sample obtained from a subject. In certain example embodiments, the microbe may be a bacterium, a fungus, a yeast, a protozoa, a parasite, or a virus. Accordingly, the methods disclosed herein can be adapted for use in other methods (or in combination) with other methods that require quick identification of microbe species, monitoring the presence of microbial proteins (antigens), antibodies, antibody genes, detection of certain phenotypes (e.g., bacterial resistance), monitoring of disease progression and/or outbreak, and antibiotic screening. Because of the rapid and sensitive diagnostic capabilities of the embodiments disclosed here, detection of microbe species type, down to a single nucleotide difference, and the ability to be deployed as a POC device, the embodiments disclosed herein may be used guide therapeutic regimens, such as selection of the appropriate antibiotic or antiviral. The embodiments disclosed herein may also be used to screen environmental samples (air, water, surfaces, food etc.) for the presence of microbial contamination.

[1071] Disclosed is a method to identify microbial species, such as bacterial, viral, fungal, yeast, or parasitic species, or the like. Particular embodiments disclosed herein describe methods and systems that will identify and distinguish microbial species within a single sample, or across multiple samples, allowing for recognition of many different microbes. The present methods allow the detection of pathogens and distinguishing between two or more species of one or more organisms, e.g., bacteria, viruses, yeast, protozoa, and fungi or a combination thereof, in a biological or environmental sample, by detecting the presence of a target nucleic acid sequence in the sample. A positive signal obtained from the sample indicates the presence of the microbe. Multiple microbes can be identified simultaneously using the methods and systems of the invention, by employing the use of more than one effector protein, wherein each effector protein targets a specific microbial target sequence. In this way, a multi-level analysis can be performed for a particular subject in which any number of microbes can be detected at once. In some embodiments, simultaneous detection of multiple microbes may be performed using a set of probes that can identify one or more microbial species.

[1072] Multiplex analysis of samples enables large-scale detection of samples, reducing the time and cost of analyses. However, multiplex analyses are often limited by the availability of a biological sample. In accordance with the invention, however, alternatives to multiplex analysis may be performed such that multiple effector proteins can be added to a single sample and each masking construct may be combined with a separate quencher dye. In this case, positive signals may be obtained from each quencher dye separately for multiple detection in a single sample.

[1073] Disclosed herein are methods for distinguishing between two or more species of one or more organisms in a sample. The methods are also amenable to detecting one or more species of one or more organisms in a sample.

[1074] In some embodiments, the methods provide for detection of disease states that are characterized by the presence or absence of an antibiotic or drug resistance or susceptibility gene or transcript or polypeptide, preferably in a pathogen or a cell.

### Incubating

[1075] Methods of detection, amplification and/or extraction using the systems disclosed herein can comprise incubating the sample or set of samples under conditions sufficient to allow binding of the nucleic acid component molecules to one or more target molecules. Exstraction can comprise incubating the sample under conditions sufficient to allow release of viral RNA present in the sample, which may comprise incubating at 22° C. to 60° C. for 30 to 70 minutes or at 90° C.-100° C. for about 10 minutes.

[1076] In certain example embodiments, the incubation time of the amplifying and detecting in the present invention may be shortened. The assay may be performed in a period of time required for an enzymatic reaction to occur. One skilled in the art can perform biochemical reactions in 5 minutes (e.g., 5 minute ligation). Incubating may occur at one or more temperatures over timeframes between about 10 minutes and 90 minutes, preferably less than 90 minutes, 75 minutes, 60 minutes, 45 minutes, 30 minutes, 25 minutes, 20 minutes, 15 minutes, or 10 minutes depending on sample, reagents and components of the system. In one embodiment, incubating for the amplification is performed at one or more temperatures between about 20° C. and 80° C., In one embodiment, about 37° C. In one embodiment, incubating for the amplification is performed at one or more temperatures between about 55° C. and 65° C., between about 59° C. and 61° C., In one embodiment, about 60° C.

### Activating

[1077] In certain example embodiment, activating of the Fanzor protein occurs via binding of the Fanzor complex via the nucleic acid component molecule to the one or more target molecules, wherein activating the Fanzor protein results in modification of the detection construct such that a detectable signal is generated.

### Detecting a Signal

[1078] Detecting may comprise visual observance of a positive signal relative to a control. Detecting may comprise a loss of signal or presence of signal at one or more capture regions, for example colorimetric detection, or fluorescent detection. In certain example embodiments, further modifications may be introduced that further amplify the detectable positive signal. For example, activated Fanzor protein collateral activation may be used to generate a secondary target or additional nucleic acid component molecule sequence, or both. In one example embodiment, the reaction solution would contain a secondary target that is spiked in at high concentration. The secondary target may be distinct from the primary target (i.e., the target for which the assay is designed to detect) and in certain instances may be common across all reaction volumes. A secondary nucleic acid component molecule sequence for the secondary target may be protected, e.g., by a secondary structural feature such as a hairpin with an RNA loop, and unable to bind the second target or the Fanzor protein. Cleavage of the protecting group by an activated Fanzor r protein (i.e., after activation by formation of complex with the primary target(s) in solution) and formation of a complex with free Fanzor protein in solution and activation from the spiked in secondary target. In certain other example embodiments, a similar concept is used with free nucleic acid component molecule sequence to a secondary target and protected secondary target. Cleavage of a protecting group off the secondary target would allow additional Fanzor protein, nucleic acid component sequence, secondary target sequence to form. In yet another example embodiment, activation of Fanzor protein by the primary target(s) may be used to cleave a protected or circularized primer, which would then be released to perform an isothermal amplification reaction, such as those disclosed herein, on a template for either secondary nucleic acid component sequence, secondary target, or both. Subsequent transcription of this amplified template would produce more secondary nucleic acid component molecule sequence and/or secondary target sequence, followed by additional Fanzor protein collateral activation.

### Quantifying

[1079] In particular methods, comparing the intensity of the one or more signals to a control is performed to quantify the nucleic acid in the sample. The term “control” refers to any reference standard suitable to provide a comparison to the expression products in the test sample. In one embodiment, the control comprises obtaining a “control sample” from which expression product levels are detected and compared to the expression product levels from the test sample. Such a control sample may comprise any suitable sample, including but not limited to a sample from a control patient (can be stored sample or previous sample measurement) with a known outcome; normal tissue, fluid, or cells isolated from a subject, such as a normal patient or the patient having a condition of interest.

[1080] The intensity of a signal is “significantly” higher or lower than the normal intensity if the signal is greater or less, respectively, than the normal or control level by an amount greater than the standard error of the assay employed to assess amount, and preferably at least 20%, 30%, 40%, 50%, 60%, 70%, 80%, 90%, 100%, 150%, 200%, 300%, 350%, 400%, 500%, 600%, 700%, 800%, 900%, 1000% or than that amount. Alternatively, the signal can be considered “significantly” higher or lower than the normal and/or control signal if the amount is at least about two, and preferably at least about 5%, 10%, 15%, 20%, 25%, 30%, 35%, 40%, 45%, 50%, 55%, 60%, 65%, 70%, 75%, 80%, 85%, 90%, 95%, 100%, 105%, 110%, 115%, 120%, 125%, 130%, 135%, 140%, 145%, 150%, 155%, 160%, 165%, 170%, 175%, 180%, 185%, 190%, 195%, two times, three times, four times, five times, or more, or any range in between, such as 5%-100%, higher or lower, respectively, than the normal and/or control signal. Such significant modulation values can be applied to any metric described herein, such as altered level of expression, altered activity, changes in biomarker inhibition, changes in test agent binding, and the like.

[1081] In one embodiment, the detectable positive signal may be a loss of fluorescent signal or colorimetric relative to a control, as described herein. In one embodiment, the detectable positive signal may be detected on a lateral flow device, as described herein.

### Methods for Detecting and or Quantifying Target Nucleic Acids Using a Lateral Flow Device

[1082] In one embodiment, the invention provides methods for detecting target nucleic acids in a sample. Such methods may comprise contacting a sample with the first end of a lateral flow device as described elsewhere herein. The first end of the lateral flow device may comprise a sample loading portion, wherein the sample flows from the sample loading portion of the substrate towards the first and second capture regions and generates a detectable signal.

[1083] A positive detectable signal may be any signal that can be detected using optical, fluorescent, chemiluminescent, electrochemical or other detection methods known in the art, as described elsewhere herein.

[1084] In one embodiment, the lateral flow device may be capable of detecting two different target nucleic acid sequences. In one embodiment, this detection of two different target nucleic acid sequences may occur simultaneously.

[1085] In one embodiment, the absence of target nucleic acid sequences in a sample elicits a detectable fluorescent signal at each capture region. In such instances, the absence of any target nucleic acid sequences in a sample may cause a detectable signal to appear at the first and second capture regions.

[1086] In one embodiment, the lateral flow device as described herein is capable of detecting three different target nucleic acid sequences. In specific embodiments, when the target nucleic acid sequences are absent from the sample, a fluorescent signal may be generated at each of the three capture regions. In such exemplary embodiments, a fluorescent signal may be absent at the capture region for the corresponding target nucleic acid sequence when the sample contains one or more target nucleic acid sequences.

[1087] Samples to be screened are loaded at the sample loading portion of the lateral flow substrate. The samples must be liquid samples or samples dissolved in an appropriate solvent, usually aqueous. The liquid sample reconstitutes the system reagents such that a detection reaction can occur. Intact reporter construct is bound at the first capture region by binding between the first binding agent and the first molecule. Likewise, the detection agent will begin to collect at the first binding region by binding to the second molecule on the intact reporter construct. If target molecule(s) are present in the sample, the Fanzor protein collateral effect is activated. As activated Fanzor protein comes into contact with the bound reporter construct, the reporter constructs are cleaved, releasing the second molecule to flow further down the lateral flow substrate towards the second binding region. The released second molecule is then captured at the second capture region by binding to the second binding agent, where additional detection agent may also accumulate by binding to the second molecule. Accordingly, if the target molecule(s) is not present in the sample, a detectable signal will appear at the first capture region, and if the target molecule(s) is present in the sample, a detectable signal will appear at the location of the second capture region.

[1088] In one embodiment, the invention provides a method for quantifying target nucleic acids in samples comprising distributing a sample or set of samples into one or more individual discrete volumes comprising two or more Fanzor systems as described herein. The method may comprise using HDA to amplify one or more target molecules in the sample or set of samples, as described herein. The method may further comprise incubating the sample or set of samples under conditions sufficient to allow binding of the nucleic acid component molecules to one or more target molecules. The method may further comprise activating the Fanzor protein via binding of the nucleic acid component molecules to the one or more target molecules. Activating the Fanzor protein may result in modification of the detection construct such that a detectable positive signal is generated. The method may further comprise detecting the one or more detectable positive signals, wherein detection indicates the presence of one or more target molecules in the sample. The method may further comprise comparing the intensity of the one or more signals to a control to quantify the nucleic acid in the sample. The steps of amplifying, incubating, activating, and detecting may all be performed in the same individual discrete volume.

[1089] An “individual discrete volume” is a discrete volume or discrete space, such as a container, receptacle, or other defined volume or space that can be defined by properties that prevent and/or inhibit migration of nucleic acids and reagents necessary to carry out the methods disclosed herein, for example a volume or space defined by physical properties such as walls, for example the walls of a well, tube, or a surface of a droplet, which may be impermeable or semipermeable, or as defined by other means such as chemical, diffusion rate limited, electro-magnetic, or light illumination, or any combination thereof. By “diffusion rate limited” (for example diffusion defined volumes) is meant spaces that are only accessible to certain molecules or reactions because diffusion constraints effectively defining a space or volume as would be the case for two parallel laminar streams where diffusion will limit the migration of a target molecule from one stream to the other. By “chemical” defined volume or space is meant spaces where only certain target molecules can exist because of their chemical or molecular properties, such as size, where for example gel beads may exclude certain species from entering the beads but not others, such as by surface charge, matrix size or other physical property of the bead that can allow selection of species that may enter the interior of the bead. By “electro-magnetically” defined volume or space is meant spaces where the electro-magnetic properties of the target molecules or their supports such as charge or magnetic properties can be used to define certain regions in a space such as capturing magnetic particles within a magnetic field or directly on magnets. By “optically” defined volume is meant any region of space that may be defined by illuminating it with visible, ultraviolet, infrared, or other wavelengths of light such that only target molecules within the defined space or volume may be labeled. One advantage to the use of non-walled, or semipermeable is that some reagents, such as buffers, chemical activators, or other agents may be passed in through the discrete volume, while other material, such as target molecules, maybe maintained in the discrete volume or space. Typically, a discrete volume will include a fluid medium, (for example, an aqueous solution, an oil, a buffer, and/or a media capable of supporting cell growth) suitable for labeling of the target molecule with the indexable nucleic acid identifier under conditions that permit labeling. Exemplary discrete volumes or spaces useful in the disclosed methods include droplets (for example, microfluidic droplets and/or emulsion droplets), hydrogel beads or other polymer structures (for example poly-ethylene glycol di-acrylate beads or agarose beads), tissue slides (for example, fixed formalin paraffin embedded tissue slides with particular regions, volumes, or spaces defined by chemical, optical, or physical means), microscope slides with regions defined by depositing reagents in ordered arrays or random patterns, tubes (such as, centrifuge tubes, microcentrifuge tubes, test tubes, cuvettes, conical tubes, and the like), bottles (such as glass bottles, plastic bottles, ceramic bottles, Erlenmeyer flasks, scintillation vials and the like), wells (such as wells in a plate), plates, pipettes, or pipette tips among others. In certain example embodiments, the individual discrete volumes are the wells of a microplate. In certain example embodiments, the microplate is a 96 well, a 384 well, or a 1536 well microplate.

[1090] Incubating the sample at either the amplification step or the extraction steps as described herein can be performed using heat sources known in the art. Advantageously, the heat source can be readily commercially available heating sources that do not require complicated instrumentation. Exemplary heating systems can include heating blocks, incubators, and/or water baths with temperatures maintained by commercially available sous-vide cookers. In this way, sample diagnostics can be performed without the requirement of expensive and proprietary equipment found primarily in diagnostic laboratory and hospital settings.

[1091] In certain example embodiments, paper-based microfluidics may be used for transfer of samples or reagents. For example, paper strips having wax barrier printed at a defined distance from the end of a paper dipstick may be used to define a volume of reagent or sample to be transferred. For example, a wax barrier may be printed across a paper dipstick to define a microliter volume such that when the dipstick is transferred into a volume of a reagent or sample only a microliter of said reagent or sample is absorbed onto the dipstick. The dipstick may be place in a second reagent mix, where the reagent or sample will diffuse into the reaction mixture. Such components allow for preparation and use of the assay without specialized equipment such as pipettors.

[1092] Optical means may be used to assess the presence and level of a given target molecule. In one embodiment, an optical sensor detects unmasking of a fluorescent masking agent. In one embodiment, the device of the present invention may include handheld portable devices for diagnostic reading of an assay (see e.g., Vashist et al., Commercial Smartphone-Based Devices and Smart Applications for Personalized Healthcare Monitoring and Management, Diagnostics 2014, 4(3), 104-128; mReader from Mobile Assay; and Holomic Rapid Diagnostic Test Reader).

[1093] As noted herein, certain embodiments allow detection via colorimetric change which has certain attendant benefits when embodiments are utilized in POC situations and or in resource poor environments where access to more complex detection equipment to readout the signal may be limited. However, portable embodiments disclosed herein may also be coupled with hand-held spectrophotometers that enable detection of signals outside the visible range. An example of a hand-held spectrophotometer device that may be used in combination with the present invention is described in Das et al. “Ultra-portable, wireless smartphone spectrophotometer for rapid, non-destructive testing of fruit ripeness.” Nature Scientific Reports. 2016, 6:32504, DOI: 10.1038/srep32504. Finally, in one embodiment utilizing quantum dot-based masking constructs, use of a hand-held UV light, or other suitable device, may be successfully used to detect a signal owing to the near complete quantum yield provided by quantum dots.

### Amplification Methods and Reagents

[1094] In certain example embodiments, target RNAs and/or DNAs may be amplified prior to activating the Fanzor polypeptide or a CRISPR effector protein in a detection method. Any suitable amplification DNA or RNA method or technique can be used for amplification. Exemplary methods are described herein and others suitable for use with the present systems and methods of the present invention described herein will be appreciated in view of the description herein.

[1095] In certain example embodiments, the RNA or DNA amplification is an isothermal amplification. In certain example embodiments, the isothermal amplification may be nucleic-acid sequenced-based amplification (NASBA), recombinase polymerase amplification (RPA), loop-mediated isothermal amplification (LAMP), strand displacement amplification (SDA), helicase-dependent amplification (HDA), or nicking enzyme amplification reaction (NEAR). In certain example embodiments, non-isothermal amplification methods may be used which include, but are not limited to, PCR, multiple displacement amplification (MDA), rolling circle amplification (RCA), ligase chain reaction (LCR), or ramification amplification method (RAM).

[1096] In certain other example embodiments, a recombinase polymerase amplification (RPA) reaction may be used to amplify the target nucleic acids. RPA reactions employ recombinases which are capable of pairing sequence-specific primers with homologous sequence in duplex DNA. If target DNA is present, DNA amplification is initiated and no other sample manipulation such as thermal cycling or chemical melting is required. The entire RPA amplification system is stable as a dried formulation and can be transported safely without refrigeration. RPA reactions may also be carried out at isothermal temperatures with an optimum reaction temperature of 37-42 degrees C. The sequence specific primers are designed to amplify a sequence comprising the target nucleic acid sequence to be detected. In certain example embodiments, a RNA polymerase promoter, such as a T7 promoter, is added to one of the primers. This results in an amplified double-stranded DNA product comprising the target sequence and a RNA polymerase promoter. After, or during, the RPA reaction, an RNA polymerase is added that will produce RNA from the double-stranded DNA templates. The amplified target RNA can then in turn be detected by the CRISPR effector system. In this way target DNA can be detected using the embodiments disclosed herein. RPA reactions can also be used to amplify target RNA. The target RNA is first converted to cDNA using a reverse transcriptase, followed by second strand DNA synthesis, at which point the RPA reaction proceeds as outlined above.

[1097] In certain embodiments, the amplifying step may take less than about 1 hour, 50 minutes, 40 minutes, 30 minutes, 25 minutes, 20 minutes or 15 minutes, which may depend on the sample, starting concentrations and nature of amplification used.

[1098] In an aspect, the isothermal amplification reagents and isothermal amplification may be utilized and performed with a thermostable Fanzor protein. The combination of thermostable protein and isothermal amplification reagents may be utilized to further improve reaction times for detection and diagnostics.

[1099] In one embodiment, the amplifying of the target molecules and the detection of the target molecules can be performed in a single reaction, for example, a ‘one-pot’ method. General guidance for use of a single-pot approach can be as described in Gootenberg, et al., Science 2018 Apr. 27: 360(6387) 439-444 (using Cas13, Cas12a and Csm6 generally, detecting multiple targets in a single reaction, and specifically performing DNA extraction in a sample and using as input for direct detection at Figure S33); and Ding et al., “All-in-One Dual CRISPR-Cas12a (AIOD-CRISPR) Assay: A Case for Rapid, Ultrasensitive and Visual Detection of Novel Coronavirus SARS-CoV-2 and HIV Virus,” doi:10.1101/2020.03.19.998724, biorxiv preprint (utilizing a pair of crRNAs with dual CRISPR-Cas12a detection for a one-pot approach to target-specific nucleic acid detection).

[1100] Amplification of target molecules can be optimized by methods as detailed herein. In an aspect, the design optimizes the primers used in the amplification. In particular aspects, the isothermal amplification is used with Fanzor systems. In either approach, design considerations can follow a rational design for optimization of the reactions. Optimization of the methods as disclosed herein can include first screening primers to identify one or more sets of primers that work well for a particular target, Fanzor protein and/or reaction. Once the primers have been screened, titration of magnesium concentration can be performed to identify an optimal magnesium concentration for higher signal to noise readout. In an example, varying additives with specific primers, target, Fanzor protein, temperature, and other additive concentrations within the reaction can be identified. Optimization can be made with the goal of reducing the number of steps and buffer exchanges that have to occur in the reaction, simplifying the reaction and reducing the risks of contamination at transfer steps. Similarly, optimizing the salt levels as well as the type of salt utilized can further facilitate and optimize the one-pot detections disclosed herein.

[1101] Accordingly, in certain example embodiments the systems disclosed herein may include amplification reagents. Different components or reagents useful for amplification of nucleic acids are described herein. For example, an amplification reagent as described herein may include a buffer, such as a Tris buffer. A Tris buffer may be used at any concentration appropriate for the desired application or use, for example including, but not limited to, a concentration of 1 mM, 2 mM, 3 mM, 4 mM, 5 mM, 6 mM, 7 mM, 8 mM, 9 mM, 10 mM, 11 mM, 12 mM, 13 mM, 14 mM, 15 mM, 25 mM, 50 mM, 75 mM, 1 M, or the like. One of skill in the art will be able to determine an appropriate concentration of a buffer such as Tris for use with the present invention.

[1102] Other components of a biological or chemical reaction may include a cell lysis component in order to break open or lyse a cell for analysis of the materials therein. A cell lysis component may include, but is not limited to, a detergent, a salt as described above, such as NaCl, KCl, ammonium sulfate [(NH₄)₂SO₄], or others. Detergents that may be appropriate for the invention may include Triton X-100, sodium dodecyl sulfate (SDS), CHAPS (3-[(3-cholamidopropyl)dimethylammonio]-1-propanesulfonate), ethyl trimethyl ammonium bromide, nonyl phenoxypolyethoxylethanol (NP-40). Concentrations of detergents may depend on the particular application, and may be specific to the reaction in some cases. Amplification reactions may include dNTPs and nucleic acid primers used at any concentration appropriate for the invention, such as including, but not limited to, a concentration of 100 nM, 150 nM, 200 nM, 250 nM, 300 nM, 350 nM, 400 nM, 450 nM, 500 nM, 550 nM, 600 nM, 650 nM, 700 nM, 750 nM, 800 nM, 850 nM, 900 nM, 950 nM, 1 mM, 2 mM, 3 mM, 4 mM, 5 mM, 6 mM, 7 mM, 8 mM, 9 mM, 10 mM, 20 mM, 30 mM, 40 mM, 50 mM, 60 mM, 70 mM, 80 mM, 90 mM, 100 mM, 150 mM, 200 mM, 250 mM, 300 mM, 350 mM, 400 mM, 450 mM, 500 mM, or the like. Likewise, a polymerase useful in accordance with the invention may be any specific or general polymerase known in the art and useful or the invention, including Taq polymerase, Q5 polymerase, or the like.

[1103] A salt, such as magnesium chloride (MgCl₂), potassium chloride (KCl), or sodium chloride (NaCl), may be included in an amplification reaction, such as PCR, in order to improve the amplification of nucleic acid fragments. Although the salt concentration will depend on the particular reaction and application, in one embodiment, nucleic acid fragments of a particular size may produce optimum results at particular salt concentrations. Larger products may require altered salt concentrations, typically lower salt, in order to produce desired results, while amplification of smaller products may produce better results at higher salt concentrations. One of skill in the art will understand that the presence and/or concentration of a salt, along with alteration of salt concentrations, may alter the stringency of a biological or chemical reaction, and therefore any salt may be used that provides the appropriate conditions for a reaction of the present invention and as described herein. In certain preferred embodiments, when polynucleotide extraction beads such as magnetic beads are utilized, a Plant QuickExtract solution can be used in combination with a KCl buffer in optimized detection methods according to the present disclosure.

[1104] In some embodiments, amplification reagents as described herein may be appropriate for use in hot-start amplification. Hot start amplification may be beneficial in some embodiments to reduce or eliminate dimerization of adaptor molecules or oligos, or to otherwise prevent unwanted amplification products or artifacts and obtain optimum amplification of the desired product. Many components described herein for use in amplification may also be used in hot-start amplification. In some embodiments, reagents or components appropriate for use with hot-start amplification may be used in place of one or more of the composition components as appropriate. For example, a polymerase or other reagent may be used that exhibits a desired activity at a particular temperature or other reaction condition. In some embodiments, reagents may be used that are designed or optimized for use in hot-start amplification, for example, a polymerase may be activated after transposition or after reaching a particular temperature. Such polymerases may be antibody-based or aptamer-based. Polymerases as described herein are known in the art. Examples of such reagents may include, but are not limited to, hot-start polymerases, hot-start dNTPs, and photo-caged dNTPs. Such reagents are known and available in the art. One of skill in the art will be able to determine the optimum temperatures as appropriate for individual reagents.

[1105] Amplification of nucleic acids may be performed using specific thermal cycle machinery or equipment and may be performed in single reactions or in bulk, such that any desired number of reactions may be performed simultaneously. In some embodiments, amplification may be performed using microfluidic or robotic devices, or may be performed using manual alteration in temperatures to achieve the desired amplification. In some embodiments, optimization may be performed to obtain the optimum reactions conditions for the particular application or materials. One of skill in the art will understand and be able to optimize reaction conditions to obtain sufficient amplification.

[1106] In certain embodiments, detection of DNA with the methods or systems of the invention requires transcription of the (amplified) DNA into RNA prior to detection.

[1107] It will be evident that detection methods of the invention can involve nucleic acid amplification and detection procedures in various combinations. The nucleic acid to be detected can be any naturally occurring or synthetic nucleic acid, including but not limited to DNA and RNA, which may be amplified by any suitable method to provide an intermediate product that can be detected. Detection of the intermediate product can be by any suitable method including but not limited to binding and activation of a Fanzor or CRISPR protein which produces a detectable signal moiety by direct or collateral activity.

### Loop Mediated Isothermal Amplification (LAMP)

[1108] In certain example embodiments, a loop-mediated isothermal amplification (LAMP) reaction may be used to target nucleic acids, which encompasses both LAMP and RT-LAMP reactions. LAMP can be performed with a four-primer system for isothermal nucleic acid amplification in conjunction with a polymerase. Notomi et al., Nucleic Acids Res. 2000, 28, 12, Nagamine et al., Molecular and Cellular Probes (2002) 16, 223-229, doi: 10.1006/mcpr.2002.0415. When performing LAMP with a 4-primer system, two loop-forming inner primers, denoted as FIP and BIP, are provided with two outer primers, F3 and B3. The inner primers each contain two distinct sequences, one for priming in the first stage of the amplification and the other sequence for self-priming in subsequent amplification states. The two outer primers initiate strand displacement of nucleic acid strands initiated from the FIP and BIP primers, thereby generating formation of loops and strand displacement nucleic acid synthesis utilizing the provided polymerase. LAMP can be conducted with two to six primers, ranging from only the two loop-forming primers, up to at least the addition of 2 additional primers, LF and LB along with the two outer primers and two inner primers. LAMP technologies advantageously have high specificity and can work at a variety of pH and temperature. In a preferred aspect, the LAMP is an isothermal reaction at between about 45° C. to 750 C, 55 to 70° C. or 60° C. to 65° C. Colorimetric LAMP (Y. Zhang et al., doi:10.1101/2020.92.26.20028373), RT-LAMP (Lamb et al., doi: 10.1101/2020.02.19.20025155; and Yang et al., doi:10.1101/2020.03.02.20030130) have been developed for detection of COVID-19 and are incorporated herein by reference in their entirety.

[1109] In one embodiment, the LAMP reagents may include Bst 2.0+RTx or Bst 3.0 from New England Biolabs. In one embodiment, the LAMP reagents may comprise colorimetric or fluorescent detection. Detection of LAMP products can be accomplished using colorimetric tools, such as hydroxy napthol blue (see, e.g., Goto, M., et al., Colorimetric detection of loop-mediated isothermal amplification reaction by using hydroxy naphthol blue. Biotechniques, 2009. 46(3): p. 167-72.) leuco triphenylmethane dyes (see, e.g., Miyamoto, S., et al., Method for colorimetric detection of double-stranded nucleic acid using leuco triphenylmethane dyes. Anal Biochem, 2015. 473: p. 28-33) and pH-snesitive dyes (see, e.g., Tanner, N. A., Y. Zhang, and T. C. Evans, Jr., Visual detection of isothermal nucleic acid amplification using pH-sensitive dyes. Biotechniques, 2015. 58(2): p. 59-68); as well as fluorescent detection (see, e.g., Yu et al., Clinical Chemistry, hvaa102, doi:10.1093/clinchem/hvaa102 12 May 2020), including use of quenching probes (see, e.g., Shirato et al., J Virol Methods. 2018 August; 258:41-48. doi: 10.1016/j.jviromet.2018.05.006).

[1110] In an aspect, the primer sets for LAMP are designed to amplify one or more target sequences, generating amplicons that comprise the one or more target sequences. Optionally, the primers can comprise barcodes that can be designed as described elsewhere herein. Incubating to a temperature sufficient for LAMP amplification, e.g., 50° C.-72° C., more preferably 55° C. to 65° C., using a polymerase and, optionally a reverse transcriptase (in the event RT-LAMP is utilized). Preferably the enzymes utilized in the LAMP reaction are heat-stabilized. LAMP primer sites have been designed, see, e.g., Park et al., “Development of Reverse Transcription Loop-Mediated Isothermal Amplification Assays Targeting SARS-CoV-2” J. of Mol. Diag. (2020). Optionally, a control template is further provided with the sample, which may differ from the target sequence but share primer binding sites. In an exemplary embodiment, visual read out of the detection results can be accomplished using commercially-available lateral flow substrate, e.g., a commercially available paper substrate.

[1111] In certain example embodiments, the LAMP amplification reagents may include primers specific to SARS-COV2 or other pathogens or pathogenic mutations. LAMP reagents may further comprise colorimetric and/or fluorescent detection reagents, such as hydroxy napthol blue (see, e.g., Goto, M., et al., Colorimetric detection of loop-mediated isothermal amplification reaction by using hydroxy naphthol blue. Biotechniques, 2009. 46(3): p. 167-72.) leuco triphenylmethane dyes (see, e.g., Miyamoto, S., et al., Method for colorimetric detection of double-stranded nucleic acid using leuco triphenylmethane dyes. Anal Biochem, 2015. 473: p. 28-33) and pH-snesitive dyes (see, e.g., Tanner, N. A., Y. Zhang, and T. C. Evans, Jr., Visual detection of isothermal nucleic acid amplification using pH-sensitive dyes. Biotechniques, 2015. 58(2): p. 59-68); as well as fluorescent detection (see, e.g., Yu et al., Clinical Chemistry, hvaa102, doi:10.1093/clinchem/hvaa102 12 May 2020), including use of quenching probes (see, e.g., Shirato et al., J Virol Methods. 2018 August; 258:41-48. doi: 10.1016/j.jviromet.2018.05.006). An overview of LAMP methods, including OSD-LAMP, for sequence-specific detection is described in Becherer et al., Anal. Methods, 2020, 12, 717-746, doi: 10.1039/C9AY02246E, incorporated herein by reference.

[1112] In embodiments, the LAMP amplification reagents can comprise oligonucleotide strand displacement (OSD) probes. As used herein, oligonucleotide strand displacement probes are also referred to herein as oligonucleotide strand exchange probes or one-step strand displacement probes. The general concept of the use of OSD exchange is depicted in FIG. 1 of Bhadra et al., High-surety isothermal amplification and detection of SARS-CoV-2, including with crude enzymes, doi:10.1101/2020.04.13.039941. OSD probes rely on the binding enthalpy between the target-binding probe and amplicon of the LAMP reaction yielding a strand exchange reaction, leading to an easily read change in fluorescent signal. As a result, the results of a LAMP reaction can be visually or optically read fluorogenic OSD probes.

[1113] In an aspect, the OSD probes comprise a sequence specific for a target molecule. The OSD probes may comprise a pre-hybridized nucleic acid sequence, strand wherein the target sequence is 5, 6, 7, 8, 9, 10, 11, 12 or 13 nucleotides longer than the strand to which it is hybridized, allowing for sequence-specific interaction with a complementary target, with the OSD undergoing strand exchange and yielding a change in fluorescent signal.

[1114] In an aspect, the OSD probes are provided at a concentration of about 50 nM to 200 nM, about 75 nM to 150 nM, less than or equal to 200 nM, 190 nM, 180 nM, 170 nM, 160 nM, 150 nM, 140 nM, 130 nM, 120 nM, 110 nM, 100 nM, 90 nM, 80 nM, 75 nM, 65 nM, or 50 nM. Probes can be designed to be complementary to the loop region between the F1c and F2 primer binding sites for the LAMP primers, this can be referred to as the long toehold region. The complementary portion can be between about 9 and 14 nucleotides long, more preferably 11-12 nucleotides long. In an aspect, the longer strand of the OSD is labeled with a fluorescent molecule at the 5′ or 3′ end of the strand. In an aspect, the label is provided on the end opposite the designed complementary target region (long toehold region). The short strand is prepared with a quencher on one end of the probe and can be designed to comprise a region complementary to a portion of the long strand. The OSD probes can be provided as part of LAMP reagents as described herein, which may comprise their use on any of the devices, cartridges or in any of the compositions as provided herein, including being provided as a lyophilized reagent in some instances.

### NASBA

[1115] In certain example embodiments, the RNA or DNA amplification is NASBA, which is initiated with reverse transcription of target RNA by a sequence-specific reverse primer to create a RNA/DNA duplex. RNase H is then used to degrade the RNA template, allowing a forward primer containing a promoter, such as the T7 promoter, to bind and initiate elongation of the complementary strand, generating a double-stranded DNA product. The RNA polymerase promoter-mediated transcription of the DNA template then creates copies of the target RNA sequence. Importantly, each of the new target RNAs can be detected by the nucleic acid component molecules thus further enhancing the sensitivity of the assay. Binding of the target RNAs by the nucleic acid component molecules then leads to activation of the Fanzor protein and the methods proceed as outlined above. The NASBA reaction has the additional advantage of being able to proceed under moderate isothermal conditions, for example at approximately 41° C., making it suitable for systems and devices deployed for early and direct detection in the field and far from clinical laboratories.

### RPA

[1116] In certain other example embodiments, a recombinase polymerase amplification (RPA) reaction may be used to amplify the target nucleic acids. RPA reactions employ recombinases which are capable of pairing sequence-specific primers with homologous sequence in duplex DNA. If target DNA is present, DNA amplification is initiated and no other sample manipulation such as thermal cycling or chemical melting is required. The entire RPA amplification system is stable as a dried formulation and can be transported safely without refrigeration. RPA reactions may also be carried out at isothermal temperatures with an optimum reaction temperature of 37-42 degrees C. The sequence specific primers are designed to amplify a sequence comprising the target nucleic acid sequence to be detected. In certain example embodiments, a RNA polymerase promoter, such as a T7 promoter, is added to one of the primers. This results in an amplified double-stranded DNA product comprising the target sequence and a RNA polymerase promoter. After, or during, the RPA reaction, a RNA polymerase is added that will produce RNA from the double-stranded DNA templates. The amplified target RNA can then in turn be detected by the Fanzor system. In this way target DNA can be detected using the embodiments disclosed herein. RPA reactions can also be used to amplify target RNA. The target RNA is first converted to cDNA using a reverse transcriptase, followed by second strand DNA synthesis, at which point the RPA reaction proceeds as outlined elsewhere herein.

### Transposase Based Amplification

[1117] Embodiments disclosed herein provide systems and methods for isothermal amplification of target nucleic acid sequences by contacting oligonucleotides containing the target nucleic acid sequence with a transposon complex. The oligonucleotides may be single stranded or double stranded RNA, DNA, or RNA/DNA hybrid oligonucleotides. The transposon complex comprises a transposase and a transposon sequence comprising one or more RNA polymerase promoters. The transposase facilitates insertion of the one or more RNA polymerase promoters into the oligonucleotide. An RNA polymerase promoter can then transcribe the target nucleic acid sequence from the inserted one or more RNA polymerase promoters. One advantage of this system is that there is no need to heat or melt double-stranded DNA templates, since RNA polymerase polymerases require a double-stranded template. Such isothermal amplification is fast and simple, obviating the need for complicated and expensive instrumentation for denaturation and cooling. In certain example embodiment the RNA polymerase promoter is a native of modified T7 RNA promoter.

[1118] The term “transposon”, as used herein, refers to a nucleic acid segment, which is recognized by a transposase or an integrase enzyme and which is an essential component of a functional nucleic acid-protein complex (i.e., a transposome) capable of transposition. The term “transposase” as used herein refers to an enzyme, which is a component of a functional nucleic acid-protein complex capable of transposition and which is mediating transposition. The term “transposase” also refers to integrases from retrotransposons or of retroviral origin. Transposon complexes form between a transposase enzyme and a fragment of double stranded DNA that contains a specific binding sequence for the enzyme, termed “transposon end”. The sequence of the transposon binding site can be modified with other bases, at certain positions, without affecting the ability for transposon complex to form a stable structure that can efficiently transpose into target DNA.

[1119] In embodiments provided herein, the transposon complex may comprise a transposase and a transposon sequence comprising one or more RNA polymerase promoters. The term “promoter” refers to a region of DNA involved in binding the RNA polymerase to initiate transcription. In specific embodiments, the RNA polymerase promoter may be a T7 RNA polymerase promoter. The T7 RNA promoter may be inserted into the double-stranded polynucleotide using the transposase. In one embodiment, insertion of the T7 RNA polymerase promoter into the oligonucleotide may be random.

[1120] The frequency of transposition is very low for most transposons, which use complex mechanisms to limit activity. Tn5 transposase, for example, utilizes a DNA binding sequence that is suboptimal and the C-terminus of the transposase interferes with DNA binding. Mechanisms involved in Tn5 transposition have been carefully characterized by Reznikoff and colleagues. Tn5 transposes by a cut-and-paste mechanism. The transposon has two pairs of 19 bp elements that are utilized by the transposase: outside elements (OE) and inside elements (IE). One transposase monomer binds to each of the two elements that are utilized. After a monomer is bound to each end of the transposon, the two monomers dimerize, forming a synapse. Vectors with donor backbones of at least 200 bp, but less than 1000 bp, are most functional for transposition in bacteria. Transposon cleavage occurs by trans catalysis and only when monomers bound to each DNA end are in a synaptic complex. Tn5 transposes with a relaxed target site selection and can therefore insert into target DNA with little to no target sequence specificity.

[1121] The natural downregulation of Tn5 transposition can be overcome by selection of a hyperactive transposase and by optimizing the transposase-binding elements [York et al. 1998]. A mosaic element (ME), made by modification of three bases of the wild-type OE, led to a 50-fold increase in transposition events in bacteria as well as cell-free systems. The combined effect of the optimized ME and hyperactive mutant transposase is estimated to result in a 100-fold increase in transposition activity. Goryshin et al showed that preformed Tn5 transposition complexes could be functionally introduced into bacterial or yeast by electroporation [Goryshin et al. 2000]. Linearization of the DNA, to have inverted repeats precisely positioned at both ends of the transposon, allowed Goryshin and coworkers to bypass the cutting step of transposition thus enhancing transposition efficiency.

[1122] In one embodiment, the transposase may be used to tagment the oligonucleotide sequence comprising the target sequence. The term “tagmentation” refers to a step in the Assay for Transposase Accessible Chromatin using sequencing (ATAC-seq) as described. (See, Buenrostro, J. D., Giresi, P. G., Zaba, L. C., Chang, H. Y., Greenleaf, W. J., Transposition of native chromatin for fast and sensitive epigenomic profiling of open chromatin, DNA-binding proteins and nucleosome position. Nature methods 2013; 10 (12): 1213-1218). Specifically, a hyperactive Tn5 transposase loaded in vitro with adapters for high-throughput DNA sequencing, can simultaneously fragment and tag a genome with sequencing adapters. In one embodiment the adapters are compatible with the methods described herein.

[1123] In one embodiment, the transposase may be a Tn5 transposase. In one embodiment, the transposase may be a variant of a Tn5 transposase, or an engineered transposase. Transposases may be engineered using any method known in the art. The engineered transposase may be optimized to function at a temperature ranging from 30° C. to 45° C., 35° C. to 40° C. or any temperature in between. The engineered transposase may be optimized to release from the oligonucleotide at a faster rate compared to a wild-type transposase.

[1124] In one embodiment, the transposase may be a Tn5 transposase, a Mu transposase, or a Tn7 transposase. Transposition efficiency in vitro may vary depending on the transposon system used. Generally, Tn5 and Mu transposases effect higher levels of transposition efficiency. In one embodiment, insertion may be random. In one embodiment, insertion may occur in GC rich regions of the target sequence.

[1125] In one embodiment, the transposon sequence may comprise two 19 base pair Mosaic End (ME) Tn5 transposase recognition sequences. Tn5 transposases will generally transpose any DNA sequence contained between such short 19 base pair ME Tn5 transposase recognition sequences.

[1126] In one embodiment, use of a transposase allows for separation of a double-stranded polynucleotide in the absence of heat or melting. Approaches can be adapted from those described in PCT/US2019/039195, incorporated herein by reference.

### Nickase Dependent Amplification

[1127] In an embodiment of the invention may comprise nickase-based amplification. The nicking enzyme may be a Fanzor protein. Accordingly, the introduction of nicks into dsDNA can be programmable and sequence-specific. In an embodiment of the invention, two guides can be designed to target opposite strands of a dsDNA target. According to the invention, the nickase can be Fanzor, or one may use any CRISPR protein such as Cpf1, C2c1, Cas9, or any ortholog or CRISPR protein that cleaves or is engineered to cleave a single strand of a DNA duplex. In a particular embodiment, the Fanzor is utilized in the nickase dependent amplification. The nicked strands may then be extended by a polymerase. In an embodiment, the locations of the nicks are selected such that extension of the strands by a polymerase is towards the central portion of the target duplex DNA between the nick sites. In one embodiment, primers are included in the reaction capable of hybridizing to the extended strands followed by further polymerase extension of the primers to regenerate two dsDNA pieces: a first dsDNA that includes the first strand Fanzor (or CRISPR effector) guide site or both the first and second strand Fanzor (or CRISPR effector) guide sites, and a second dsDNA that includes the second strand Fanzor guide site or both the first and second strand Fanzor (or CRISPR effector) guide sites. These pieces continue to be nicked and extended in a cyclic reaction that exponentially amplifies the region of the target between nicking sites. Alternatively, a CRISPR-Cas protein instead of Fanzor can be used for nickase-based amplification, and such methods are known in the art.

[1128] The amplification can be isothermal and selected for temperature. In one embodiment, the amplification proceeds rapidly at 37 degrees C. In other embodiments, the temperature of the isothermal amplification may be chosen by selecting a polymerase (e.g., Bsu, Bst, Phi29, klenow fragment etc.) operable at a different temperature.

[1129] Thus, whereas nicking isothermal amplification techniques use nicking enzymes with fixed sequence preference (e.g. in nicking enzyme amplification reaction or NEAR), which requires denaturing of the original dsDNA target to allow annealing and extension of primers that add the nicking substrate to the ends of the target, use of a Fanzor or CRISPR nickase wherein the nicking sites can be programed via guide RNAs means that no denaturing step is necessary, enabling the entire reaction to be truly isothermal. This also simplifies the reaction because these primers that add the nicking substrate are different than the primers that are used later in the reaction, meaning that NEAR requires two primer sets (i.e., 4 primers) while Fanzor or CRISPR effector (e.g., Cpf1) nicking amplification only requires one primer set (i.e., two primers). This makes nicking Fanzor or CRISPR effector amplification much simpler and easier to operate without complicated instrumentation to perform the denaturation and then cooling to the isothermal temperature.

### Helicase-Dependent Amplification

[1130] In helicase-dependent amplification, a helicase enzyme is used to unwind a double stranded nucleic acid to generate templates for primer hybridization and subsequent primer-extension. This process utilizes two oligonucleotide primers, each hybridizing to the 3′-end of either the sense strand containing the target sequence or the anti-sense strand containing the reverse-complementary target sequence. The HDA reaction is a general method for helicase-dependent nucleic acid amplification.

[1131] In combining this method with a Fanzor detection system, the target nucleic acid may be amplified by opening R-loops of the target nucleic acid using first and second Fanzor complexes. The first and second strand of the target nucleic acid may thus be unwound using a helicase, allowing primers and polymerase to bind and extend the DNA under isothermal conditions.

[1132] The term “helicase” refers here to any enzyme capable of unwinding a double stranded nucleic acid enzymatically. For example, helicases are enzymes that are found in all organisms and in all processes that involve nucleic acid such as replication, recombination, repair, transcription, translation and RNA splicing. (Kornberg and Baker, DNA Replication, W. H. Freeman and Company (2^{nd} ed. (1992)), especially chapter 11). Any helicase that translocates along DNA or RNA in a 5′ to 3′ direction or in the opposite 3′ to 5′ direction may be used in present embodiments of the invention. This includes helicases obtained from prokaryotes, viruses, archaea, and eukaryotes or recombinant forms of naturally occurring enzymes as well as analogues or derivatives having the specified activity. Examples of naturally occurring DNA helicases, described by Kornberg and Baker in chapter 11 of their book, DNA Replication, W. H. Freeman and Company (2^{nd} ed. (1992)), include E. coli helicase I, II, III, & IV, Rep, DnaB, PriA, PcrA, T4 Gp41helicase, T4 Dda helicase, T7 Gp4 helicases, SV40 Large T antigen, yeast RAD. Additional helicases that may be useful in HDA include RecQ helicase (Harmon and Kowalczykowski, J. Biol. Chem. 276:232-243 (2001)), thermostable UvrD helicases from T. tengcongensis (disclosed in this invention, Example XII) and T. thermophilus (Collins and McCarthy, Extremophiles. 7:35-41. (2003)), thermostable DnaB helicase from T. aquaticus (Kaplan and Steitz, J. Biol. Chem. 274:6889-6897 (1999)), and MCM helicase from archaeal and eukaryotic organisms ((Grainge et al., Nucleic Acids Res. 31:4888-4898 (2003)).

[1133] A traditional definition of a helicase is an enzyme that catalyzes the reaction of separating/unzipping/unwinding the helical structure of nucleic acid duplexes (DNA, RNA or hybrids) into single-stranded components, using nucleoside triphosphate (NTP) hydrolysis as the energy source (such as ATP). However, it should be noted that not all helicases fit this definition anymore. A more general definition is that they are motor proteins that move along the single-stranded or double stranded nucleic acids (usually in a certain direction, 3′ to 5′ or 5 to 3, or both), i.e., translocases, that can or cannot unwind the duplexed nucleic acid encountered. In addition, some helicases simply bind and “melt” the duplexed nucleic acid structure without an apparent translocase activity.

[1134] Helicases exist in all living organisms and function in all aspects of nucleic acid metabolism. Helicases are classified based on the amino acid sequences, directionality, oligomerization state and nucleic-acid type and structure preferences. The most common classification method was developed based on the presence of certain amino acid sequences, called motifs. According to this classification helicases are divided into 6 super families: SF1, SF2, SF3, SF4, SF5 and SF6. SF1 and SF2 helicases do not form a ring structure around the nucleic acid, whereas SF3 to SF6 do. Superfamily classification is not dependent on the classical taxonomy.

[1135] DNA helicases are responsible for catalyzing the unwinding of double-stranded DNA (dsDNA) molecules to their respective single-stranded nucleic acid (ssDNA) forms. Although structural and biochemical studies have shown how various helicases can translocate on ssDNA directionally, consuming one ATP per nucleotide, the mechanism of nucleic acid unwinding and how the unwinding activity is regulated remains unclear and controversial (T. M. Lohman, E. J. Tomko, C. G. Wu, “Non-hexameric DNA helicases and translocases: mechanisms and regulation,” Nat Rev Mol Cell Biol 9:391-401 (2008)). Since helicases can potentially unwind all nucleic acids encountered, understanding how their unwinding activities are regulated can lead to harnessing helicase functions for biotechnology applications.

[1136] The term “HDA” refers to Helicase Dependent Amplification, which is an in vitro method for amplifying nucleic acids by using a helicase preparation for unwinding a double stranded nucleic acid to generate templates for primer hybridization and subsequent primer-extension. This process utilizes two oligonucleotide primers, each hybridizing to the 3′-end of either the sense strand containing the target sequence or the anti-sense strand containing the reverse-complementary target sequence. The HDA reaction is a general method for helicase-dependent nucleic acid amplification.

[1137] The invention comprises use of any suitable helicase known in the art. These include, but are not necessarily limited to, UvrD helicase, CRISPR-Cas3 helicase, E. coli helicase I, E. coli helicase II, E. coli helicase III, E. coli helicase IV, Rep helicase, DnaB helicase, PriA helicase, PcrA helicase, T4 Gp41 helicase, T4 Dda helicase, SV40 Large T antigen, yeast RAD helicase, RecD helicase, RecQ helicase, thermostable T. tengcongensis UvrD helicase, thermostable T. thermophilus UvrD helicase, thermostable T. aquaticus DnaB helicase, Dda helicase, papilloma virus E1 helicase, archaeal MCM helicase, eukaryotic MCM helicase, and T7 Gp4 helicase.

[1138] In particularly preferred embodiments, the helicase comprises a super mutation. In particular embodiments, although the E coli mutation has been described, the mutations were generated by sequence alignment (e.g., D409A/D410A for TteUvrd) and result in thermophilic enzymes working at lower temperatures like 37° C., which is advantageous for amplification methods and systems described herein. In one embodiment, the super mutations is an aspartate to alanine mutation, with position based on sequence alignment. In one embodiment, the super mutant helicase is selected from WP_003870487.1 Thermoanaerobacter ethanolicus 403/404, WP_049660019.1 Bacillus sp. FJAT-27231 407/408, WP_034654680.1 Bacillus megaterium 415/416, WP_095390358.1 Bacillus simplex 407/408, and WP_055343022.1 Paeniclostridium sordellii 402/403.

### Extraction and Processing Methods and Reagents for Detection and Amplification

[1139] Also described herein are composition and reagents that can be used for various processing and amplification steps that are optionally employed prior to a detection reaction. Such processing can include extraction, cell lysis, and other sample and nucleic acid preparation techniques.

[1140] Exemplary components of a biological or chemical reaction may include a cell lysis component in order to break open or lyse a cell for analysis of the materials therein. A cell lysis component may include, but is not limited to, a detergent, a salt as described above, such as NaCl, KCl, ammonium sulfate [(NH₄)₂SO₄], or others. Detergents that may be appropriate for the invention may include Triton X-100, sodium dodecyl sulfate (SDS), CHAPS (3-[(3-cholamidopropyl)dimethylammonio]-1-propanesulfonate), ethyl trimethyl ammonium bromide, nonyl phenoxypolyethoxylethanol (NP-40). Concentrations of detergents may depend on the particular application and may be specific to the reaction in some cases. Amplification reactions may include dNTPs and nucleic acid primers used at any concentration appropriate for the invention, such as including, but not limited to, a concentration of 100 nM, 150 nM, 200 nM, 250 nM, 300 nM, 350 nM, 400 nM, 450 nM, 500 nM, 550 nM, 600 nM, 650 nM, 700 nM, 750 nM, 800 nM, 850 nM, 900 nM, 950 nM, 1 mM, 2 mM, 3 mM, 4 mM, 5 mM, 6 mM, 7 mM, 8 mM, 9 mM, 10 mM, 20 mM, 30 mM, 40 mM, 50 mM, 60 mM, 70 mM, 80 mM, 90 mM, 100 mM, 150 mM, 200 mM, 250 mM, 300 mM, 350 mM, 400 mM, 450 mM, 500 mM, or the like. Likewise, a polymerase useful in accordance with the invention may be any specific or general polymerase known in the art and useful or the invention, including Taq polymerase, Q5 polymerase, or the like.

[1141] In certain aspects, embodiments disclosed herein are directed to compositions and kits that consolidate extraction-free lysis and amplification of target nucleic acids into a single reaction volume. In certain example embodiments, the extraction-free lysis reagents can be used to extract nucleic acids from cells and/or viral particles. In contrast to existing protocols, the extraction-free lysis solution does not require isolation of the nucleic acid prior to further amplification. The extraction-free lysis reagents may be mixed with amplification reagents such as standard RT-PCR amplification reactions.

[1142] In one embodiment, extraction-free lysis solution and isothermal amplification reagents may be lyophilized in a single reaction volume, to be reconstituted by addition of a sample to be assayed. In certain other embodiments, the extraction-free lysis solution and isothermal amplification reagents may be lyophilized and stored on a cartridge or lateral flow strip, as discussed in further detail below.

[1143] In certain example embodiments, the single lysis reaction compositions and kits may further comprise one or more Fanzor proteins possessing collateral activity and a detection construct. Pairing with one or more Fanzor proteins may increase sensitivity or specificity of the assay. In certain example embodiments, the one or more Fanzor proteins may be thermostable Fanzor proteins. Example Fanzor proteins are disclosed in further detail below.

[1144] In certain example embodiments, the single lysis amplification reaction compositions and kits may comprise optimized primers and/or one or more additives. In an aspect, the design optimizes the primers used in the amplification. In particular aspects, the isothermal amplification is used alone. In another aspect, the isothermal amplification is used with Fanzor systems. In either approach, design considerations can follow a rational design for optimization of the reactions. In an example, varying additives with specific primers, target, Fanzor protein, temperature, and other additive concentrations within the reaction can be identified. Optimization can be made with the goal of reducing the number of steps and buffer exchanges that have to occur in the reaction, simplifying the reaction and reducing the risks of contamination at transfer steps. In an aspect, addition of inhibitors, such as proteinase K can be considered so that buffer exchanges can be reduced. Similarly, optimizing the salt levels as well as the type of salt utilized can further facilitate and optimize the one-pot detections disclosed herein. In an aspect, potassium chloride can be utilized rather than sodium chloride when such amplification approaches are used with bead concentration in a lysis step.

[1145] In one embodiment, the compositions and kits may further comprise nucleic acid binding bead. The bead may be used to capture, concentrate or otherwise enrich for particular material. The bead may be magnetic and may be provided to capture nucleic acid material. In another aspect, the bead is a silica bead. Beads may be utilized in an extraction step of the methods disclosed herein. Beads can be optionally used with the methods described herein, including with the one-pot methods that allow for concentration of viral nucleic acids from large volume samples, such as saliva or swab samples to allow for a single one-pot reaction method. Concentration of desired target molecules can be increased by about 10-fold, 50-fold, 100-fold, 200-fold, 500-fold, 800-fold, 1000-fold, 1500-fold, 2000-fold, 2500-fold, 3000-fold, or more.

[1146] Magnetic beads in a PEG and salt solution are preferred in an aspect, and in embodiments bind to viral RNA and/or DNA which allows for concentration and lysis concurrently. Silica beads can be used in another aspect. Capture moieties such as oligonucleotide functionalized beads are envisioned for use. The beads may be using with the extraction reagents, allowed to incubate with a sample and the lysis/extraction buffer, thereby concentrating target molecules on the beads. When used with a cartridge device detailed elsewhere herein, a magnet can be activated and the beads collected, with optional flushing of the extraction buffer and one or more washes performed. Advantageously, the beads can be used in the one-pot methods and systems without additional washings of the beads, allowing for a more efficient process without increased risks of contamination in multi-step processes. Beads can be utilized with the isothermal amplifications detailed herein, and the beads can flow into an amplification chamber of the cartridge or be maintained in the pot for the amplification step. Upon heating, nucleic acid can be released off the beads.

### Exemplary Detection, Selection, and Screening Applications Detection Methods Such as FISH

[1147] In one aspect, the invention provides an engineered, non-naturally occurring composition comprising a catalytically inactivate Fanzor polypeptide described herein and use this system in detection methods such as fluorescence in situ hybridization (FISH). A dead Fanzor polypeptide which lacks the ability to produce DNA double-strand breaks may be fused with a marker, such as fluorescent protein, such as the enhanced green fluorescent protein (eEGFP) and co-expressed with small nucleic acid component molecules to target pericentric, centric and teleomeric repeats in vivo. The dead Fanzor polypeptide system can be used to visualize both repetitive sequences and individual genes in the human genome. Such new applications of labelled dead Fanzor polypeptide may be important in imaging cells and studying the functional nuclear architecture, especially in cases with a small nucleus volume or complex 3-D structures. (Chen B, Gilbert L A, Cimini B A, Schnitzbauer J, Zhang W, Li G W, Park J, Blackburn E H, Weissman J S, Qi L S, Huang B. 2013. Dynamic imaging of genomic loci in living human cells by an optimized CRISPR/Cas system. Cell 155(7):1479-91. doi: 10.1016/j.cell.2013.12.001.)

### Patient-Specific Screening Methods

[1148] The nucleic acid-targeting system such as the systems, compositions, and components thereof described herein that targets DNA, e.g., pathogenic and non-pathogenic mutations (e.g., repeats (including but not limited to trinucleotide repeats), in/dels, polymorphisms (including but not limited to single nucleotide polymorphisms), and/or the like) can be used to screen patients or patent samples for the presence of such pathogenic and non-pathogenic mutations. In some embodiments, the mutations can be the target of the RNA component molecule of the nucleic acid-targeting system, and if there is binding thereto by the nucleic acid-targeting system, that binding can be detected, to thereby indicate that such a mutation is present. Thus, a nucleic acid-targeting system can be used to screen patients or patient samples for the presence of the mutation(s). The patient can then be administered suitable compound(s) to address the condition; or, can be administered a nucleic acid-targeting system, such as a system of the present invention, to bind to and cause insertion, deletion or mutation and alleviate the condition. It will be appreciated that patients can be human and non-human animal, particularly pets and other companion animals (e.g., dogs, cats, horses and/or the like), agriculturally important animals (such as elite breeding stock), and endangered species or other wild animal in need of screening.

### Genome Wide Knock-Out Screening

[1149] The Fanzor polypeptide and systems described herein can be used to perform efficient and cost effective functional genomic screens. Such screens can utilize Fanzor polypeptide based genome wide libraries. Such screens and libraries can provide for determining the function of genes, cellular pathways genes are involved in, and how any alteration in gene expression can result in a particular biological process. An advantage of the present invention is that the composition avoids off-target binding and its resulting side effects. This is achieved using systems arranged to have a high degree of sequence specificity for the target DNA. In preferred embodiments of the invention, the Fanzor polypeptide complexes are Fanzor polypeptide complexes.

[1150] In embodiments of the invention, a genome wide library may comprise a plurality of Fanzor polypeptide nucleic acid component molecules, as described herein, comprising guide/spacer sequences that are capable of targeting a plurality of target sequences in a plurality of genomic loci in a population of eukaryotic cells. The population of cells may be a population of embryonic stem (ES) cells. The target sequence in the genomic locus may be a non-coding sequence. The non-coding sequence may be an intron, regulatory sequence, splice site, 3′ UTR, 5′ UTR, or polyadenylation signal. Gene function of one or more gene products may be altered by said targeting. The targeting may result in a knockout of gene function. The targeting of a gene product may comprise more than one nucleic acid component molecule. A gene product may be targeted by 2, 3, 4, 5, 6, 7, 8, 9, or 10 nucleic acid component molecules, preferably 3 to 4 per gene. Off-target modifications may be minimized by exploiting the staggered double strand breaks generated by Fanzor polypeptide complexes or by utilizing methods analogous to those used in composition (See, e.g., DNA targeting specificity of RNA-guided Cas nucleases. Hsu, P., Scott, D., Weinstein, J., Ran, FA., Konermann, S., Agarwala, V., Li, Y., Fine, E., Wu, X., Shalem, O., Cradick, TJ., Marraffini, L A., Bao, G., & Zhang, F. Nat Biotechnol doi: 10.1038/nbt.2647 (2013)), incorporated herein by reference. The targeting may be of about 100 or more sequences. The targeting may be of about 1000 or more sequences. The targeting may be of about 20,000 or more sequences. The targeting may be of the entire genome. The targeting may be of a panel of target sequences focused on a relevant or desirable pathway. The pathway may be an immune pathway. The pathway may be a cell division pathway.

[1151] One aspect of the invention comprehends a genome wide library that may comprise a plurality of nucleic acid component molecules that may comprise guide/spacer sequences that are capable of targeting a plurality of target sequences in a plurality of genomic loci, wherein said targeting results in a knockout of gene function. This library may potentially comprise nucleic acid component molecules that target each and every gene in the genome of an organism.

[1152] In one embodiment of the invention, the organism or subject is a eukaryote (including mammal including human) or a non-human eukaryote or a non-human animal or a non-human mammal. In one embodiment, the organism or subject is a non-human animal, and may be an arthropod, for example, an insect, or may be a nematode. In some methods of the invention the organism or subject is a plant. In some methods of the invention, the organism or subject is a mammal or a non-human mammal. A non-human mammal may be for example a rodent (preferably a mouse or a rat), an ungulate, or a primate. In some methods of the invention the organism or subject is algae, including microalgae, or is a fungus.

[1153] The knockout of gene function may comprise introducing into each cell in the population of cells a vector system of one or more vectors comprising an engineered, non-naturally occurring composition herein. The nucleic acid component molecule sequence may target a unique gene in each cell, wherein the Fanzor polypeptide is operably linked to a regulatory element, wherein when transcribed, the nucleic acid component molecule comprising the spacer sequence directs sequence-specific binding of the Fanzor polypeptide to a target sequence in the genomic loci of the unique gene, inducing cleavage of the genomic loci by the Fanzor polypeptide, and confirming different knockout mutations in a plurality of unique genes in each cell of the population of cells thereby generating a gene knockout cell library. The invention comprehends that the population of cells is a population of eukaryotic cells, and in a preferred embodiment, the population of cells is a population of embryonic stem (ES) cells.

[1154] The one or more vectors may be plasmid vectors. The vector may be a single vector comprising a Fanzor polypeptide, a nucleic acid component, and optionally, a selection marker into target cells. Not being bound by a theory, the ability to simultaneously deliver a Fanzor polypeptide and nucleic acid component through a single vector enables application to any cell type of interest, without the need to first generate cell lines that express the Fanzor polypeptide. The regulatory element may be an inducible promoter. The inducible promoter may be a doxycycline inducible promoter. In some methods of the invention the expression of the nucleic acid component molecule sequence is under the control of the T7 promoter and is driven by the expression of T7 polymerase. The confirming of different knockout mutations may be by whole exome sequencing. The knockout mutation may be achieved in 100 or more unique genes. The knockout mutation may be achieved in 1000 or more unique genes. The knockout mutation may be achieved in 20,000 or more unique genes. The knockout mutation may be achieved in the entire genome. The knockout of gene function may be achieved in a plurality of unique genes which function in a particular physiological pathway or condition. The pathway or condition may be an immune pathway or condition. The pathway or condition may be a cell division pathway or condition.

### Functional Alteration and Screening

[1155] In another aspect, the present invention provides for a method of functional evaluation and screening of genes. The use of the compositions to precisely deliver functional domains, to activate or repress genes or to alter epigenetic state by precisely altering the methylation site on a specific locus of interest, can be with one or more nucleic acid component molecules applied to a single cell or population of cells or with a library applied to genome in a pool of cells ex vivo or in vivo comprising the administration or expression of a library comprising a plurality of nucleic acid components (comprising spacer molecules) and wherein the screening further comprises use of a Fanzor polypeptide, wherein the complex comprising the Fanzor polypeptide is modified to comprise a heterologous functional domain. In an aspect the invention provides a method for screening a genome comprising the administration to a host or expression in a host in vivo of a library. In an aspect the invention provides a method as herein discussed further comprising an activator administered to the host or expressed in the host. In an aspect the invention provides a method as herein discussed wherein the activator is attached to a Fanzor polypeptide. In an aspect the invention provides a method as herein discussed wherein the activator is attached to the N terminus or the C terminus of the Fanzor polypeptide. In an aspect the invention provides a method as herein discussed wherein the activator is attached to a nucleic acid component loop. In an aspect the invention provides a method as herein discussed further comprising a repressor administered to the host or expressed in the host. In an aspect the invention provides a method as herein discussed, wherein the screening comprises affecting and detecting gene activation, gene inhibition, or cleavage in the locus.

[1156] It is also preferred to target endogenous (regulatory) control elements (such as enhancers and silencers) e.g., in addition to a promoter or promoter-proximal elements. Thus, the invention can also be used to target endogenous control elements (including enhancers and silencers) in addition to targeting of the promoter. These control elements can be located upstream and downstream of the transcriptional start site (TSS), starting from 200 bp from the TSS to 100 kb away. Targeting of known control elements can be used to activate or repress the gene of interest. In some cases, a single control element can influence the transcription of multiple target genes. Targeting of a single control element could therefore be used to control the transcription of multiple genes simultaneously.

[1157] Targeting of putative control elements on the other hand (e.g. by tiling the region of the putative control element as well as 200 bp up to 100 kB around the element) can be used as a means to verify such elements (by measuring the transcription of the gene of interest) or to detect novel control elements (e.g. by tiling 100 kb upstream and downstream of the TSS of the gene of interest). In addition, targeting of putative control elements can be useful in the context of understanding genetic causes of disease. Many mutations and common SNP variants associated with disease phenotypes are located outside coding regions. Targeting of such regions with either the activation or repression systems described herein can be followed by readout of transcription of either a) a set of putative targets (e.g., a set of genes located in closest proximity to the control element) or b) whole-transcriptome readout by e.g. RNAseq or microarray. This would allow for the identification of likely candidate genes involved in the disease phenotype. Such candidate genes could be useful as novel drug targets.

[1158] Histone acetyltransferase (HAT) inhibitors are mentioned herein. However, an alternative In one embodiment is for the one or more functional domains to comprise an acetyltransferase, preferably a histone acetyltransferase. These are useful in the field of epigenomics, for example in methods of interrogating the epigenome. Methods of interrogating the epigenome may include, for example, targeting epigenomic sequences. Targeting epigenomic sequences may include the nucleic acid component molecule being directed to an epigenomic target sequence. Epigenomic target sequence may include, in one embodiment, include a promoter, silencer or an enhancer sequence.

### Saturating Mutagenesis

[1159] The compositions herein can be used to perform saturating or deep scanning mutagenesis of genomic loci in conjunction with a cellular phenotype—for instance, for determining critical minimal features and discrete vulnerabilities of functional elements required for gene expression, drug resistance, and reversal of disease. By saturating or deep scanning mutagenesis is meant that every or essentially every DNA base is cut within the genomic loci. A library of Cas1 effector protein nucleic acid component molecules may be introduced into a population of cells. The library may be introduced, such that each cell receives a single nucleic acid component. In the case where the library is introduced by transduction of a viral vector, as described herein, a low multiplicity of infection (MOI) is used. The library may include nucleic acid components targeting every sequence upstream of a (targeted adjacent motif) (TAM) sequence in a genomic locus. The library may include at least 100 non-overlapping genomic sequences upstream of a TAMsequence for every 1000 base pairs within the genomic locus. The library may include nucleic acid components targeting sequences upstream of at least one different TAMsequence. The composition may include more than one Fanzor polypeptide. Any Fanzor polypeptide protein as described herein, including orthologues or engineered Fanzor polypeptides. The frequency of off target sites for a nucleic acid component may be less than 500. Off target scores may be generated to select nucleic acid components with the lowest off target sites. Any phenotype determined to be associated with cutting at a nucleic acid component target site may be confirmed by using nucleic acid components targeting the same site in a single experiment. Validation of a target site may also be performed by using a modified Fanzor polypeptide, as described herein, and two nucleic acid components targeting the genomic site of interest. Not being bound by a theory, a target site is a true hit if the change in phenotype is observed in validation experiments.

[1160] The genomic loci may include at least one continuous genomic region. The at least one continuous genomic region may comprise up to the entire genome. The at least one continuous genomic region may comprise a functional element of the genome. The functional element may be within a non-coding region, coding gene, intronic region, promoter, or enhancer. The at least one continuous genomic region may comprise at least 1 kb, preferably at least 50 kb of genomic DNA. The at least one continuous genomic region may comprise a transcription factor binding site. The at least one continuous genomic region may comprise a region of DNase I hypersensitivity. The at least one continuous genomic region may comprise a transcription enhancer or repressor element. The at least one continuous genomic region may comprise a site enriched for an epigenetic signature. The at least one continuous genomic DNA region may comprise an epigenetic insulator. The at least one continuous genomic region may comprise two or more continuous genomic regions that physically interact. Genomic regions that interact may be determined by ‘4C technology’. 4C technology allows the screening of the entire genome in an unbiased manner for DNA segments that physically interact with a DNA fragment of choice, as is described in Zhao et al. ((2006) Nat Genet 38, 1341-7) and in U.S. Pat. No. 8,642,295, both incorporated herein by reference in its entirety. The epigenetic signature may be histone acetylation, histone methylation, histone ubiquitination, histone phosphorylation, DNA methylation, or a lack thereof.

[1161] The compositions for saturating or deep scanning mutagenesis can be used in a population of cells. The compositions can be used in eukaryotic cells, including but not limited to mammalian and plant cells. The population of cells may be prokaryotic cells. The population of eukaryotic cells may be a population of embryonic stem (ES) cells, neuronal cells, epithelial cells, immune cells, endocrine cells, muscle cells, erythrocytes, lymphocytes, plant cells, or yeast cells.

[1162] In one aspect, the present invention provides for a method of screening for functional elements associated with a change in a phenotype. The library may be introduced into a population of cells that are adapted to contain a Fanzor polypeptide. The cells may be sorted into at least two groups based on the phenotype. The phenotype may be expression of a gene, cell growth, or cell viability. The relative representation of the nucleic acid component molecules present in each group are determined; whereby genomic sites associated with the change in phenotype are determined by the representation of nucleic acid component molecules present in each group. The change in phenotype may be a change in expression of a gene of interest. The gene of interest may be upregulated, downregulated, or knocked out. The cells may be sorted into a high expression group and a low expression group. The population of cells may include a reporter construct that is used to determine the phenotype. The reporter construct may include a detectable marker. Cells may be sorted by use of the detectable marker.

[1163] In another aspect, the present invention provides for a method of screening for genomic sites associated with resistance to a chemical compound. The chemical compound may be a drug or pesticide. The library may be introduced into a population of cells that are adapted to contain a Fanzor polypeptide, wherein each cell of the population contains no more than one nucleic acid component molecule; the population of cells are treated with the chemical compound; and the representation of nucleic acid component molecules are determined after treatment with the chemical compound at a later time point as compared to an early time point, whereby genomic sites associated with resistance to the chemical compound are determined by enrichment of nucleic acid components. Representation of nucleic acid components may be determined by deep sequencing methods.

[1164] Useful in the practice of the instant invention utilizing compositions are methods used in compositions and reference is made to the article entitled BCL11A enhancer dissection by Cas-mediated in situ saturating mutagenesis. Canver, M. C., Smith, E. C., Sher, F., Pinello, L., Sanjana, N. E., Shalem, O., Chen, D. D., Schupp, P. G., Vinjamur, D. S., Garcia, S. P., Luc, S., Kurita, R., Nakamura, Y., Fujiwara, Y., Maeda, T., Yuan, G., Zhang, F., Orkin, S. H., & Bauer, D. E. DOI:10.1038/nature15521, published online Sep. 16, 2015, the article is herein incorporated by reference and discussed briefly below.

[1165] Canver et al. involves novel pooled guide RNA libraries to perform in situ saturating mutagenesis of the human and mouse BCL11A erythroid enhancers previously identified as an enhancer associated with fetal hemoglobin (HbF) level and whose mouse ortholog is necessary for erythroid BCL11A expression. This approach revealed critical minimal features and discrete vulnerabilities of these enhancers. Through editing of primary human progenitors and mouse transgenesis, the authors validated the BCL11A erythroid enhancer as a target for HbF reinduction. The authors generated a detailed enhancer map that informs therapeutic genome editing.

### In Situ Disease Detection

[1166] The compositions, systems, and/or components thereof can be used for diagnostic methods of detection such as in CASFISH (see e.g., Deng et al. 2015. PNAS USA 112(38): 11870-11875), CRISPR-Live FISH (see e.g., Wang et al. 2020. Science; 365(6459):1301-1305), sm-FISH (Lee and Jefcoate. 2017. Front. Endocrinol. doi.org/10.3389/fendo.2017.00289), sequential FISH CRISPRainbow (Ma et al. Nat Biotechnol, 34 (2016), pp. 528-530), CRISPR-Sirius (Nat Methods, 15 (2018), pp. 928-931), Casilio (Cheng et al. Cell Res, 26 (2016), pp. 254-257), Halo-Tag based genomic loci visualization techniques (e.g., Deng et al. 2015. PNAS USA 112(38): 11870-11875; Knight et al., Science, 350 (2015), pp. 823-826), RNA-aptamer based methods (e.g. Ma et al., J Cell Biol, 214 (2016), pp. 529-537), molecular beacon-based methods (e.g. Zhao et al. Biomaterials, 100 (2016), pp. 172-183; Wu et al. Nucleic Acids Res (2018)), Quantum Dot-based systems (e.g. Ma et al. Anal Chem, 89 (2017), pp. 12896-12901), multiplexed methods (e.g. Ma et al., Proc Natl Acad Sci USA, 112 (2015), pp. 3002-3007; Fu et al. Nat Commun, 7 (2016), p. 11707; Ma et al. Nat Biotechnol, 34 (2016), pp. 528-530; Shao et al. Nucleic Acids Res, 44 (2016), Article e86); Wang et al. Sci Rep, 6 (2016), p. 26857), and other in situ CRISPR-hybridization based methods (e.g. Chen et al. Cell, 155 (2013), pp. 1479-1491; Gu et al. Science, 359 (2018), pp. 1050-1055; Tanebaum et al. Cell, 159 (2014), pp. 635-646; Ye et al. Protein Cell, 8 (2017), pp. 853-855; Chen et al. Nat Commun, 9 (2018), p. 5065; Shao et al. ACS Synth Biol (2017); Fu et al. Nat Commun, 7 (2016), p. 11707; Shao et al. Nucleic Acids Res, 44 (2016), Article e86; Wang et al., Sci Rep, 6 (2016), p. 26857), all of which are incorporated by reference herein as if expressed in their entirety and whose teachings can be adapted to the compositions, systems, and components thereof described herein in view of the description herein.

[1167] In one embodiment, the composition, system, or component thereof can be used in a detection method, such as an in situ detection method described herein. In one embodiment, the composition, system, or component thereof can include a catalytically inactive Fanzor polypeptide described herein and use this system in detection methods such as fluorescence in situ hybridization (FISH) or any other described herein. In one embodiment, the inactivated Fanzor polypeptide, which lacks the ability to produce DNA double-strand breaks may be fused with a marker, such as fluorescent protein, such as the enhanced green fluorescent protein (eEGFP) and co-expressed with small nucleic acid component molecules to target pericentric, centric and telomeric repeats in vivo. The dead Fanzor polypeptide or system thereof can be used to visualize both repetitive sequences and individual genes in the human genome. Such new applications of labelled dead Fanzor polypeptide and compositions, systems, thereof can be important in imaging cells and studying the functional nuclear architecture, especially in cases with a small nucleus volume or complex 3-D structures.

### Cell Selection

[1168] In one embodiment, the compositions, systems, and/or components thereof described herein can be used in a method to screen and/or select cells. In one embodiment, composition, system-based screening/selection method can be used to identify diseased cells in a cell population. In one embodiment, selection of the cells results in a modification in the cells such that the selected cells die. In this way, diseased cells can be identified, and removed from the healthy cell population. In one embodiment, the diseased cells can be a cancer cell, pre-cancerous cell, a virus or other pathogenic organism infected cells, or otherwise abnormal cell. In one embodiment, the modification can impart another detectable change in the cells to be selected (e.g., a functional change and/or genomic barcode) that facilitates selection of the desired cells. In one embodiment a negative selection scheme can be used to obtain a desired cell population. In these embodiments, the cells to be selected against are modified, thus can be removed from the cell population based on their death or identification or sorting based the detectable change imparted on the cells. Thus, in these embodiments, the remaining cells after selection are the desired cell population.

[1169] In one embodiment, a method of selecting one or more cell(s) containing a polynucleotide modification can include: introducing one or more composition, system(s) and/or components thereof, and/or vectors or vector systems into the cell(s), wherein the composition, system(s) and/or components thereof, and/or vectors or vector systems contains and/or is capable of expressing one or more of: a Fanzor polypeptide, an nucleic acid component sequence, and an recombination template; wherein, for example that which is being expressed is within and expressed in vivo by the composition, system, vector or vector system and/or the recombination template comprises the one or more mutations that abolish Fanzor polypeptide cleavage; allowing homologous recombination of the recombination template with the target polynucleotide in the cell(s) to be selected; allowing a composition, system, or complex to bind to a target polynucleotide to effect cleavage of the target polynucleotide within said gene, wherein the AAV-complex comprises the Fanzor polypeptide complexed with (1) the nucleic acid component molecule sequence that is hybridized to the target sequence within the target polynucleotide, and (2) the nucleic acid component scaffold, wherein binding of the complex to the target polynucleotide induces cell death or imparts some other detectable change to the cell, thereby allowing one or more cell(s) in which one or more mutations have been introduced to be selected. In one embodiment, the cell to be selected may be a eukaryotic cell. In one embodiment, the cell to be selected may be a prokaryotic cell. Selection of specific cells via the methods herein can be performed without requiring a selection marker or a two-step process that may include a counter-selection system.

### Further Applications of Detection Methods and Devices

[1170] Systems and methods can be designed for the detection and diagnosis of microbes, including bacterial, fungi and viral microbes. In an aspect, the systems may comprise multiplex detection of multiple variants of viral infections, including coronavirus, different viruses which may be related coronaviruses or respiratory viruses, or a combination thereof. In embodiments, assays can be performed for a variety of viruses and viral infections, including acute respiratory infections using the disclosure detailed herein. The systems can comprise two or more Fanzor systems to multiplex, as described elsewhere herein, to detect a plurality of respiratory infections or viral infections, including coronavirus. The coronavirus is a positive-sense single stranded RNA family of viruses, infecting a variety of animals and humans. SARS-CoV is one type of coronavirus infection, as well as MERS-CoV Detection of one or more coronaviruses are envisioned, including the 2019-nCoV detected in Wuhan City. Sequences of the 2019-nCoV are available at GISAID accession no. EPI_ISL_402124 and EPI_ISL_402127-402130, and described in DOI: 10.1101/2020.01.22.914952. Further deposits of the SARS-CoV-2 deposited in the GISAID platform include EP_ISL_402119-402121 and EP_ISL 402123-402124; see also GenBank Accession No. MN908947.3.

[1171] Target molecule detection can comprise two or more detection systems utilizing Fanzor proteins. The Fanzor protein may preferably be thermostable, with multiplexing designed such that different Fanzor proteins with different sequence specificities, operable temperatures, or cutting preferences can be used.

[1172] A multiplex embodiment can be designed to track one or more variants of coronavirus or one or more variants of coronavirus, including SARS-CoV-2, in combination with other viruses, for example, Human respiratory syncytial virus, Middle East respiratory syndrome (MERS) coronavirus, Severe acute respiratory syndrome-related (SARS) coronavirus, and influenza. In embodiments, assays can be done in multiplex to detect multiple variants of coronavirus, different viruses which may be related coronaviruses or respiratory viruses, or a combination thereof. In an aspect, each assay can take place in an individual discrete volume. An “individual discrete volume” is a discrete volume or discrete space, such as a container, receptacle, or other defined volume or space that can be defined by properties that prevent and/or inhibit migration of nucleic acids and reagents necessary to carry out the methods disclosed herein, for example a volume or space defined by physical properties such as walls, for example the walls of a well, tube, or a surface of a droplet, which may be impermeable or semipermeable, or as defined by other means such as chemical, diffusion rate limited, electro-magnetic, or light illumination, or any combination thereof. By “diffusion rate limited” (for example diffusion defined volumes) is meant spaces that are only accessible to certain molecules or reactions because diffusion constraints effectively defining a space or volume as would be the case for two parallel laminar streams where diffusion will limit the migration of a target molecule from one stream to the other. By “chemical” defined volume or space is meant spaces where only certain target molecules can exist because of their chemical or molecular properties, such as size, where for example gel beads may exclude certain species from entering the beads but not others, such as by surface charge, matrix size or other physical property of the bead that can allow selection of species that may enter the interior of the bead. By “electro-magnetically” defined volume or space is meant spaces where the electro-magnetic properties of the target molecules or their supports such as charge or magnetic properties can be used to define certain regions in a space such as capturing magnetic particles within a magnetic field or directly on magnets. By “optically” defined volume is meant any region of space that may be defined by illuminating it with visible, ultraviolet, infrared, or other wavelengths of light such that only target molecules within the defined space or volume may be labeled. One advantage to the used of non-walled, or semipermeable is that some reagents, such as buffers, chemical activators, or other agents maybe passed in Applicants through the discrete volume, while other material, such as target molecules, maybe maintained in the discrete volume or space. Typically, a discrete volume will include a fluid medium, (for example, an aqueous solution, an oil, a buffer, and/or a media capable of supporting cell growth) suitable for labeling of the target molecule with the indexable nucleic acid identifier under conditions that permit labeling. Exemplary discrete volumes or spaces useful in the disclosed methods include droplets (for example, microfluidic droplets and/or emulsion droplets), hydrogel beads or other polymer structures (for example poly-ethylene glycol di-acrylate beads or agarose beads), tissue slides (for example, fixed formalin paraffin embedded tissue slides with particular regions, volumes, or spaces defined by chemical, optical, or physical means), microscope slides with regions defined by depositing reagents in ordered arrays or random patterns, tubes (such as, centrifuge tubes, microcentrifuge tubes, test tubes, cuvettes, conical tubes, and the like), bottles (such as glass bottles, plastic bottles, ceramic bottles, Erlenmeyer flasks, scintillation vials and the like), wells (such as wells in a plate), plates, pipettes, or pipette tips among others. In certain example embodiments, the individual discrete volumes are the wells of a microplate. In certain example embodiments, the microplate is a 96 well, a 384 well, or a 1536 well microplate.

[1173] In certain example embodiments, the systems, devices, and methods, disclosed herein are directed to detecting the presence of one or more microbial agents in a sample, such as a biological sample obtained from a subject. In certain example embodiments, the microbe may be a bacterium, a fungus, a yeast, a protozoan, a parasite, or a virus. Accordingly, the methods disclosed herein can be adapted for use in other methods (or in combination) with other methods that require quick identification of microbe species, monitoring the presence of microbial proteins (antigens), antibodies, antibody genes, detection of certain phenotypes (e.g., bacterial resistance), monitoring of disease progression and/or outbreak, and antibiotic screening. Because of the rapid and sensitive diagnostic capabilities of the embodiments disclosed here, detection of microbe species type, down to a single nucleotide difference, and the ability to be deployed as a POC device, the embodiments disclosed herein may be used as guide therapeutic regimens, such as a selection of the appropriate antibiotic or antiviral. The embodiments disclosed herein may also be used to screen environmental samples (air, water, surfaces, food etc.) for the presence of microbial contamination.

[1174] Disclosed is a method to identify microbial species, such as bacterial, viral, fungal, yeast, or parasitic species, or the like. Particular embodiments disclosed herein describe methods and systems that will identify and distinguish microbial species within a single sample, or across multiple samples, allowing for recognition of many different microbes. The present methods allow the detection of pathogens and distinguishing between two or more species of one or more organisms, e.g., bacteria, viruses, yeast, protozoa, and fungi or a combination thereof, in a biological or environmental sample, by detecting the presence of a target nucleic acid sequence in the sample. A positive signal obtained from the sample indicates the presence of the microbe. Multiple microbes can be identified simultaneously using the methods and systems of the invention, by employing the use of more than one effector protein, wherein each effector protein targets a specific microbial target sequence. In this way, a multi-level analysis can be performed for a particular subject in which any number of microbes can be detected at once, for example, a subject with unknown respiratory infection, having symptoms of coronavirus, or an individual at risk or having been exposed to coronavirus. In one embodiment, simultaneous detection of multiple microbes may be performed using a set of probes that can identify one or more microbial species.

### Microbe Detection

[1175] In one embodiment, a method for detecting microbes in samples is provided comprising distributing a sample or set of samples into one or more individual discrete volumes, the individual discrete volumes comprising a Fanzor system as described herein; incubating the sample or set of samples under conditions sufficient to allow binding of the one or more nucleic acid component molecules to one or more microbe-specific targets; activating the Fanzor protein via binding of the one or more nucleic acid component molecules to the one or more target molecules, wherein activating the Fanzor protein results in modification of the RNA-based masking construct such that a detectable positive signal is generated; and detecting the detectable positive signal, wherein detection of the detectable positive signal indicates a presence of one or more target molecules in the sample. The one or more target molecules may be mRNA, gDNA (coding or non-coding), trRNA, or rRNA comprising a target nucleotide tide sequence that may be used to distinguish two or more microbial species/strains from one another. The nucleic acid component molecules may be designed to detect target sequences. The embodiments disclosed herein may also utilize certain steps to improve hybridization between nucleic acid component molecule and target RNA sequences. Methods for enhancing ribonucleic acid hybridization are disclosed in WO 2015/085194, entitled “Enhanced Methods of Ribonucleic Acid Hybridization” which is incorporated herein by reference. The microbe-specific target may be RNA or DNA or a protein. If DNA method may further comprise the use of DNA primers that introduce a RNA polymerase promoter as described herein. If the target is a protein than the method will utilize aptamers and steps specific to protein detection described herein.

### Detection of Single Nucleotide Variants

[1176] In one embodiment, one or more identified target sequences may be detected using nucleic acid component molecules that are specific for and bind to the target sequence as described herein. The systems and methods of the present invention can distinguish even between single nucleotide polymorphisms present among different microbial species and therefore, use of multiple nucleic acid component molecules in accordance with the invention may further expand on or improve the number of target sequences that may be used to distinguish between species. For example, in one embodiment, the one or more nucleic acid component molecules may distinguish between microbes at the species, genus, family, order, class, phylum, kingdom, or phenotype, or a combination thereof.

Detection Based on rRNA Sequences

[1177] In certain example embodiments, the devices, systems, and methods disclosed herein may be used to distinguish multiple microbial species in a sample. In certain example embodiments, identification may be based on ribosomal RNA sequences, including the 16S, 23S, and 5S subunits. Methods for identifying relevant rRNA sequences are disclosed in U.S. Patent Application Publication No. 2017/0029872. In certain example embodiments, a set of nucleic acid component molecule may be designed to distinguish each species by a variable region that is unique to each species or strain. nucleic acid component molecules may also be designed to target RNA genes that distinguish microbes at the genus, family, order, class, phylum, kingdom levels, or a combination thereof. In certain example embodiments where amplification is used, a set of amplification primers may be designed to flanking constant regions of the ribosomal RNA sequence and a nucleic acid component molecule designed to distinguish each species by a variable internal region. In certain example embodiments, the primers and nucleic acid component molecules may be designed to conserved and variable regions in the 16S subunit respectfully. Other genes or genomic regions that uniquely variable across species or a subset of species such as the RecA gene family, RNA polymerase R subunit, may be used as well. Other suitable phylogenetic markers, and methods for identifying the same, are discussed for example in Wu et al. arXiv:1307.8690 [q-bio.GN].

[1178] In certain example embodiments, a method or diagnostic is designed to screen microbes across multiple phylogenetic and/or phenotypic levels at the same time. For example, the method or diagnostic may comprise the use of multiple Fanzor systems with different nucleic acid component molecules. A first set of nucleic acid component molecules may distinguish, for example, between mycobacteria, gram positive, and gram negative bacteria. These general classes can be even further subdivided. For example, nucleic acid components could be designed and used in the method or diagnostic that distinguish enteric and non-enteric within gram negative bacteria. A second set of nucleic acid component molecules can be designed to distinguish microbes at the genus or species level. Thus a matrix may be produced identifying all mycobacteria, gram positive, gram negative (further divided into enteric and non-enteric) with each genus of species of bacteria identified in a given sample that fall within one of those classes. The foregoing is for example purposes only. Other means for classifying other microbe types are also contemplated and would follow the general structure described above.

### Screening for Drug Resistance

[1179] In certain example embodiments, the devices, systems and methods disclosed herein may be used to screen for microbial genes of interest, for example antibiotic and/or antiviral resistance genes. nucleic acid component molecules may be designed to distinguish between known genes of interest. Samples, including clinical samples, may then be screened using the embodiments disclosed herein for detection of such genes. The ability to screen for drug resistance at POC would have tremendous benefit in selecting an appropriate treatment regime. In certain example embodiments, the antibiotic resistance genes are carbapenemases including KPC, NDM1, CTX-M15, OXA-48. Other antibiotic resistance genes are known and may be found for example in the Comprehensive Antibiotic Resistance Database (Jia et al. “CARD 2017: expansion and model-centric curation of the Comprehensive Antibiotic Resistance Database.” Nucleic Acids Research, 45, D566-573).

[1180] Ribavirin is an effective antiviral that hits a number of RNA viruses. Several clinically important viruses have evolved ribavirin resistance including Foot and Mouth Disease Virus doi:10.1128/JVI.03594-13; polio virus (Pfeifer and Kirkegaard. PNAS, 100(12):7289-7294, 2003); and hepatitis C virus (Pfeiffer and Kirkegaard, J. Virol. 79(4):2346-2355, 2005). A number of other persistent RNA viruses, such as hepatitis and HIV, have evolved resistance to existing antiviral drugs: hepatitis B virus (lamivudine, tenofovir, entecavir) doi:10/1002/hep22900; hepatitis C virus (telaprevir, BILN2061, ITMN-191, SCh6, boceprevir, AG-021541, ACH-806) doi: 10.1002/hep.22549; and HIV (many drug resistance mutations) hivb.standford.edu. The embodiments disclosed herein may be used to detect such variants among others.

[1181] Aside from drug resistance, there are a number of clinically relevant mutations that could be detected with the embodiments disclosed herein, such as persistent versus acute infection in LCMV (doi:10.1073/pnas.1019304108), and increased infectivity of Ebola (Diehl et al. Cell. 2016, 167(4):1088-1098.

[1182] As described herein elsewhere, closely related microbial species (e.g., having only a single nucleotide difference in a given target sequence) may be distinguished by introduction of a synthetic mismatch in the nucleic acid component molecule.

### Monitoring Microbe Outbreaks

[1183] In one embodiment, a Fanzor system or methods of use thereof as described herein may be used to determine the evolution of a pathogen outbreak. The method may comprise detecting one or more target sequences from a plurality of samples from one or more subjects, wherein the target sequence is a sequence from a microbe causing the outbreaks. Such a method may further comprise determining a pattern of pathogen transmission, or a mechanism involved in a disease outbreak caused by a pathogen.

[1184] The pattern of pathogen transmission may comprise continued new transmissions from the natural reservoir of the pathogen or subject-to-subject transmissions (e.g., human-to-human transmission) following a single transmission from the natural reservoir or a mixture of both. In one embodiment, the pathogen transmission may be bacterial or viral transmission, in such case, the target sequence is preferably a microbial genome or fragments thereof. In one embodiment, the pattern of the pathogen transmission is the early pattern of the pathogen transmission, i.e., at the beginning of the pathogen outbreak. Determining the pattern of the pathogen transmission at the beginning of the outbreak increases likelihood of stopping the outbreak at the earliest possible time thereby reducing the possibility of local and international dissemination.

[1185] Determining the pattern of the pathogen transmission may comprise detecting a pathogen sequence according to the methods described herein. Determining the pattern of the pathogen transmission may further comprise detecting shared intra-host variations of the pathogen sequence between the subjects and determining whether the shared intra-host variations show temporal patterns. Patterns in observed intrahost and interhost variation provide important insight about transmission and epidemiology (Gire, et al., 2014).

[1186] Detection of shared intra-host variations between the subjects that show temporal patterns is an indication of transmission links between subject (in particular between humans) because it can be explained by subject infection from multiple sources (superinfection), sample contamination recurring mutations (with or without balancing selection to reinforce mutations), or co-transmission of slightly divergent viruses that arose by mutation earlier in the transmission chain (Park, et al., Cell 161(7):1516-1526, 2015). Detection of shared intra-host variations between subjects may comprise detection of intra-host variants located at common single nucleotide polymorphism (SNP) positions. Positive detection of intra-host variants located at common (SNP) positions is indicative of superinfection and contamination as primary explanations for the intra-host variants. Superinfection and contamination can be parted on the basis of SNP frequency appearing as inter-host variants (Park, et al., 2015). Otherwise superinfection and contamination can be ruled out. In this latter case, detection of shared intra-host variations between subjects may further comprise assessing the frequencies of synonymous and nonsynonymous variants and comparing the frequency of synonymous and nonsynonymous variants to one another. A nonsynonymous mutation is a mutation that alters the amino acid of the protein, likely resulting in a biological change in the microbe that is subject to natural selection. Synonymous substitution does not alter an amino acid sequence. Equal frequency of synonymous and nonsynonymous variants is indicative of the intra-host variants evolving neutrally. If frequencies of synonymous and nonsynonymous variants are divergent, the intra-host variants are likely to be maintained by balancing selection. If frequencies of synonymous and nonsynonymous variants are low, this is indicative of recurrent mutation. If frequencies of synonymous and nonsynonymous variants are high, this is indicative of co-transmission (Park, et al., 2015).

[1187] Like Ebola virus, Lassa virus (LASV) can cause hemorrhagic fever with high case fatality rates. Andersen et al. generated a genomic catalog of almost 200 LASV sequences from clinical and rodent reservoir samples (Andersen, et al., Cell Volume 162, Issue 4, p 738-750, 13 Aug. 2015). Andersen et al. show that whereas the 2013-2015 EVD epidemic is fueled by human-to-human transmissions, LASV infections mainly result from reservoir-to-human infections. Andersen et al. elucidated the spread of LASV across West Africa and show that this migration was accompanied by changes in LASV genome abundance, fatality rates, codon adaptation, and translational efficiency. The method may further comprise phylogenetically comparing a first pathogen sequence to a second pathogen sequence and determining whether there is a phylogenetic link between the first and second pathogen sequences. The second pathogen sequence may be an earlier reference sequence. If there is a phylogenetic link, the method may further comprise rooting the phylogeny of the first pathogen sequence to the second pathogen sequence. Thus, it is possible to construct the lineage of the first pathogen sequence. (Park, et al., 2015).

[1188] The method may further comprise determining whether the mutations are deleterious or adaptive. Deleterious mutations are indicative of transmission-impaired viruses and dead-end infections, thus normally only present in an individual subject. Mutations unique to one individual subject are those that occur on the external branches of the phylogenetic tree, whereas internal branch mutations are those present in multiple samples (i.e., in multiple subjects). Higher rate of nonsynonymous substitution is a characteristic of external branches of the phylogenetic tree (Park, et al., 2015).

[1189] In internal branches of the phylogenetic tree, selection has had more opportunity to filter out deleterious mutants. Internal branches, by definition, have produced multiple descendent lineages and are thus less likely to include mutations with fitness costs. Thus, lower rate of nonsynonymous substitution is indicative of internal branches (Park, et al., 2015).

[1190] Synonymous mutations, which likely have less impact on fitness, occurred at more comparable frequencies on internal and external branches (Park, et al., 2015).

[1191] By analyzing the sequenced target sequence, such as viral genomes, it is possible to discover the mechanisms responsible for the severity of the epidemic episode such as during the 2014 Ebola outbreak. For example, Gire et al. made a phylogenetic comparison of the genomes of the 2014 outbreak to all 20 genomes from earlier outbreaks suggests that the 2014 West African virus likely spread from central Africa within the past decade. Rooting the phylogeny using divergence from other ebolavirus genomes was problematic (6, 13). However, rooting the tree on the oldest outbreak revealed a strong correlation between sample date and root-to-tip distance, with a substitution rate of 8×10-4 per site per year (13). This suggests that the lineages of the three most recent outbreaks all diverged from a common ancestor at roughly the same time, around 2004, which supports the hypothesis that each outbreak represents an independent zoonotic event from the same genetically diverse viral population in its natural reservoir. They also found out that the 2014 EBOV outbreak might be caused by a single transmission from the natural reservoir, followed by human-to-human transmission during the outbreak. Their results also suggested that the epidemic episode in Sierra Leon might stem from the introduction of two genetically distinct viruses from Guinea around the same time (Gire, et al., 2014).

[1192] It has been also possible to determine how the Lassa virus spread out from its origin point, in particular thanks to human-to-human transmission and even retrace the history of this spread 400 years back (Andersen, et al., Cell 162(4):738-50, 2015).

[1193] In relation to the work needed during the 2013-2015 EBOV outbreak and the difficulties encountered by the medical staff at the site of the outbreak, and more generally, the method of the invention makes it possible to carry out sequencing using fewer selected probes such that sequencing can be accelerated, thus shortening the time needed from sample taking to results procurement. Further, kits and systems can be designed to be usable on the field so that diagnostics of a patient can be readily performed without need to send or ship samples to another part of the country or the world.

[1194] In any method described above, sequencing the target sequence or fragment thereof may be used any of the sequencing processes described above. Further, sequencing the target sequence or fragment thereof may be a near-real-time sequencing. Sequencing the target sequence or fragment thereof may be carried out according to previously described methods (Experimental Procedures: Matranga et al., 2014; and Gire, et al., 2014). Sequencing the target sequence or fragment thereof may comprise parallel sequencing of a plurality of target sequences. Sequencing the target sequence or fragment thereof may comprise Illumina sequencing.

[1195] Analyzing the target sequence or fragment thereof that hybridizes to one or more of the selected probes may be an identifying analysis, wherein hybridization of a selected probe to the target sequence or a fragment thereof indicates the presence of the target sequence within the sample.

[1196] Currently, primary diagnostics are based on the symptoms a patient has. However, various diseases may share identical symptoms so that diagnostics rely much on statistics. For example, malaria triggers flu-like symptoms: headache, fever, shivering, joint pain, vomiting, hemolytic anemia, jaundice, hemoglobin in the urine, retinal damage, and convulsions. These symptoms are also common for septicemia, gastroenteritis, and viral diseases. Amongst the latter, Ebola hemorrhagic fever has the following symptoms fever, sore throat, muscular pain, headaches, vomiting, diarrhea, rash, decreased function of the liver and kidneys, internal and external hemorrhage.

[1197] When a patient is presented to a medical unit, for example in tropical Africa, basic diagnostics will conclude to malaria because statistically, malaria is the most probable disease within that region of Africa. The patient is consequently treated for malaria although the patient might not actually have contracted the disease and the patient ends up not being correctly treated. This lack of correct treatment can be life-threatening especially when the disease the patient contracted presents a rapid evolution. It might be too late before the medical staff realizes that the treatment given to the patient is ineffective and comes to the correct diagnostics and administers the adequate treatment to the patient.

[1198] The method of the invention provides a solution to this situation. Indeed, because the number of nucleic acid component molecules can be dramatically reduced, this makes it possible to provide on a single chip selected probes divided into groups, each group being specific to one disease, such that a plurality of diseases, e.g. viral infection, can be diagnosed at the same time. Thanks to the invention, more than 3 diseases can be diagnosed on a single chip, preferably more than 4, 5, 6, 7, 8, 9, 10, 11, 12, 13, 14, 15, 16, 17, 18, 19, 20 diseases at the same time, preferably the diseases that most commonly occur within the population of a given geographical area. Since each group of selected probes is specific to one of the diagnosed diseases, a more accurate diagnosis can be performed, thus diminishing the risk of administering the wrong treatment to the patient.

[1199] In other cases, a disease such as a viral infection may occur without any symptoms, or had caused symptoms but dissipated before the patient is presented to the medical staff. In such cases, either the patient does not seek any medical assistance or the diagnostics is complicated due to the absence of symptoms on the day of the presentation.

[1200] The present invention may also be used in concert with other methods of diagnosing disease, identifying pathogens and optimizing treatment based upon detection of nucleic acids, such as mRNA in crude, non-purified samples.

[1201] The method of the invention also provides a powerful tool to address this situation. Indeed, since a plurality of groups of selected nucleic acid component molecules, each group being specific to one of the most common diseases that occur within the population of the given area, are comprised within a single diagnostic, the medical staff only need to contact a biological sample taken from the patient with the chip. Reading the chip reveals the diseases the patient has contracted.

[1202] In some cases, the patient is presented to the medical staff for diagnostics of particular symptoms. The method of the invention makes it possible not only to identify which disease causes these symptoms but at the same time determine whether the patient suffers from another disease he was not aware of.

[1203] This information might be of utmost importance when searching for the mechanisms of an outbreak. Indeed, groups of patients with identical viruses also show temporal patterns suggesting a subject-to-subject transmission links.

### Example Microbes

[1204] The embodiment disclosed herein may be used to detect a number of different microbes. The term microbe as used herein includes bacteria, fungus, protozoa, parasites and viruses.

### Bacteria

[1205] The following provides an example list of the types of microbes that might be detected using the embodiments disclosed herein. In certain example embodiments, the microbe is a bacterium. Examples of bacteria that can be detected in accordance with the disclosed methods include without limitation any one or more of (or any combination of) Acinetobacter baumanii, Actinobacillus sp., Actinomycetes, Actinomyces sp. (such as Actinomyces israelii and Actinomyces naeslundii), Aeromonas sp. (such as Aeromonas hydrophila, Aeromonas veronii biovar sobria (Aeromonas sobria), and Aeromonas caviae), Anaplasma phagocytophilum, Anaplasma marginale Alcaligenes xylosoxidans, Acinetobacter baumanii, Actinobacillus actinomycetemcomitans, Bacillus sp. (such as Bacillus anthracis, Bacillus cereus, Bacillus subtilis, Bacillus thuringiensis, and Bacillus stearothermophilus), Bacteroides sp. (such as Bacteroides fragilis), Bartonella sp. (such as Bartonella bacilliformis and Bartonella henselae, Bifidobacterium sp., Bordetella sp. (such as Bordetella pertussis, Bordetella parapertussis, and Bordetella bronchiseptica), Borrelia sp. (such as Borrelia recurrentis, and Borrelia burgdorferi), Brucella sp. (such as Brucella abortus, Brucella canis, Brucella melintensis and Brucella suis), Burkholderia sp. (such as Burkholderia pseudomallei and Burkholderia cepacia), Campylobacter sp. (such as Campylobacter jejuni, Campylobacter coli, Campylobacter lari and Campylobacter fetus), Capnocytophaga sp., Cardiobacterium hominis, Chlamydia trachomatis, Chlamydophila pneumoniae, Chlamydophila psittaci, Citrobacter sp. Coxiella burnetii, Corynebacterium sp. (such as, Corynebacterium diphtheriae, Corynebacterium jeikeum and Corynebacterium), Clostridium sp. (such as Clostridium perfringens, Clostridium difficile, Clostridium botulinum and Clostridium tetani), Eikenella corrodens, Enterobacter sp. (such as Enterobacter aerogenes, Enterobacter agglomerans, Enterobacter cloacae and Escherichia coli, including opportunistic Escherichia coli, such as enterotoxigenic E. coli, enteroinvasive E. coli, enteropathogenic E. coli, enterohemorrhagic E. coli, enteroaggregative E. coli and uropathogenic E. coli) Enterococcus sp. (such as Enterococcus faecalis and Enterococcus faecium) Ehrlichia sp. (such as Ehrlichia chafeensia and Ehrlichia canis), Epidermophyton floccosum, Erysipelothrix rhusiopathiae, Eubacterium sp., Francisella tularensis, Fusobacterium nucleatum, Gardnerella vaginalis, Gemella morbillorum, Haemophilus sp. (such as Haemophilus influenzae, Haemophilus ducreyi, Haemophilus aegyptius, Haemophilus parainfluenzae, Haemophilus haemolyticus and Haemophilus parahaemolyticus, Helicobacter sp. (such as Helicobacter pylori, Helicobacter cinaedi and Helicobacter fennelliae), Kingella kingii, Klebsiella sp. (such as Klebsiella pneumoniae, Klebsiella granulomatis and Klebsiella oxytoca), Lactobacillus sp., Listeria monocytogenes, Leptospira interrogans, Legionella pneumophila, Leptospira interrogans, Peptostreptococcus sp., Mannheimia hemolytica, Microsporum canis, Moraxella catarrhalis, Morganella sp., Mobiluncus sp., Micrococcus sp., Mycobacterium sp. (such as Mycobacterium leprae, Mycobacterium tuberculosis, Mycobacterium paratuberculosis, Mycobacterium intracellulare, Mycobacterium avium, Mycobacterium bovis, and Mycobacterium marinum), Mycoplasm sp. (such as Mycoplasma pneumoniae, Mycoplasma hominis, and Mycoplasma genitalium), Nocardia sp. (such as Nocardia asteroides, Nocardia cyriacigeorgica and Nocardia brasiliensis), Neisseria sp. (such as Neisseria gonorrhoeae and Neisseria meningitidis), Pasteurella multocida, Pityrosporum orbiculare (Malassezia furfur), Plesiomonas shigelloides. Prevotella sp., Porphyromonas sp., Prevotella melaninogenica, Proteus sp. (such as Proteus vulgaris and Proteus mirabilis), Providencia sp. (such as Providencia alcalfaciens, Providencia rettgeri and Providencia stuartii), Pseudomonas aeruginosa, Propionibacterium acnes, Rhodococcus equi, Rickettsia sp. (such as Rickettsia rickettsii, Rickettsia akari and Rickettsia prowazekii, Orientia tsutsugamushi (formerly: Rickettsia tsutsugamushi) and Rickettsia typhi), Rhodococcus sp., Serratia marcescens, Stenotrophomonas maltophilia, Salmonella sp. (such as Salmonella enterica, Salmonella typhi, Salmonella paratyphi, Salmonella enteritidis, Salmonella cholerasuis and Salmonella typhimurium), Serratia sp. (such as Serratia marcesans and Serratia liquifaciens), Shigella sp. (such as Shigella dysenteriae, Shigella flexneri, Shigella boydii and Shigella sonnei), Staphylococcus sp. (such as Staphylococcus aureus, Staphylococcus epidermidis, Staphylococcus hemolyticus, Staphylococcus saprophyticus), Streptococcus sp. (such as Streptococcus pneumoniae (for example chloramphenicol-resistant serotype 4 Streptococcus pneumoniae, spectinomycin-resistant serotype 6B Streptococcus pneumoniae, streptomycin-resistant serotype 9V Streptococcus pneumoniae, erythromycin-resistant serotype 14 Streptococcus pneumoniae, optochin-resistant serotype 14 Streptococcus pneumoniae, rifampicin-resistant serotype 18C Streptococcus pneumoniae, tetracycline-resistant serotype 19F Streptococcus pneumoniae, penicillin-resistant serotype 19F Streptococcus pneumoniae, and trimethoprim-resistant serotype 23F Streptococcus pneumoniae, chloramphenicol-resistant serotype 4 Streptococcus pneumoniae, spectinomycin-resistant serotype 6B Streptococcus pneumoniae, streptomycin-resistant serotype 9V Streptococcus pneumoniae, optochin-resistant serotype 14 Streptococcus pneumoniae, rifampicin-resistant serotype 18C Streptococcus pneumoniae, penicillin-resistant serotype 19F Streptococcus pneumoniae, or trimethoprim-resistant serotype 23F Streptococcus pneumoniae), Streptococcus agalactiae, Streptococcus mutans, Streptococcus pyogenes, Group A streptococci, Streptococcus pyogenes, Group B streptococci, Streptococcus agalactiae, Group C streptococci, Streptococcus anginosus, Streptococcus equismilis, Group D streptococci, Streptococcus bovis, Group F streptococci, and Streptococcus anginosus Group G streptococci), Spirillum minus, Streptobacillus moniliformi, Treponema sp. (such as Treponema carateum, Treponema petenue, Treponema pallidum and Treponema endemicum, Trichophyton rubrum, T. mentagrophytes, Tropheryma whippelii, Ureaplasma urealyticum, Veillonella sp., Vibrio sp. (such as Vibrio cholerae, Vibrio parahemolyticus, Vibrio vulnificus, Vibrio parahaemolyticus, Vibrio vulnificus, Vibrio alginolyticus, Vibrio mimicus, Vibrio hollisae, Vibrio fluvialis, Vibrio metchnikovii, Vibrio damsela and Vibrio furnisii), Yersinia sp. (such as Yersinia enterocolitica, Yersinia pestis, and Yersinia pseudotuberculosis) and Xanthomonas maltophilia among others.

### Fungi

[1206] In certain example embodiments, the microbe is a fungus or a fungal species. Examples of fungi that can be detected in accordance with the disclosed methods include without limitation any one or more of (or any combination of), Aspergillus, Blastomyces, Candidiasis, Coccidiodomycosis, Cryptococcus neoformans, Cryptococcus gatti, sp. Histoplasma sp. (such as Histoplasma capsulatum), Pneumocystis sp. (such as Pneumocystis jirovecii), Stachybotrys (such as Stachybotrys chartarum), Mucroymcosis, Sporothrix, fungal eye infections ringworm, Exserohilum, Cladosporium.

[1207] In certain example embodiments, the fungus is a yeast. Examples of yeast that can be detected in accordance with disclosed methods include without limitation one or more of (or any combination of), Aspergillus species (such as Aspergillus fumigatus, Aspergillus flavus and Aspergillus clavatus), Cryptococcus sp. (such as Cryptococcus neoformans, Cryptococcus gattii, Cryptococcus laurentii and Cryptococcus albidus), a Geotrichum species, a Saccharomyces species, a Hansenula species, a Candida species (such as Candida albicans), a Kluyveromyces species, a Debaryomyces species, a Pichia species, or combination thereof. In certain example embodiments, the fungi is a mold. Example molds include, but are not limited to, a Penicillium species, a Cladosporium species, a Byssochlamys species, or a combination thereof.

### Protozoa

[1208] In certain example embodiments, the microbe is a protozoa. Examples of protozoa that can be detected in accordance with the disclosed methods and devices include without limitation any one or more of (or any combination of), Euglenozoa, Heterolobosea, Diplomonadida, Amoebozoa, Blastocystic, and Apicomplexa. Example Euglenoza include, but are not limited to, Trypanosoma cruzi (Chagas disease), T. brucei gambiense, T. brucei rhodesiense, Leishmania braziliensis, L. infantum, L. mexicana, L. major, L. tropica, and L. donovani. Example Heterolobosea include, but are not limited to, Naegleria fowleri. Example Diplomonadids include, but are not limited to, Giardia intestinalis (G. lamblia, G. duodenalis). Example Amoebozoa include, but are not limited to, Acanthamoeba castellanii, Balamuthia madrillaris, Entamoeba histolytica. Example Blastocysts include, but are not limited to, Blastocystic hominis. Example Apicomplexa include, but are not limited to, Babesia microti, Cryptosporidium parvum, Cyclospora cayetanensis, Plasmodium falciparum, P. vivax, P. ovale, P. malariae, and Toxoplasma gondii.

### Parasites

[1209] In certain example embodiments, the microbe is a parasite. Examples of parasites that can be detected in accordance with disclosed methods include without limitation one or more of (or any combination of), an Onchocerca species and a Plasmodium species.

### Viruses

[1210] In certain example embodiments, the systems, devices, and methods, disclosed herein are directed to detecting viruses in a sample. The embodiments disclosed herein may be used to detect viral infection (e.g., of a subject or plant), or determination of a viral strain, including viral strains that differ by a single nucleotide polymorphism. The virus may be a DNA virus, a RNA virus, or a retrovirus. Non-limiting example of viruses useful with the present invention include, but are not limited to Ebola, measles, SARS, Chikungunya, hepatitis, Marburg, yellow fever, MERS, Dengue, Lassa, influenza, rhabdovirus or HIV. A hepatitis virus may include hepatitis A, hepatitis B, or hepatitis C. An influenza virus may include, for example, influenza A or influenza B. An HIV may include HIV 1 or HIV 2. In certain example embodiments, the viral sequence may be a human respiratory syncytial virus, Sudan ebola virus, Bundibugyo virus, Tai Forest ebola virus, Reston ebola virus, Achimota, Aedes flavivirus, Aguacate virus, Akabane virus, Alethinophid reptarenavirus, Allpahuayo mammarenavirus, Amapari mmarenavirus, Andes virus, Apoi virus, Aravan virus, Aroa virus, Arumwot virus, Atlantic salmon paramyxovirus, Australian bat lyssavirus, Avian bornavirus, Avian metapneumovirus, Avian paramyxoviruses, penguin or Falkland Islandsvirus, BK polyomavirus, Bagaza virus, Banna virus, Bat herpesvirus, Bat sapovirus, Bear Canon mammarenavirus, Beilong virus, Betacoronavirus, Betapapillomavirus 1-6, Bhanja virus, Bokeloh bat lyssavirus, Borna disease virus, Bourbon virus, Bovine hepacivirus, Bovine parainfluenza virus 3, Bovine respiratory syncytial virus, Brazoran virus, Bunyamwera virus, Caliciviridae virus. California encephalitis virus, Candiru virus, Canine distemper virus, Canine pneumovirus, Cedar virus, Cell fusing agent virus, Cetacean morbillivirus, Chandipura virus, Chaoyang virus, Chapare mammarenavirus, Chikungunya virus, Colobus monkey papillomavirus, Colorado tick fever virus, Cowpox virus, Crimean-Congo hemorrhagic fever virus, Culex flavivirus, Cupixi mammarenavirus, Dengue virus, Dobrava-Belgrade virus, Donggang virus, Dugbe virus, Duvenhage virus, Eastern equine encephalitis virus, Entebbe bat virus, Enterovirus A-D, European bat lyssavirus 1-2, Eyach virus, Feline morbillivirus, Fer-de-Lance paramyxovirus, Fitzroy River virus, Flaviviridae virus, Flexal mammarenavirus, GB virus C, Gairo virus, Gemycircularvirus, Goose paramyxovirus SF02, Great Island virus, Guanarito mammarenavirus, Hantaan virus, Hantavirus Z10, Heartland virus, Hendra virus, Hepatitis A/B/C/E, Hepatitis delta virus, Human bocavirus, Human coronavirus, Human endogenous retrovirus K, Human enteric coronavirus, Human genital-associated circular DNA virus-1, Human herpesvirus 1-8, Human immunodeficiency virus 1/2, Human mastadenovirus A-G, Human papillomavirus, Human parainfluenza virus 1-4, Human paraechovirus, Human picornavirus, Human smacovirus, Ikoma lyssavirus, Ilheus virus, Influenza A-C, Ippy mammarenavirus, Irkut virus, J-virus, JC polyomavirus, Japanese encephalitis virus, Junin mammarenavirus, KI polyomavirus, Kadipiro virus, Kamiti River virus, Kedougou virus, Khujand virus, Kokobera virus, Kyasanur forest disease virus, Lagos bat virus, Langat virus, Lassa mammarenavirus, Latino mammarenavirus, Leopards Hill virus, Liao ning virus, Ljungan virus, Lloviu virus, Louping ill virus, Lujo mammarenavirus, Luna mammarenavirus, Lunk virus, Lymphocytic choriomeningitis mammarenavirus, Lyssavirus Ozernoe, MSSI2\.225 virus, Machupo mammarenavirus, Mamastrovirus 1, Manzanilla virus, Mapuera virus, Marburg virus, Mayaro virus, Measles virus, Menangle virus, Mercadeo virus, Merkel cell polyomavirus, Middle East respiratory syndrome coronavirus, Mobala mammarenavirus, Modoc virus, Moijang virus, Mokolo virus, Monkeypox virus, Montana myotis leukoenchalitis virus, Mopeia lassa virus reassortant 29, Mopeia mammarenavirus, Morogoro virus, Mossman virus, Mumps virus, Murine pneumonia virus, Murray Valley encephalitis virus, Nariva virus, Newcastle disease virus, Nipah virus, Norwalk virus, Norway rat hepacivirus, Ntaya virus, O'nyong-nyong virus, Oliveros mammarenavirus, Omsk hemorrhagic fever virus, Oropouche virus, Parainfluenza virus 5, Parana mammarenavirus, Parramatta River virus, Peste-des-petits-ruminants virus, Pichande mammarenavirus, Picornaviridae virus, Pirital mammarenavirus, Piscihepevirus A, Porcine parainfluenza virus 1, porcine rubulavirus, Powassan virus, Primate T-lymphotropic virus 1-2, Primate erythroparvovirus 1, Punta Toro virus, Puumala virus, Quang Binh virus, Rabies virus, Razdan virus, Reptile bornavirus 1, Rhinovirus A-B, Rift Valley fever virus, Rinderpest virus, Rio Bravo virus, Rodent Torque Teno virus, Rodent hepacivirus, Ross River virus, Rotavirus A-I, Royal Farm virus, Rubella virus, Sabia mammarenavirus, Salem virus, Sandfly fever Naples virus, Sandfly fever Sicilian virus, Sapporo virus, Sathuperi virus, Seal anellovirus, Semliki Forest virus, Sendai virus, Seoul virus, Sepik virus, Severe acute respiratory syndrome-related coronavirus, Severe fever with thrombocytopenia syndrome virus, Shamonda virus, Shimoni bat virus, Shuni virus, Simbu virus, Simian torque teno virus, Simian virus 40-41, Sin Nombre virus, Sindbis virus, Small anellovirus, Sosuga virus, Spanish goat encephalitis virus, Spondweni virus, St. Louis encephalitis virus, Sunshine virus, TTV-like mini virus, Tacaribe mammarenavirus, Taila virus, Tamana bat virus, Tamiami mammarenavirus, Tembusu virus, Thogoto virus, Thottapalayam virus, Tick-borne encephalitis virus, Tioman virus, Togaviridae virus, Torque teno canis virus, Torque teno douroucouli virus, Torque teno felis virus, Torque teno midi virus, Torque teno sus virus, Torque teno tamarin virus, Torque teno virus, Torque teno zalophus virus, Tuhoko virus, Tula virus, Tupaia paramyxovirus, Usutu virus, Uukuniemi virus, Vaccinia virus, Variola virus, Venezuelan equine encephalitis virus, Vesicular stomatitis Indiana virus, WU Polyomavirus, Wesselsbron virus, West Caucasian bat virus, West Nile virus, Western equine encephalitis virus, Whitewater Arroyo mammarenavirus, Yellow fever virus, Yokose virus, Yug Bogdanovac virus, Zaire ebolavirus, Zika virus, or Zygosaccharomyces bailii virus Z viral sequence. Examples of RNA viruses that may be detected include one or more of (or any combination of) Coronaviridae virus, a Picornaviridae virus, a Caliciviridae virus, a Flaviviridae virus, a Togaviridae virus, a Bornaviridae, a Filoviridae, a Paramyxoviridae, a Pneumoviridae, a Rhabdoviridae, an Arenaviridae, a Bunyaviridae, an Orthomyxoviridae, or a Deltavirus. In certain example embodiments, the virus is Coronavirus, SARS, Poliovirus, Rhinovirus, Hepatitis A, Norwalk virus, Yellow fever virus, West Nile virus, Hepatitis C virus, Dengue fever virus, Zika virus, Rubella virus, Ross River virus, Sindbis virus, Chikungunya virus, Boma disease virus, Ebola virus, Marburg virus, Measles virus, Mumps virus, Nipah virus, Hendra virus, Newcastle disease virus, Human respiratory syncytial virus, Rabies virus, Lassa virus, Hantavirus, Crimean-Congo hemorrhagic fever virus, Influenza, or Hepatitis D virus.

[1211] In certain example embodiments, the virus may be a plant virus selected from the group comprising Tobacco mosaic virus (TMV), Tomato spotted wilt virus (TSWV), Cucumber mosaic virus (CMV), Potato virus Y (PVY), the RT virus Cauliflower mosaic virus (CaMV), Plum pox virus (PPV), Brome mosaic virus (BMV), Potato virus X (PVX), Citrus tristeza virus (CTV), Barley yellow dwarf virus (BYDV), Potato leafroll virus (PLRV), Tomato bushy stunt virus (TBSV), rice tungro spherical virus (RTSV), rice yellow mottle virus (RYMV), rice hoja blanca virus (RHBV), maize rayado fino virus (MRFV), maize dwarf mosaic virus (MDMV), sugarcane mosaic virus (SCMV), Sweet potato feathery mottle virus (SPFMV), sweet potato sunken vein closterovirus (SPSVV), Grapevine fanleaf virus (GFLV), Grapevine virus A (GVA), Grapevine virus B (GVB), Grapevine fleck virus (GFkV), Grapevine leafroll-associated virus-1, -2, and -3, (GLRaV-1, -2, and -3), Arabis mosaic virus (ArMV), or Rupestris stem pitting-associated virus (RSPaV). In a preferred embodiment, the target RNA molecule is part of said pathogen or transcribed from a DNA molecule of said pathogen. For example, the target sequence may be comprised in the genome of an RNA virus. It is further preferred that Fanzor protein hydrolyzes said target RNA molecule of said pathogen in said plant if said pathogen infects or has infected said plant. It is thus preferred that the Fanzor system is capable of cleaving the target RNA molecule from the plant pathogen both when the Fanzor system (or parts needed for its completion) is applied therapeutically, i.e., after infection has occurred or prophylactically, i.e. before infection has occurred.

[1212] In certain example embodiments, the virus may be a retrovirus. Example retroviruses that may be detected using the embodiments disclosed herein include one or more of or any combination of viruses of the Genus Alpharetrovirus, Betaretrovirus, Gammaretrovirus, Deltaretrovirus, Epsilonretrovirus, Lentivirus, Spumavirus, or the Family Metaviridae, Pseudoviridae, and Retroviridae (including HIV), Hepadnaviridae (including Hepatitis B virus), and Caulimoviridae (including Cauliflower mosaic virus).

[1213] In certain example embodiments, the virus is a DNA virus. Example DNA viruses that may be detected using the embodiments disclosed herein include one or more of (or any combination of) viruses from the Family Myoviridae, Podoviridae, Siphoviridae, Alloherpesviridae, Herpesviridae (including human herpes virus, and Varicella Zozter virus), Malocoherpesviridae, Lipothrixviridae, Rudiviridae, Adenoviridae, Ampullaviridae, Ascoviridae, Asfarviridae (including African swine fever virus), Baculoviridae, Cicaudaviridae, Clavaviridae, Corticoviridae, Fuselloviridae, Globuloviridae, Guttaviridae, Hytrosaviridae, Iridoviridae, Maseilleviridae, Mimiviridae, Nudiviridae, Nimaviridae, Pandoraviridae, Papillomaviridae, Phycodnaviridae, Plasmaviridae, Polydnaviruses, Polyomaviridae (including Simian virus 40, JC virus, BK virus), Poxviridae (including Cowpox and smallpox), Sphaerolipoviridae, Tectiviridae, Turriviridae, Dinodnavirus, Salterprovirus, Rhizidovirus, among others. In one embodiment, a method of diagnosing a species-specific bacterial infection in a subject suspected of having a bacterial infection is described as obtaining a sample comprising bacterial ribosomal ribonucleic acid from the subject; contacting the sample with one or more of the probes described, and detecting hybridization between the bacterial ribosomal ribonucleic acid sequence present in the sample and the probe, wherein the detection of hybridization indicates that the subject is infected with Escherichia coli, Klebsiella pneumoniae, Pseudomonas aeruginosa, Staphylococcus aureus, Acinetobacter baumannii, Candida albicans, Enterobacter cloacae, Enterococcus faecalis, Enterococcus faecium, Proteus mirabilis, Staphylococcus agalactiae, or Staphylococcus maltophilia or a combination thereof.

### Coronavirus

[1214] Systems and methods of the presently disclosed invention are designed to detect coronavirus, in an aspect, the target sequence is the 2019-nCoV, also referred to herein as SARS-CoV-2, which causes COVID-19. The coronavirus is a positive-sense single stranded RNA family of viruses, infecting a variety of animals and humans. SARS-CoV is one type of coronavirus infection, as well as MERS-CoV. Detection of one or more coronaviruses are envisioned, including the SARS-CoV-2 detected in Wuhan City. Sequences of the sARS-CoV-2 are available at GISAID accession no. EPI_ISL_402124 and EPI_ISL_402127-402130, and described in DOI: 10.1101/2020.01.22.914952. Further deposits of the SARS-CoV2 are deposited in the GISAID platform include EP_ISL_402119-402121 and EP_ISL 402123-402124; see also GenBank Accession No. MN908947.3. In an aspect, one may use known SARS and SARS-related coronaviruses or other viruses from one or more hosts to generate a non-redundant alignment. Related viruses can be found, for example in bats.

[1215] In one embodiment, the systems are designed to comprise at least one highly active nucleic acid component polynucleotide which is designed according to the methods disclosed herein. In a preferred embodiment, the nucleic acid component polynucleotide binds to at least one target sequence that is a unique coronavirus genomic sequence, thereby identifying the presence of coronavirus to the exclusion of other viruses. The systems and methods can be designed to detect a plurality of respiratory infections or viral infections, including coronavirus.

[1216] In an aspect the at least one nucleic acid component polynucleotide binds to a coronavirus sequence encoding a polypeptide that is immunostimulatory to a host immune system. Immunostiumulatory polypeptides have the ability to enhance, stimulate, or increase response of the immune system, typically by inducing the activation or activity of a components of the immune system (e.g., an immune cell). In embodiments, the immunostimulatory polypeptide contributes to immune-mediated disease in the host. In an aspect, the host is a mammal, for example, a human, a bat, or a pangolin, that may be infected by a coronavirus. Cyranoski, D. Did pangolins spread the China coronavirus to people? Nature, 7 Feb. 2020. In one embodiment, the nucleic acid component polynucleotide can be designed to detect SARS-CoV-2 or a variant thereof in meat, live animals and humans so that testing can be performed, for example at markets and other public places where sources of contamination can arise.

[1217] Gene targets may comprise ORF1ab, N protein, RNA-dependent RNA polymerase (RdRP), E protein, ORF1b-nsp14, Spike glycoprotein (S), or pancorona targets. Molecular assays have been under development and can be used as a starting point to develop nucleic acid component molecules for the methods and systems described herein. See, “Diagnostic detection of 2019-nCoV by real-time RT-PCR” Charité, Berlin Germany (17 Jan. 2020)’ Detection of 2019 novel coronavirus (2019-nCoV) in suspected human cases by RT-PCR-Hong Kong University (23 Jan. 2020); PCR and sequencing protocol for 2019-nCoV-Department of Medical Sciences, Ministry of Public Health, Thailand (updated 28 Jan. 2020); PCR and sequencing protocols for 2019-nCoV—National Institute of Infectious Diseases Japan (24 Jan. 2020); US CDC panel primer and probes—U.S. CDC, USAV—U.S. CDC, USA (28 Jan. 2020); China CDC Primers and probes for detection 2019-nCoV (24 Jan. 2020), incorporated in their entirety by reference. Further, the nucleic acid component molecule design may exploit differences or similarities with SARS-CoV. Researchers have recently identified simialrities and fifrferences between 2019-nCoV and SARS-CoV. “Coronavirus Genome Annotation Reveals Amino Acid Differences with Other SARS Viruses,” genomeweb, Feb. 10, 2020. For example, nucleic acid component molecules based on the 8a protein, which was present in SARS-CoV but absent in SARS-CoV-2, can be utilized to differentiate between the viruses. Similarly, the 8b and 3b proteins have different lengths in SARS-CoV and sARS-CoV-2 and can be utilized to design nucleic acid component molecules to detect non-overlapping proteins of nucleotides encoding in the two viruses. Wu et al., Genome Composition and Divergence of the Novel Coronavirus (2019-nCoV) Originating in China, Cell Host & Microbe (2020), DOI: 10.1016/j.chom.2020.02.001, incorporated herein by reference, including all supplemental information, in particular Table S1. Mutations may also be detected, with nucleic acid component and/or primers designed specifically to detect, for example, changes in the SARS-CoV-2 virus. In an embodiment, the nucleic acid component or primer can be designed to detect the D614G mutation in the SARS-CoV-2 spike protein. See, Korber et al., Cell 182, 812-827 (2020); doi: 10.1016/j.cell.2020.06.043. Other mutations in the spike protein can be designed utilizing the COVID-19 viral genome analysis pipeline available at cov.lanl.gov. Further resources to design primers and nucleic acid components to detect coronavirus or coronavirus mutations can be found at Starr, et al, “Deep Mutational Scanning of SARS-CoV-2 Receptor Binding Domain Reveals Constraints in Folding and ACE2 Binding,” Cell, 182, 1-16 (2020); doi: 10.1016/j.cell.2020.08.012.

[1218] The systems and methods of detection can be used to identify single nucleotide variants, detection based on rRNA sequences, screening for drug resistance, monitoring microbe outbreaks, genetic perturbations, and screening of environmental samples, as described in PCT/US2018/054472 filed Oct. 22, 2018 at [0183]-[0327], incorporated herein by reference.

[1219] In certain example embodiments, the systems, devices, and methods disclosed herein may be used for biomarker detection. For example, the systems, devices and method disclosed herein may be used for SNP detection and/or genotyping. The systems, devices and methods disclosed herein may be also used for the detection of any disease state or disorder characterized by aberrant gene expression. Aberrant gene expression includes aberration in the gene expressed, location of expression and level of expression. Multiple transcripts or protein markers related to cardiovascular, immune disorders, and cancer among other diseases may be detected. In certain example embodiments, the embodiments disclosed herein may be used for cell free DNA detection of diseases that involve lysis. In certain example embodiments, the embodiments could be utilized for faster and more portable detection for pre-natal testing of cell-free DNA. The embodiments disclosed herein may be used for screening panels of different SNPs associated with, among others, different coronaviruses, evolving SARS-CoV2, and other related respiratory viral infections. As described herein elsewhere, closely related genotypes/alleles or biomarkers (e.g. having only a single nucleotide difference in a given target sequence) may be distinguished by introduction of a synthetic mismatch in the nucleic acid component molecule.

[1220] In an aspect, the invention relates to a method for detecting target nucleic acids in samples, comprising: distributing a sample or set of samples into one or more individual discrete volumes, the individual discrete volumes comprising a Fanzor system according to the invention as described herein; incubating the sample or set of samples under conditions sufficient to allow binding of the one or more nucleic acid component molecules to one or more target molecules; activating the Fanzor protein via binding of the one or more nucleic acid component molecules to the one or more target molecules, wherein activating the Fanzor protein results in modification of the RNA-based masking construct such that a detectable positive signal is generated; and detecting the detectable positive signal, wherein detection of the detectable positive signal indicates a presence of one or more target molecules in the sample.

[1221] The sensitivity of the assays described herein are well suited for detection of target nucleic acids in a wide variety of biological sample types, including sample types in which the target nucleic acid is dilute or for which sample material is limited. Methods for field deployable and rapid diagnostic assays can be optimized for the type of sample material utilized and can be adapted from approaches used for other assays known in the art. See, e.g., Myhrvold et al., 2018. Biomarker screening may be carried out on a number of sample types including, but not limited to, saliva, urine, blood, feces, sputum, and cerebrospinal fluid. The embodiments disclosed herein may also be used to detect up- and/or down-regulation of genes. For example, a sample may be serially diluted such that only over-expressed genes remain above the detection limit threshold of the assay.

[1222] In one embodiment, the present invention provides steps of obtaining a sample of biological fluid (e.g., urine, blood plasma or serum, sputum, cerebral spinal fluid), and extracting the DNA or RNA. The mutant nucleotide sequence to be detected, may be a fraction of a larger molecule or can be present initially as a discrete molecule.

[1223] In embodiments, DNA is isolated from plasma/serum of a cancer patient. For comparison, DNA samples isolated from neoplastic tissue and a second sample may be isolated from non-neoplastic tissue from the same patient (control), for example, lymphocytes. The non-neoplastic tissue can be of the same type as the neoplastic tissue or from a different organ source. In one embodiment, blood samples are collected, and plasma immediately separated from the blood cells by centrifugation. Serum may be filtered and stored frozen until DNA/RNA extraction.

[1224] In an aspect, sample preparation can comprise methods as disclosed herein to circumvent other RNA extraction methods and can be used with standard amplification techniques such as RT-PCR as well as the Fanzor detection methods disclosed herein. In an aspect, the method may comprise a one-step extraction-free RNA preparation method that can be used with samples tested for coronavirus, which may be, in an aspect, a RT-qPCR testing method, a lateral flow detection method or other Fanzor detection method disclosed herein. Advantageously, the RNA extraction method can be utilized directly with other testing protocols. In an aspect, the method comprises use of a nasopharyngeal swab, nasal saline lavage, or other nasal sample (e.g., anterior nasal swab) with Quick Extract™ DNA Extraction Solution (QE09050), Lucigen, or QuickExtract Plant DNA Extraction Solution, Lucigen. In an aspect, the sample is diluted 2:1, 1:1 or 1:2 sample:DNA extraction solution. The sample:extraction mix is incubated at about 90° C. to about 98° C., preferably about 95° C. In another aspect, incubation is performed at between about 20° C. to about 90° C., about 22, 23, 24, 25, 26, 27, 28, 29, 30, 31, 32, 33, 34, 35, 36, 37, 38, 39, 40, 41, 42, 43, 44, 45, 46, 47, 48, 49, 50, 51, 52, 53, 54, 55, 56, 57, 58, 59, 60, 61, 62, 63, 64, 65, 66, 67, 68, 69, 70, 71, 72, 73, 74, 75, 76, 77, 78, 79, 80, 81, 82, 83, 84, 85 86, 87, 88, 89 or 90° C. The incubation period can be about 2, 3, 4, 5, 6, 7, 8, 9, 10, 11, 12, 13, 14, 15, 16, 17, 18, 19, 20, 21, 22, 23, 24, 25, 26, 27, 28, 29, or 30 minutes, preferably about 4 to 6 minutes, or about 5 minutes. Incubation time and temperature may vary depending on sample size and quality, and incubation time may increase if using lower temperature. Current CDC Real-Time RT-PCR Diagnostic Panel are as described at fda.gov/media/134922/download, “CDC 2019-Novel Coronavierus (2019-nCoV) Real-Time RT-PCR Diagnostic Panel.” In one embodiment, the DNA extraction solution can remain with the sample subsequent to incubation and be utilized in the next steps fo detection methods. In an aspect, the detection method is an RT-qPCR reaction, and the extraction solution is kept at a concentration of less than 10%, 9%, 8%, 7%, 6%, 5%, 4%, 3% of the reaction mixture, where the reaction mixture comprises the detection reaction reagents, sample and extraction solution.

[1225] In one embodiment, a bead is utilized with particular embodiments of the invention and may be included with the extraction solution. The bead may be used to capture, concentrate or otherwise enrich for particular material. The bead may be magnetic, and may be provided to capture nucleic acid material. In another aspect, the bead is a silica bead. Beads may be utilized in an extraction step of the methods disclosed herein. Beads can be optionally used with the methods described herein, including with the one-pot methods that allow for concentration of viral nucleic acids from large volume samples, such as saliva or swab samples to allow for a single one-pot reaction method. Concentration of desired target molecules can be increased by about 10-fold, 50-fold, 100-fold, 200-fold, 500-fold, 800-fold, 1000-fold, 1500-fold, 2000-fold, 2500-fold, 3000-fold, or more.

[1226] Magnetic beads in a PEG and salt solution are preferred in an aspect, and in embodiments bind to viral RNA and/or DNA which allows for concentration and lysis concurrently. Silica beads can be used in another aspect. Capture moieties such as oligonucleotide functionalized beads are envisioned for use. The beads may be using with the extraction reagents, allowed to incubate with a sample and the lysis/extraction buffer, thereby concentrating target molecules on the beads. Extraction can be performed as described elsewhere herein, at 22° C.-60° C., with subsequent isothermal amplification and/or Fanzor detection performed under conditions as described elsewhere herein. When used with a cartridge device detailed elsewhere herein, a magnet can be activated and the beads collected, with optional flushing of the extraction buffer and one or more washes performed. Advantageously, the beads can be used in the one-pot methods and systems without additional washings of the beads, allowing for a more efficient process without increased risks of contamination in multi-step processes. Beads can be utilized with the isothermal amplifications detailed herein, and the beads can flow into an amplification chamber of the cartridge or be maintained in the pot for the amplification step. Upon heating, nucleic acid can be released off the beads.

[1227] In certain example embodiments, target nucleic acids are detected directly from a crude or unprocessed sample, such as blood, serum, saliva, cebrospinal fluid, sputum, or urine. In certain example embodiments, the target nucleic acid is cell free DNA.

### Detection Devices

[1228] The systems, compositions, and/or components thereof described herein can be embodied on detection or diagnostic devices. A number of substrates and configurations may be used. The devices may be capable of defining multiple individual discrete volumes within the device. As used herein an “individual discrete volume” refers to a discrete space, such as a container, receptacle, or other defined volume or space that can be defined by properties that prevent and/or inhibit migration of target molecules, for example a volume or space defined by physical properties such as walls, for example the walls of a well, tube, or a surface of a droplet, which may be impermeable or semipermeable, or as defined by other means such as chemical, diffusion rate limited, electro-magnetic, or light illumination, or any combination thereof that can contain a a sample within a defined space. Individual discrete volumes may be identified by molecular tags, such as nucleic acid barcodes. By “diffusion rate limited” (for example diffusion defined volumes) is meant spaces that are only accessible to certain molecules or reactions because diffusion constraints effectively defining a space or volume as would be the case for two parallel laminar streams where diffusion will limit the migration of a target molecule from one stream to the other. By “chemical” defined volume or space is meant spaces where only certain target molecules can exist because of their chemical or molecular properties, such as size, where for example gel beads may exclude certain species from entering the beads but not others, such as by surface charge, matrix size or other physical property of the bead that can allow selection of species that may enter the interior of the bead. By “electro-magnetically” defined volume or space is meant spaces where the electro-magnetic properties of the target molecules or their supports such as charge or magnetic properties can be used to define certain regions in a space such as capturing magnetic particles within a magnetic field or directly on magnets. By “optically” defined volume is meant any region of space that may be defined by illuminating it with visible, ultraviolet, infrared, or other wavelengths of light such that only target molecules within the defined space or volume may be labeled. One advantage to the use of non-walled, or semipermeable discrete volumes is that some reagents, such as buffers, chemical activators, or other agents may be passed through the discrete volume, while other materials, such as target molecules, may be maintained in the discrete volume or space. Typically, a discrete volume will include a fluid medium, (for example, an aqueous solution, an oil, a buffer, and/or a media capable of supporting cell growth) suitable for labeling of the target molecule with the indexable nucleic acid identifier under conditions that permit labeling. Exemplary discrete volumes or spaces useful in the disclosed methods include droplets (for example, microfluidic droplets and/or emulsion droplets), hydrogel beads or other polymer structures (for example poly-ethylene glycol di-acrylate beads or agarose beads), tissue slides (for example, fixed formalin paraffin embedded tissue slides with particular regions, volumes, or spaces defined by chemical, optical, or physical means), microscope slides with regions defined by depositing reagents in ordered arrays or random patterns, tubes (such as, centrifuge tubes, microcentrifuge tubes, test tubes, cuvettes, conical tubes, and the like), bottles (such as glass bottles, plastic bottles, ceramic bottles, Erlenmeyer flasks, scintillation vials and the like), wells (such as wells in a plate), plates, pipettes, or pipette tips among others. In certain embodiments, the compartment is an aqueous droplet in a water-in-oil emulsion. In specific embodiments, any of the applications, methods, or systems described herein requiring exact or uniform volumes may employ the use of an acoustic liquid dispenser.

[1229] In some embodiments, the individual discrete volumes may be droplets.

[1230] In certain example embodiments, the device comprises a flexible material substrate on which a number of spots may be defined. Flexible substrate materials suitable for use in diagnostics and biosensing are known within the art. The flexible substrate materials may be made of plant derived fibers, such as cellulosic fibers, or may be made from flexible polymers such as flexible polyester films and other polymer types. Within each defined spot, reagents of the system described herein are applied to the individual spots. Each spot may contain the same reagents except for a different guide RNA or set of guide RNAs, or where applicable, a different detection aptamer to screen for multiple targets at once. Thus, the systems and devices herein may be able to screen samples from multiple sources (e.g., multiple clinical samples from different individuals) for the presence of the same target, or a limited number of targets, or aliquots of a single sample (or multiple samples from the same source) for the presence of multiple different targets in the sample. In certain example embodiments, the elements of the systems described herein are freeze dried onto the paper or cloth substrate. Example flexible material based substrates that may be used in certain example devices are disclosed in Pardee et al. Cell. 2016, 165(5):1255-66 and Pardee et al. Cell. 2014, 159(4):950-54. Suitable flexible material-based substrates for use with biological fluids, including blood are disclosed in International Patent Application Publication No. WO/2013/071301 entitled “Paper based diagnostic test” to Shevkoplyas et al. U.S. Patent Application Publication No. 2011/0111517 entitled “Paper-based microfluidic systems” to Siegel et al. and Shafiee et al. “Paper and Flexible Substrates as Materials for Biosensing Platforms to Detect Multiple Biotargets” Scientific Reports 5:8719 (2015). Further flexible based materials, including those suitable for use in wearable diagnostic devices are disclosed in Wang et al. “Flexible Substrate-Based Devices for Point-of-Care Diagnostics” Cell 34(11):909-21 (2016). Further flexible based materials may include nitrocellulose, polycarbonate, methylethyl cellulose, polyvinylidene fluoride (PVDF), polystyrene, or glass (see e.g., US20120238008). In certain embodiments, discrete volumes are separated by a hydrophobic surface, such as but not limited to wax, photoresist, or solid ink.

[1231] In some embodiments, a dosimeter or badge may be provided that serves as a sensor or indicator such that the wearer is notified of exposure to certain microbes or other agents. For example, the systems described herein may be used to detect a particular pathogen. Likewise, aptamer based embodiments disclosed above may be used to detect both polypeptide as well as other agents, such as chemical agents, to which a specific aptamer may bind. Such a device may be useful for surveillance of soldiers or other military personnel, as well as clinicians, researchers, hospital staff, and the like, in order to provide information relating to exposure to potentially dangerous agents as quickly as possible, for example for biological or chemical warfare agent detection. In other embodiments, such a surveillance badge may be used for preventing exposure to dangerous microbes or pathogens in immunocompromised patients, burn patients, patients undergoing chemotherapy, children, or elderly individuals.

[1232] In specific embodiments, each individual discrete volume further comprises one or more detection aptamers comprising a masked RNA polymerase promoter binding site or a masked primer binding site. As such, each individual discrete volume may further comprise nucleic acid amplification reagents.

[1233] In specific embodiments, the target molecule may be a target DNA and the individual discrete volumes further comprise a primer that binds the target DNA and comprises an RNA polymerase promoter.

[1234] Samples sources that may be analyzed using the systems and devices described herein include biological samples of a subject or environmental samples. Environmental samples may include surfaces or fluids. The biological samples may include, but are not limited to, saliva, blood, plasma, sera, stool, urine, sputum, mucous, lymph, synovial fluid, spinal fluid, cerebrospinal fluid, a swab from skin or a mucosal membrane, or combination thereof. In an example embodiment, the environmental sample is taken from a solid surface, such as a surface used in the preparation of food or other sensitive compositions and materials.

[1235] In other example embodiments, the elements of the systems described herein may be place on a single use substrate, such as swab or cloth that is used to swab a surface or sample fluid. For example, the system could be used to test for the presence of a pathogen on a food by swabbing the surface of a food product, such as a fruit or vegetable. Similarly, the single use substrate may be used to swab other surfaces for detection of certain microbes or agents, such as for use in security screening. Single use substrates may also have applications in forensics, where the CRISPR systems are designed to detect, for example identifying DNA SNPs that may be used to identify a suspect, or certain tissue or cell markers to determine the type of biological matter present in a sample. Likewise, the single use substrate could be used to collect a sample from a patient—such as a saliva sample from the mouth—or a swab of the skin. In other embodiments, a sample or swab may be taken of a meat product on order to detect the presence of absence of contaminants on or within the meat product.

[1236] Near-real-time microbial diagnostics are needed for food, clinical, industrial, and other environmental settings (see e.g., Lu T K, Bowers J, and Koeris M S., Trends Biotechnol. 2013 June; 31(6):325-7). In certain embodiments, the present invention is used for rapid detection of foodborne pathogens using guide RNAs specific to a pathogen (e.g., Campylobacter jejuni, Clostridium perfringens, Salmonella spp., Escherichia coli, Bacillus cereus, Listeria monocytogenes, Shigella spp., Staphylococcus aureus, Staphylococcal enteritis, Streptococcus, Vibrio cholerae, Vibrio parahaemolyticus, Vibrio vulnificus, Yersinia enterocolitica and Yersinia pseudotuberculosis, Brucella spp., Corynebacterium ulcerans, Coxiella burnetii, or Plesiomonas shigelloides).

[1237] In certain embodiments, the device is or comprises a flow strip. For instance, a lateral flow strip allows for detection by color. The reporter is modified to have a first molecule (such as for instance FITC) attached to the 5′ end and a second molecule (such as for instance biotin) attached to the 3′ end (or vice versa). The lateral flow strip is designed to have two capture lines with anti-first molecule (e.g., anti-FITC) antibodies hybridized at the first line and anti-second molecule (e.g. anti-biotin) antibodies at the second downstream line. As the reaction flows down the strip, uncleaved reporter will bind to anti-first molecule antibodies at the first capture line, while cleaved reporters will liberate the second molecule and allow second molecule binding at the second capture line. Second molecule sandwich antibodies, for instance conjugated to nanoparticles, such as gold nanoparticles, will bind any second molecule at the first or second line and result in a strong readout/signal (e.g., color). As more reporter is cleaved, more signal will accumulate at the second capture line and less signal will appear at the first line. In certain aspects, the invention relates to the use of a follow strip as described herein for detecting nucleic acids or polypeptides. In certain aspects, the invention relates to a method for detecting nucleic acids or polypeptides with a flow strip as defined herein, e.g., (lateral) flow tests or (lateral) flow immunochromatographic assays.

[1238] The embodiments disclosed herein are directed to lateral flow detection devices that comprise Fanzor systems. The device may comprise a lateral flow substrate for detecting a Fanzor collateral reaction. Substrates suitable for use in lateral flow assays are known in the art. These may include but are not necessarily limited to membranes or pads made of cellulose and/or glass fiber, polyesters, nitrocellulose, or absorbent pads (J Saudi Chem Soc 19(6):689-705; 2015). The Fanzor system, i.e., one or more Fanzor systems and corresponding reporter constructs are added to the lateral flow substrate at a defined reagent portion of the lateral flow substrate, typically on one end of the lateral flow substrate. Reporting constructs used within the context of the present invention comprise a first molecule and a second molecule linked by a DNA linker. The lateral flow substrate further comprises a sample portion. The sample portion may be equivalent to, continuous with, or adjacent to the reagent portion. The lateral flow strip further comprises a first capture line, typically a horizontal line running across the device, but other configurations are possible. The first capture region is proximate to and on the same end of the lateral flow substrate as the sample loading portion. A first binding agent that specifically binds the first molecule of the reporter construct is fixed or otherwise immobilized to the fist capture region. The second capture region is located towards the opposite end of the lateral flow substrate from the first binding region. A second binding agent is fixed or otherwise immobilized at the second capture region. The second binding agent specifically binds the second molecule of the reporter construct, or the second binding agent may bind a detectable ligand. For example, the detectable ligand may be a particle, such as a colloidal particle, that when it aggregates can be detected visually. The particle may be modified with an antibody that specifically binds the second molecule on the reporter construct. If the reporter construct is not cleaved, it will facilitate accumulation of the detectable ligand at the first binding region. If the reporter construct is cleaved the detectable ligand is released to flow to the second binding region. In such an embodiment, the second binding agent is an agent capable of specifically or non-specifically binding the detectable ligand on the antibody on the detectable ligand. Examples of suitable binding agents for such an embodiment include, but are not limited to, protein A and protein G.

[1239] Lateral support substrates may be located within a housing (see for example, “Rapid Lateral Flow Test Strips” Merck Millipore 2013). The housing may comprise at least one opening for loading samples and a second single opening or separate openings that allow for reading of detectable signal generated at the first and second capture regions.

[1240] The Fanzor system may be freeze-dried to the lateral flow substrate and packaged as a ready to use device, or the Fanzor system may be added to the reagent portion of the lateral flow substrate at the time of using the device. Samples to be screened are loaded at the sample loading portion of the lateral flow substrate. The samples must be liquid samples or samples dissolved in an appropriate solvent, usually aqueous. The liquid sample reconstitutes the Fanzor reagents such that a Fanzor reaction can occur. The liquid sample begins to flow from the sample portion of the substrate towards the first and second capture regions. Intact reporter construct is bound at the first capture region by binding between the first binding agent and the first molecule. Likewise, the detection agent will begin to collect at the first binding region by binding to the second molecule on the intact reporter construct. If target molecule(s) are present in the sample, the Fanzor collateral effect is activated. As activated Fanzor comes into contact with the bound reporter construct, the reporter constructs are cleaved, releasing the second molecule to flow further down the lateral flow substrate towards the second binding region. The released second molecule is then captured at the second capture region by binding to the second binding agent, where additional detection agent may also accumulate by binding to the second molecule. Accordingly, if the target molecule(s) is not present in the sample, a detectable signal will appear at the first capture region, and if the target molecule(s) is present in the sample, a detectable signal will appear at the location of the second capture region.

[1241] Specific binding-integrating molecules comprise any members of binding pairs that can be used in the present invention. Such binding pairs are known to those skilled in the art and include, but are not limited to, antibody-antigen pairs, enzyme-substrate pairs, receptor-ligand pairs, and streptavidin-biotin. In addition to such known binding pairs, novel binding pairs may be specifically designed. A characteristic of binding pairs is the binding between the two members of the binding pair.

[1242] Oligonucleotide Linkers having molecules on either end may comprise DNA if the Fanzor has DNA collateral activity. Oligonucleotide linkers may be single stranded or double stranded, and in certain embodiments, they could contain both RNA and DNA regions. Oligonucleotide linkers may be of varying lengths, such as 5-10 nucleotides, 10-20 nucleotides, 20-50 nucleotides, or more.

[1243] In some embodiments, the polypeptide identifier elements include affinity tags, such as hemagglutinin (HA) tags, Myc tags, FLAG tags, V5 tags, chitin binding protein (CBP) tags, maltose-binding protein (MBP) tags, GST tags, poly-His tags, and fluorescent proteins (for example, green fluorescent protein (GFP), yellow fluorescent protein (YFP), cyan fluorescent protein (CFP), dsRed, mCherry, Kaede, Kindling, and derivatives thereof, FLAG tags, Myc tags, AU1 tags, T7 tags, OLLAS tags, Glu-Glu tags, VSV tags, or a combination thereof. Other Affinity tags are well known in the art. Such labels can be detected and/or isolated using methods known in the art (for example, by using specific binding agents, such as antibodies, that recognize a particular affinity tag). Such specific binding agents (for example, antibodies) can further contain, for example, detectable labels, such as isotope labels and/or nucleic acid barcodes such as those described herein.

[1244] In certain example embodiments, a lateral flow device comprises a lateral flow substrate comprising a first end for application of a sample. The first region is loaded with a detectable ligand, such as those disclosed herein, for example a gold nanoparticle. The gold nanoparticle may be modified with a first antibody, such as an anti-FITC antibody. The first region also comprises a detection construct. In one example embodiment, a DNA detection construct and a Fanzor system as disclosed herein. In one example embodiment, and for purposes of further illustration, the DNA construct may comprise a FAM molecule on a first end of the detection construction and a biotin on a second end of the detection construct. Upstream of the flow of solution from the first end of the lateral flow substrate is a first test band. The test band may comprise a biotin ligand. Accordingly, when the DNA detection construct is present it its initial state, i.e. in the absence of target, the FAM molecule on the first end will bind the anti-FITC antibody on the gold nanoparticle, and the biotin on the second end of the DNA construct will bind the biotin ligand allowing for the detectable ligand to accumulate at the first test, generating a detectable signal. Generation of a detectable signal at the first band indicate the absence of the target ligand. In the presence of target, the Fanzor complex forms and the Fanzor is activated resulting in cleavage of the DNA detection construct. In the absence of intact DNA detection construct the colloidal gold will flow past the second strip. The lateral flow device may comprise a second band, upstream of the first band. The second band may comprise a molecule capable of binding the antibody-labeled colloidal gold molecule, for example an anti-rabbit antibody capable of binding a rabbit anti-FTIC antibody on the colloidal gold. Therefore, in the presence of one or more targets, the detectable ligand will accumulate at the second band, indicating the presence of the one or more targets in the sample.

[1245] In certain example embodiments, the device is a microfluidic device that generates and/or merges different droplets (i.e., individual discrete volumes). For example, a first set of droplets may be formed containing samples to be screened and a second set of droplets formed containing the elements of the systems described herein. The first and second set of droplets are then merged, and then diagnostic methods as described herein are carried out on the merged droplet set. Microfluidic devices disclosed herein may be silicone-based chips and may be fabricated using a variety of techniques, including, but not limited to, hot embossing, molding of elastomers, injection molding, LIGA, soft lithography, silicon fabrication and related thin film processing techniques. Suitable materials for fabricating the microfluidic devices include, but are not limited to, cyclic olefin copolymer (COC), polycarbonate, poly(dimethylsiloxane) (PDMS), and poly(methylacrylate) (PMMA). In one embodiment, soft lithography in PDMS may be used to prepare the microfluidic devices. For example, a mold may be made using photolithography which defines the location of flow channels, valves, and filters within a substrate. The substrate material is poured into a mold and allowed to set to create a stamp. The stamp is then sealed to a solid support, such as but not limited to, glass. Due to the hydrophobic nature of some polymers, such as PDMS, which absorbs some proteins and may inhibit certain biological processes, a passivating agent may be necessary (Schoffner et al. Nucleic Acids Research, 1996, 24:375-379). Suitable passivating agents are known in the art and include, but are not limited to, silanes, parylene, n-Dodecyl-b-D-matoside (DDM), pluronic, Tween-20, other similar surfactants, polyethylene glycol (PEG), albumin, collagen, and other similar proteins and peptides.

[1246] In certain example embodiments, the system and/or device may be adapted for conversion to a flow-cytometry readout in or allow to all of sensitive and quantitative measurements of millions of cells in a single experiment and improve upon existing flow-based methods, such as the PrimeFlow assay. In certain example embodiments, cells may be cast in droplets containing unpolymerized gel monomer, which can then be cast into single-cell droplets suitable for analysis by flow cytometry. A detection construct comprising a fluorescent detectable label may be cast into the droplet comprising unpolymerized gel monomer. Upon polymerization of the gel monomer to form a bead within a droplet. Because gel polymerization is through free-radical formation, the fluorescent reporter becomes covalently bound to the gel. The detection construct may be further modified to comprise a linker, such as an amine. A quencher may be added post-gel formation and will bind via the linker to the reporter construct. Thus, the quencher is not bound to the gel and is free to diffuse away when the reporter is cleaved by the Fanzor. Amplification of signal in droplet may be achieved by coupling the detection construct to a hybridization chain reaction (HCR initiator) amplification. DNA/RNA hybrid hairpins may be incorporated into the gel which may comprise a hairpin loop that has a RNase sensitive domain. By protecting a strand displacement toehold within a hairpin loop that has a RNase sensitive domain, HCR initiators may be selectively deprotected following cleavage of the hairpin loop by the Fanzor system. Following deprotection of HCR initiators via toehold mediated strand displacement, fluorescent HCR monomers may be washed into the gel to enable signal amplification where the initiators are deprotected.

[1247] An example of microfluidic device that may be used in the context of the invention is described in Hour et al. “Direct Detection and drug-resistance profiling of bacteremias using inertial microfluidics” Lap Chip. 15(10):2297-2307 (2016).

[1248] In systems described herein, may further be incorporated into wearable medical devices that assess biological samples, such as biological fluids, of a subject outside the clinic setting and report the outcome of the assay remotely to a central server accessible by a medical care professional. The device may include the ability to self-sample blood, such as the devices disclosed in U.S. Patent Application Publication No. 2015/0342509 entitled “Needle-free Blood Draw to Peeters et al., U.S. Patent Application Publication No. 2015/0065821 entitled “Nanoparticle Phoresis” to Andrew Conrad.

[1249] In some embodiments, the individual discrete volumes are microwells.

[1250] In certain example embodiments, the device may comprise individual wells, such as microplate wells. The size of the microplate wells may be the size of standard 6, 24, 96, 384, 1536, 3456, or 9600 sized wells. In certain example embodiments, the elements of the systems described herein may be freeze dried and applied to the surface of the well prior to distribution and use.

[1251] The devices disclosed herein may further comprise inlet and outlet ports, or openings, which in turn may be connected to valves, tubes, channels, chambers, and syringes and/or pumps for the introduction and extraction of fluids into and from the device. The devices may be connected to fluid flow actuators that allow directional movement of fluids within the microfluidic device. Example actuators include, but are not limited to, syringe pumps, mechanically actuated recirculating pumps, electroosmotic pumps, bulbs, bellows, diaphragms, or bubbles intended to force movement of fluids. In certain example embodiments, the devices are connected to controllers with programmable valves that work together to move fluids through the device. In certain example embodiments, the devices are connected to the controllers discussed in further detail below. The devices may be connected to flow actuators, controllers, and sample loading devices by tubing that terminates in metal pins for insertion into inlet ports on the device.

[1252] As shown herein the elements of the system are stable when freeze dried, therefore embodiments that do not require a supporting device are also contemplated, i.e., the system may be applied to any surface or fluid that will support the reactions disclosed herein and allow for detection of a positive detectable signal from that surface or solution. In addition to freeze-drying, the systems may also be stably stored and utilized in a pelletized form. Polymers useful in forming suitable pelletized forms are known in the art.

[1253] In some embodiments, the individual discrete volumes are defined on a solid substrate. In some embodiments, the individual discrete volumes are spots defined on a substrate. In some embodiments, the substrate may be a flexible materials substrate, for example, including, but not limited to, a paper substrate, a fabric substrate, or a flexible polymer-based substrate. In specific embodiments, the flexible materials substrate is a paper substrate or a flexible polymer based substrate.

[1254] In certain embodiments, the Fanzor is bound to each discrete volume in the device. Each discrete volume may comprise a different ωRNA specific for a different target molecule. In certain embodiments, a sample is exposed to a solid substrate comprising more than one discrete volume each comprising a ωRNA specific for a target molecule. Not being bound by a theory, each ωRNA will capture its target molecule from the sample and the sample does not need to be divided into separate assays. Thus, a valuable sample may be preserved. The effector protein may be a fusion protein comprising an affinity tag. Affinity tags are well known in the art (e.g., HA tag, Myc tag, Flag tag, His tag, biotin). The effector protein may be linked to a biotin molecule and the discrete volumes may comprise streptavidin. In other embodiments, the CRISPR effector protein is bound by an antibody specific for the effector protein. Methods of binding a CRISPR enzyme has been described previously (see, e.g., US20140356867A1).

[1255] The devices disclosed herein may also include elements of point of care (POC) devices known in the art for analyzing samples by other methods. See, for example St John and Price, “Existing and Emerging Technologies for Point-of-Care Testing” (Clin Biochem Rev. 2014 August; 35(3): 155-167).

[1256] The present invention may be used with a wireless lab-on-chip (LOC) diagnostic sensor system (see e.g., U.S. Pat. No. 9,470,699 “Diagnostic radio frequency identification sensors and applications thereof”). In certain embodiments, the present invention is performed in a LOC controlled by a wireless device (e.g., a cell phone, a personal digital assistant (PDA), a tablet) and results are reported to said device.

[1257] Radio frequency identification (RFID) tag systems include an RFID tag that transmits data for reception by an RFID reader (also referred to as an interrogator). In a typical RFID system, individual objects (e.g., store merchandise) are equipped with a relatively small tag that contains a transponder. The transponder has a memory chip that is given a unique electronic product code. The RFID reader emits a signal activating the transponder within the tag through the use of a communication protocol. Accordingly, the RFID reader is capable of reading and writing data to the tag. Additionally, the RFID tag reader processes the data according to the RFID tag system application. Currently, there are passive and active type RFID tags. The passive type RFID tag does not contain an internal power source, but is powered by radio frequency signals received from the RFID reader. Alternatively, the active type RFID tag contains an internal power source that enables the active type RFID tag to possess greater transmission ranges and memory capacity. The use of a passive versus an active tag is dependent upon the particular application.

[1258] Lab-on-the chip technology is well described in the scientific literature and consists of multiple microfluidic channels, input or chemical wells. Reactions in wells can be measured using radio frequency identification (RFID) tag technology since conductive leads from RFID electronic chip can be linked directly to each of the test wells. An antenna can be printed or mounted in another layer of the electronic chip or directly on the back of the device. Furthermore, the leads, the antenna and the electronic chip can be embedded into the LOC chip, thereby preventing shorting of the electrodes or electronics. Since LOC allows complex sample separation and analyses, this technology allows LOC tests to be done independently of a complex or expensive reader. Rather a simple wireless device such as a cell phone or a PDA can be used. In one embodiment, the wireless device also controls the separation and control of the microfluidics channels for more complex LOC analyses. In one embodiment, a LED and other electronic measuring or sensing devices are included in the LOC-RFID chip. Not being bound by a theory, this technology is disposable and allows complex tests that require separation and mixing to be performed outside of a laboratory.

[1259] In preferred embodiments, the LOC may be a microfluidic device. The LOC may be a passive chip, wherein the chip is powered and controlled through a wireless device. In certain embodiments, the LOC includes a microfluidic channel for holding reagents and a channel for introducing a sample. In certain embodiments, a signal from the wireless device delivers power to the LOC and activates mixing of the sample and assay reagents. Specifically, in the case of the present invention, the system may include a masking agent, CRISPR effector protein, and guide RNAs specific for a target molecule. Upon activation of the LOC, the microfluidic device may mix the sample and assay reagents. Upon mixing, a sensor detects a signal and transmits the results to the wireless device. In certain embodiments, the unmasking agent is a conductive RNA molecule. The conductive RNA molecule may be attached to the conductive material. Conductive molecules can be conductive nanoparticles, conductive proteins, metal particles that are attached to the protein or latex or other beads that are conductive. In certain embodiments, if DNA or RNA is used then the conductive molecules can be attached directly to the matching DNA or RNA strands. The release of the conductive molecules may be detected across a sensor. The assay may be a one step process.

[1260] Since the electrical conductivity of the surface area can be measured precisely quantitative results are possible on the disposable wireless RFID electro-assays. Furthermore, the test area can be very small allowing for more tests to be done in a given area and therefore resulting in cost savings. In certain embodiments, separate sensors each associated with a different CRISPR effector protein and guide RNA immobilized to a sensor are used to detect multiple target molecules. Not being bound by a theory, activation of different sensors may be distinguished by the wireless device.

[1261] In addition to the conductive methods described herein, other methods may be used that rely on RFID or Bluetooth as the basic low cost communication and power platform for a disposable RFID assay. For example, optical means may be used to assess the presence and level of a given target molecule. In certain embodiments, an optical sensor detects unmasking of a fluorescent masking agent.

[1262] In certain embodiments, the device of the present invention may include handheld portable devices for diagnostic reading of an assay (see e.g., Vashist et al., Commercial Smartphone-Based Devices and Smart Applications for Personalized Healthcare Monitoring and Management, Diagnostics 2014, 4(3), 104-128; mReader from Mobile Assay; and Holomic Rapid Diagnostic Test Reader).

[1263] As noted herein, certain embodiments allow detection via colorimetric change which has certain attendant benefits when embodiments are utilized in POC situations and or in resource poor environments where access to more complex detection equipment to readout the signal may be limited. However, portable embodiments disclosed herein may also be coupled with hand-held spectrophotometers that enable detection of signals outside the visible range. An example of a hand-held spectrophotometer device that may be used in combination with the present invention is described in Das et al. “Ultra-portable, wireless smartphone spectrophotometer for rapid, non-destructive testing of fruit ripeness.” Nature Scientific Reports. 2016, 6:32504, DOI: 10.1038/srep32504. Finally, in certain embodiments utilizing quantum dot-based masking constructs, use of a hand-held UV light, or other suitable device, may be successfully used to detect a signal owing to the near complete quantum yield provided by quantum dots.

### Further Exemplary Device Embodiments

[1264] In one embodiment, the detection assay can be provided on a cartridge or chip. In an aspect, the cartridge can comprise one or more ampoules and one or more wells that are communicatively coupled, allowing for the transfer, exchange or movement of reagents and sample with or without the use of beads through the chambers of the cartridge and facilitating detection assays utilizing systems/devices for facilitating the detection assay on the cartridge.

### Cartridge

[1265] The cartridge, also referred to herein as a chip, according to the present invention comprises a series of components of ampoules and chambers that are communicatively coupled with one or more other components on the cartridge. The coupling is typically a fluidic communication, for example, via channels. The cartridge may comprise a membrane that seals one or more of the chambers and/or ampoules. In an aspect, the membrane allows for storage of reagents, buffers and other solid or fluid components which cover and seal the cartridge. The membrane can be configured to be punctured, pierced or otherwise released from sealing or covering one or more components of the cartridge by a means for releasing reagents.

[1266] As noted above, certain embodiments enable the use of nucleic acid binding beads to concentrate target nucleic acid but that do not require elution of the isolated nucleic acid. Thus, in certain example embodiments, the cartridge may further comprise an activatable magnet, such as an electro-magnet. A means for activating the magnet may be located on the device, or the means for supplying the magnet or activating the magnet on the cartridge may be provided by a second device, such as those disclosed in further detail below.

### Ampoules

[1267] The ampoules, also referred to as blisters, allow for storage and release of reagents throughout the cartridge. Ampoules can include liquid or solid reagents, for example, lysis reagents in one ampoule and reaction reagents in another ampoule. The reagents can be as described elsewhere herein and can be adapted for the use in the cartridge. The ampoule may be sealed by a film that allows for the bursting, puncture or other release of the contents of the ampoules. See, e.g., Becker, H. & Gartner, C. Microfluidics-enabled diagnostic systems: markets, challenges, and examples. In Microchip Diagnostics: Methods and Protocols (eds Taly, V. et al.) (Springer, New York, 2017); Czurratis et al., doi: 10.1088/0960-1317/25/4/045002. Considerations for ampoules can include as discussed in, for example, Smith, S., et al., Blister pouches for effective reagent storage on microfluidic chips for blood cell counting. Microfluid Nanofluid 20, 163 (2016). DOI:10.1007/s10404-016-1830-2. In an aspect, the seal is a frangible seal formed of a composite-layer film that is assembled to the cartridge main body. While referred to herein as an ampoule, the ampoule may comprise a cavity on a chip which comprises a sealed film that is opened by the release means.

### Chambers

[1268] The chambers on the chip may located and sized for fluidic communication via channels or other communication means with ampoules and/or other chambers on the chip.

### Means for Reading the Results of the Assay

[1269] A means for reading the results of the assay can be provided in the system. The means for reading the results of the assay will depend in part on the type of detectable signal generated by the assay. In particular embodiments, the assay generates a detectable fluorescent or color readout. In these instances, the means for reading the results of the assay will be an optic means, for example a single channel or multi-channel optical means such as a fluorimeter, colorimeter or other spectroscopic sensor.

[1270] A combination of means for reading the results of the assay can be utilized, and may include readings such as turbidity, temperature, magnetic, radio, or electrical properties and or optical properties, including scattering, polarization effects, etc.

[1271] The system may further comprise a user interface for programming the device and/or readout of the results of the assay. The user interface may comprise an LED screen. The system can be further configured for a USB port that can allow for docking of four or more devices.

[1272] In an aspect, the system comprises a means for activating a magnet that is disposed within or on the cartridge.

### Lateral Flow Devices

[1273] In one embodiment, the detection assay can be provided on a lateral flow device, see, e.g., International Publication WO 2019/071051, incorporated herein by reference for exemplary lateral flow devices. The lateral flow device can be adapted to detect one or more coronaviruses and/or other viruses in combination of the coronavirus. The lateral flow device may comprise a flexible substrate, such as a paper substrate or a flexible polymer-based substrate, which can include freeze-dried reagents for detection assays with a visual readout of the assay results. See, WO 2019/071051 at [0145]-[0151] and Example 2, specifically incorporated herein by reference. In an aspect, lyophilized reagents can include preferred excipients that aid in rate of reaction, specificity, or other variable, for example, trehalose, histidine, and/or glycine. In one embodiment, a coronavirus assay can be utilized with isothermal amplification reagents, allowing amplification without complex instrumentation that may be unavailable in the field. Accordingly, the assay can be adapted for field diagnostics, including use of visual readout on a lateral flow device, rapid, sensitive detection and can be deployed for early and direct detection. Colorimetric detection can be utilized and may be particularly suited for field deployable applications, as described in International Application PCT/US2019/015726, published as WO2019/148206. In particular, colorimetric detection can be as described in WO2019/148206 at FIGS. 102, 105, 107-111 and [00306]-[00324], incorporated herein by reference and may be utilized with the Fanzor systems.

[1274] In one embodiment, the invention provides a lateral flow device comprising a substrate comprising a first end and a second end. The first end may comprise a sample loading portion, a first region comprising a detectable ligand, two or more Fanzor systems, two or more detection constructs, and one or more first capture regions, each comprising a first binding agent. The substrate may also comprise two or more second capture regions between the first region of the first end and the second end, each second capture region comprising a different binding agent. Each of the two or more Fanzor systems may comprise a Fanzor protein and one or more nucleic acid component molecules, each nucleic acid component molecule sequence configured to bind one or more target molecules.

[1275] The device may comprise a lateral flow substrate for detecting a reaction between a Fanzor polypeptide and a target molecule triggering collateral, non-specific cleavage of detection construct. Substrates suitable for use in lateral flow assays are known in the art. These may include, but are not necessarily limited to, membranes or pads made of cellulose and/or glass fiber, polyesters, nitrocellulose, or absorbent pads (J Saudi Chem Soc 19(6):689-705; 2015), and other embodiments further described herein. The detection system, i.e., one or more Fanzor systems and corresponding reporter constructs are added to the lateral flow substrate at a defined reagent portion of the lateral flow substrate, typically on one end of the lateral flow substrate. Reporting constructs used within the context of the present invention can comprise a first molecule and a second molecule linked by an RNA or DNA linker. The lateral flow substrate further comprises a sample portion. The sample portion may be equivalent to, continuous with, or adjacent to the reagent portion. In an aspect, the lateral flow substrate can be contained within a further device. In an aspect, the lateral flow substrate can be utilized for visual readout of a detectable signal in one-pot reactions, e.g., wherein steps of extracting, amplifying and detecting are performed in an individual discrete volume.

### Sample Considerations for Lateral Flow Devices

[1276] When utilizing the detection systems with a lateral flow substrate, samples to be screened are loaded at the sample loading portion of the lateral flow substrate. The samples must be liquid samples or samples dissolved in an appropriate solvent, usually aqueous. The liquid sample reconstitutes the detection reagents such that a detection reaction can occur. The liquid sample begins to flow from the sample portion of the substrate towards the first and second capture regions.

[1277] In particular embodiments, the methods and systems can be utilized for direct detection from patient samples. In an aspect, the methods and systems can further allow for direct detection from patient samples with a visual readout to further facilitate field-deployability. In an aspect, a field depoloyable version can include, for example the lateral flow devices and systems as described herein, and/or colorimetric detection. The methods and systems can be utilized to distinguish multiple viral species and strains and identify clinically relevant mutations, important with viral outbreaks such as the coronavirus outbreak in Wuhan (2019-nCoV). In an aspect, the sample is from a nasophyringeal swab or a saliva sample. See., e.g., Wyllie et al., “Saliva is more sensitive for SARS-CoV-2 detection in COVID-19 patients than nasopharyngeal swabs,” DOI: 10.1101/2020.04.16.20067835.

### Lateral Flow Substrate

[1278] In certain example embodiments, a lateral flow device comprises a lateral flow substrate on which detection can be performed. Substrates suitable for use in lateral flow assays are known in the art. These may include, but are not necessarily limited to, membranes or pads made of cellulose and/or glass fiber, polyesters, nitrocellulose, or absorbent pads (J Saudi Chem Soc 19(6):689-705; 2015).

[1279] Lateral support substrates comprise a first and second end, and one or more capture regions that each comprise binding agents. The first end may comprise a sample loading portion, a first region comprising a detectable ligand, two or more Fanzor systems, two or more detection constructs, and one or more first capture regions, each comprising a first binding agent. The substrate may also comprise two or more second capture regions between the first region of the first end and the second end, each second capture region comprising a different binding agent. Each of the two or more Fanzor systems may comprise a Fanzor protein and one or more nucleic acid component molecules, each nucleic acid component configured to bind one or more target molecules. The lateral flow substrates may be configured to detect a reaction wherein collateral, non-specific cleavage is triggered upon binding and cleavage of a target molecule in the reaction by the Fanzor protein.

[1280] Lateral support substrates may be located within a housing (see for example, “Rapid Lateral Flow Test Strips” Merck Millipore 2013). The housing may comprise at least one opening for loading samples and a second single opening or separate openings that allow for reading of detectable signal generated at the first and second capture regions.

[1281] The embodiments disclosed herein can be prepared in freeze-dried format for convenient distribution and point-of-care (POC) applications. Such embodiments are useful in multiple scenarios in human health including, for example, viral detection, bacterial strain typing, sensitive genotyping, and detection of disease-associated cell free DNA. Accordingly, the lateral substrate comprising one or more of the elements of the system, including detectable ligands, Fanzor systems, detection constructs and binding agents may be freeze-dried to the lateral flow substrate and packaged as a ready to use device. Alternatively, all or a portion of the elements of the system may be added to the reagent portion of the lateral flow substrate at the time of using the device.

### First End and Second End of the Substrate

[1282] The substrate of the lateral flow device comprises a first and second end. The Fanzor system, i.e., one or more Fanzor systems and corresponding reporter constructs are added to the lateral flow substrate at a defined reagent portion of the lateral flow substrate, typically on a first end of the lateral flow substrate. Reporting constructs used within the context of the present invention comprise a first molecule and a second molecule linked by an RNA or DNA linker. The lateral flow substrate further comprises a sample portion. The sample portion may be equivalent to, continuous with, or adjacent to the reagent portion.

[1283] In certain example embodiments, the first end comprises a first region. The first region comprises a detectable ligand, two or more Fanzor systems, two or more detection constructs, and one or more first capture regions, each comprising a first binding agent.

### Capture Regions

[1284] The lateral flow substrate can comprise one or more capture regions. In embodiments the first end of the lateral flow substrate comprises one or more first capture regions, with two or more second capture regions between the first region of the first end of the substrate and the second end of the substrate. The capture regions may be provided as a capture line, typically a horizontal line running across the device, but other configurations are possible. The first capture region is proximate to and on the same end of the lateral flow substrate as the sample loading portion.

### Binding Agents

[1285] Specific binding-integrating molecules comprise any members of binding pairs that can be used in the present invention. Such binding pairs are known to those skilled in the art and include, but are not limited to, antibody-antigen pairs, enzyme-substrate pairs, receptor-ligand pairs, and streptavidin-biotin. In addition to such known binding pairs, novel binding pairs may be specifically designed. A characteristic of binding pairs is the binding between the two members of the binding pair.

[1286] A first binding agent that specifically binds the first molecule of the reporter construct is fixed or otherwise immobilized to the first capture region. The second capture region is located towards the opposite end of the lateral flow substrate from the first capture region. A second binding agent is fixed or otherwise immobilized at the second capture region. The second binding agent specifically binds the second molecule of the reporter construct, or the second binding agent may bind a detectable ligand. For example, the detectable ligand may be a particle, such as a colloidal particle, that when it aggregates can be detected visually, and generates a detectable positive signal. The particle may be modified with an antibody that specifically binds the second molecule on the reporter construct. If the reporter construct is not cleaved, it will facilitate accumulation of the detectable ligand at the first binding region. If the reporter construct is cleaved the detectable ligand is released to flow to the second binding region. In such an embodiment, the second binding region comprises a second binding agent capable of specifically or non-specifically binding the detectable ligand on the antibody of the detectable ligand. Binding agents can be, for example, antibodies, that recognize a particular affinity tag. Such binding agents can further contain, for example, detectable labels, such as isotope labels and/or nucleic acid barcodes. A barcode is a short sequence of nucleotides (for example, DNA, RNA, or combinations thereof) that is used as an identifier. A nucleic acid barcode may have a length of 4-100 nucleotides and be either single or double-stranded. Methods for identifying cells with barcodes are known in the art. Accordingly, nucleic acid component molecules of the Fanzor systems described herein may be used to detect the barcode.

### Detectable Ligands

[1287] The first region is loaded with a detectable ligand, such as those disclosed herein, for example a gold nanoparticle. The detectable ligand may be a particle, such as a colloidal particle, that when it aggregates can be detected visually. The particle may be modified with an antibody that specifically binds the second molecule on the reporter construct. If the reporter construct is not cleaved, it will facilitate accumulation of the detectable ligand at the first binding region. If the reporter construct is cleaved the detectable ligand is released to flow to the second binding region. In such an embodiment, the second binding agent is an agent capable of specifically or non-specifically binding the detectable ligand on the antibody on the detectable ligand. Examples of suitable binding agents for such an embodiment include, but are not limited to, protein A and protein G. In some examples, the detectable ligand is a gold nanoparticle, which may be modified with a first antibody, such as an anti-FITC antibody.

### Lateral Flow Detection Constructs

[1288] The first region also comprises a detection construct. In one example embodiment, a RNA detection construct and a Fanzor system (a Fanzor protein and one or more nucleic acid component molecules configured to bind to one or more target sequences) as disclosed herein. In one example embodiment, and for purposes of further illustration, the RNA construct may comprise a FAM molecule on a first end of the detection construction and a biotin on a second end of the detection construct. Upstream of the flow of solution from the first end of the lateral flow substrate is a first test band. The test band may comprise a biotin ligand. Accordingly, when the RNA detection construct is present it its initial state, i.e., in the absence of target, the FAM molecule on the first end will bind the anti-FITC antibody on the gold nanoparticle, and the biotin on the second end of the RNA construct will bind the biotin ligand allowing for the detectable ligand to accumulate at the first test, generating a detectable signal. Generation of a detectable signal at the first band indicates the absence of the target ligand. In the presence of target, the Fanzor complex forms and the Fanzor protein is activated resulting in cleavage of the detection construct. In the absence of intact RNA detection construct the colloidal gold will flow past the second strip. The lateral flow device may comprise a second band, upstream of the first band. The second band may comprise a molecule capable of binding the antibody-labeled colloidal gold molecule, for example an anti-rabbit antibody capable of binding a rabbit anti-FITC antibody on the colloidal gold. Therefore, in the presence of one or more targets, the detectable ligand will accumulate at the second band, indicating the presence of the one or more targets in the sample.

[1289] In one embodiment, the first end of the lateral flow device comprises two detection constructs and each of the two detection constructs comprises an RNA or DNA oligonucleotide, comprising a first molecule on a first end and a second molecule on a second end. The first molecule and the second molecule may be linked by an RNA or DNA linker.

[1290] In one embodiment, the first molecule on the first end of the first detection construct may be FAM and the second molecule on the second end of the first detection construct may be biotin, or vice versa. In one embodiment, the first molecule on the first end of the second detection construct may be FAM and the second molecule on the second end of the second detection construct may be Digoxigenin (DIG), or vice versa.

[1291] In one embodiment, the first end may comprise three detection constructs, wherein each of the three detection constructs comprises an RNA or DNA oligonucleotide, comprising a first molecule on a first end and a second molecule on a second end. In specific embodiments, the first and second molecules on the detection constructs comprise Tye 665 and Alexa 488; Tye 665 and FAM, and Tye 665 and Digoxigenin (DIG), respectively.

[1292] In one embodiment, the first end of the lateral flow device comprises two or more Fanzor systems, also referred to as a Fanzor system. In one embodiment, such a Fanzor system may include a Fanzor protein, and one or more nucleic acid component molecules configured to bind to one or more target sequences.

### Methods of Fanzor Composition and System Optimization

[1293] The methods of the present invention can involve optimization of selected parameters or variables associated with the composition, system, and/or its functionality, as described herein further elsewhere. Optimization of the composition, system, in the methods as described herein may depend on the target(s), such as the therapeutic target or therapeutic targets, the mode or type of composition, system, modulation, such as composition, system, based therapeutic target(s) modulation, modification, or manipulation, as well as the delivery of the composition, system, components. One or more targets may be selected, depending on the genotypic and/or phenotypic outcome. For instance, one or more therapeutic targets may be selected, depending on (genetic) disease etiology or the desired therapeutic outcome. The (therapeutic) target(s) may be a single gene, locus, or other genomic site, or may be multiple genes, loci or other genomic sites. As is known in the art, a single gene, locus, or other genomic site may be targeted more than once, such as by use of multiple nucleic acid components, or nucleic acid component scaffold and multiple reprogrammable spacers.

[1294] The activity of the composition and/or system, such as Fanzor polypeptide-based therapy or therapeutics may involve target disruption, such as target mutation, such as leading to gene knockout. The activity of the composition and/or system, such as Fanzor polypeptide-based therapy or therapeutics may involve replacement of particular target sites, such as leading to target correction. Fanzor polypeptide based therapy or therapeutics may involve removal of particular target sites, such as leading to target deletion. The activity of the composition and/or system, such as Fanzor polypeptide-based therapy or therapeutics may involve modulation of target site functionality, such as target site activity or accessibility, leading for instance to (transcriptional and/or epigenetic) gene or genomic region activation or gene or genomic region silencing. The skilled person will understand that modulation of target site functionality may involve Fanzor polypeptide mutation (such as for instance generation of a catalytically inactive Fanzor polypeptide) and/or functionalization (such as for instance fusion of the Fanzor polypeptide with a heterologous functional domain, such as a transcriptional activator or repressor), as described herein elsewhere.

[1295] Accordingly, in an aspect, the invention relates to a method as described herein, comprising selection of one or more (therapeutic) target, selecting one or more functionality of the composition and/or system, and optimization of selected parameters or variables associated with the composition and/or its functionality. In a related aspect, the invention relates to a method as described herein, comprising (a) selecting one or more (therapeutic) target loci, (b) selecting one or more composition functionalities, (c) optionally selecting one or more modes of delivery, and preparing, developing, or designing a composition herein selected based on steps (a)-(c).

[1296] In one embodiment, the functionality of the composition and/or system comprises genomic mutation. In one embodiment, the functionality of the composition and/or system comprises single genomic mutation. In one embodiment, the functionality of the composition and/or system functionality comprises multiple genomic mutation. In one embodiment, the functionality of the composition and/or system comprises gene knockout. In one embodiment, the functionality of the composition and/or system comprises single gene knockout. In one embodiment, the functionality of the composition and/or system comprises multiple gene knockout. In one embodiment, the functionality of the composition and/or system comprises gene correction. In one embodiment, the functionality of the composition and/or system comprises single gene correction. In one embodiment, the functionality of the composition and/or system comprises multiple gene correction. In one embodiment, the functionality of the composition and/or system comprises genomic region correction. In one embodiment, the functionality of the composition and/or system comprises single genomic region correction. In one embodiment, the functionality of the composition and/or system comprises multiple genomic region correction. In one embodiment, the functionality of the composition and/or system comprises gene deletion. In one embodiment, the functionality of the composition and/or system comprises single gene deletion. In one embodiment, the functionality of the composition and/or system comprises multiple gene deletion. In one embodiment, the functionality of the composition and/or system comprises genomic region deletion. In one embodiment, the functionality of the composition and/or system comprises single genomic region deletion. In one embodiment, the functionality of the composition and/or system comprises multiple genomic region deletion. In one embodiment, the functionality of the composition and/or system comprises modulation of gene or genomic region functionality. In one embodiment, the functionality of the composition and/or system comprises modulation of single gene or genomic region functionality. In one embodiment, the functionality of the composition and/or system comprises modulation of multiple gene or genomic region functionality. In one embodiment, the functionality of the composition and/or system comprises gene or genomic region functionality, such as gene or genomic region activity. In one embodiment, the functionality of the composition and/or system comprises single gene or genomic region functionality, such as gene or genomic region activity. In one embodiment, the functionality of the composition and/or system comprises multiple gene or genomic region functionality, such as gene or genomic region activity. In one embodiment, the functionality of the composition and/or system comprises modulation gene activity or accessibility optionally leading to transcriptional and/or epigenetic gene or genomic region activation or gene or genomic region silencing. In one embodiment, the functionality of the composition and/or system comprises modulation single gene activity or accessibility optionally leading to transcriptional and/or epigenetic gene or genomic region activation or gene or genomic region silencing. In one embodiment, the functionality of the composition and/or system comprises modulation multiple gene activity or accessibility optionally leading to transcriptional and/or epigenetic gene or genomic region activation or gene or genomic region silencing.

[1297] Optimization of selected parameters or variables in the methods as described herein may result in optimized or improved the system, such as Fanzor polypeptide-based therapy or therapeutic, specificity, efficacy, and/or safety. In one embodiment, one or more of the following parameters or variables are taken into account, are selected, or are optimized in the methods of the invention as described herein: Fanzor polypeptide allosteric interactions, Fanzor polypeptide functional domains and functional domain interactions, Fanzor polypeptide specificity, nucleic acid component specificity, composition specificity, TAM restrictiveness, TAM type (natural or modified), TAM nucleotide content, TAM length, Fanzor polypeptide activity, nucleic acid component activity, Fanzor polypeptide/nucleic acid component molecule complex activity, target cleavage efficiency, target site selection, target sequence length, ability of effector protein to access regions of high chromatin accessibility, degree of uniform enzyme activity across genomic targets, epigenetic tolerance, mismatch/budge tolerance, Fanzor polypeptide stability, Fanzor polypeptide mRNA stability, nucleic acid component molecule stability, Fanzor polypeptide complex stability, Fanzor polypeptide protein or mRNA immunogenicity or toxicity, nucleic acid component molecule immunogenicity or toxicity, Fanzor polypeptide immunogenicity or toxicity, Fanzor polypeptide or mRNA dose or titer, nucleic acid component molecule dose or titer, dose or titer, Fanzor polypeptide protein size, Fanzor polypeptide expression level, nucleic acid component molecule expression level, Fanzor polypeptide expression level, Fanzor polypeptide spatiotemporal expression, nucleic acid component molecule spatiotemporal expression, Fanzor polypeptide/nucleic acid component spatiotemporal expression.

[1298] By means of example, and without limitation, parameter or variable optimization may be achieved as follows. Fanzor polypeptide specificity may be optimized by selecting the most specific Fanzor polypeptide, e.g., Fanzor. This may be achieved for instance by selecting the most specific Fanzor polypeptide orthologue or by specific Fanzor polypeptide mutations which increase specificity. nucleic acid component specificity may be optimized by selecting the most specific nucleic acid component. This can be achieved for instance by selecting nucleic acid component having low homology, i.e., at least one or preferably more, such as at least 2, or preferably at least 3, mismatches to off-target sites. The specificity may be optimized by increasing Fanzor polypeptide specificity and/or nucleic acid component specificity as above.

[1299] Target length or target sequence length may be optimized, for instance, by selecting the appropriate Fanzor polypeptide, such as the appropriate Fanzor polypeptide recognizing a desired target or target sequence nucleotide length. Alternatively, or in addition, the target (sequence) length may be optimized by providing a target having a length deviating from the target (sequence) length typically associated with the Fanzor polypeptide, such as the naturally occurring Fanzor polypeptide. The Fanzor polypeptide or target (sequence) length may be naturally occurring or may for instance be optimized based on Fanzor polypeptide mutants having an altered target (sequence) length recognition, or target (sequence) length recognition repertoire. For instance, increasing or decreasing target (sequence) length may influence target recognition and/or off-target recognition. Fanzor polypeptide activity may be optimized by selecting the most active Fanzor polypeptide. This may be achieved for instance by selecting the most active Fanzor polypeptide ortholog or by specific Fanzor polypeptide mutations which increase activity. The ability of the Fanzor polypeptide protein to access regions of high chromatin accessibility, may be optimized by selecting the appropriate Fanzor polypeptide or mutant thereof, and can consider the size of the Fanzor polypeptide, charge, or other dimensional variables etc. The degree of uniform Fanzor polypeptide activity may be optimized by selecting the appropriate Fanzor polypeptide or mutant thereof, and can consider Fanzor polypeptide specificity and/or activity, TAM specificity, target length, mismatch tolerance, epigenetic tolerance, Fanzor polypeptide and/or nucleic acid component stability and/or half-life, Fanzor polypeptide and/or nucleic acid component immunogenicity and/or toxicity, etc. nucleic acid component activity may be optimized by selecting the most active nucleic acid component. In one embodiment, this can be achieved by increasing nucleic acid component stability through RNA modification. compositions activity may be optimized by increasing Fanzor polypeptide activity and/or nucleic acid component activity as above.

[1300] The target site selection may be optimized by selecting the optimal position of the target site within a gene, locus or other genomic region. The target site selection may be optimized by optimizing target location comprises selecting a target sequence with a gene, locus, or other genomic region having low variability. This may be achieved for instance by selecting a target site in an early and/or conserved exon or domain (i.e., having low variability, such as polymorphisms, within a population).

[1301] In one embodiment, optimizing target (sequence) length comprises selecting a target sequence within one or more target loci between 5 and 25 nucleotides. In one embodiment, a target sequence is 20 nucleotides.

[1302] In one embodiment, optimizing target specificity comprises selecting targets loci that minimize off-target candidates.

[1303] In one embodiment, the target site may be selected by minimization of off-target effects (e.g., off-targets qualified as having 1-5, 1-4, or preferably 1-3 mismatches compared to target, preferably also considering variability within a population. Fanzor polypeptide stability may be optimized by selecting Fanzor polypeptide having appropriate half-life, such as preferably a short half-life while still capable of maintaining sufficient activity. In one embodiment, this can be achieved by selecting an appropriate Fanzor polypeptide orthologue having a specific half-life or by specific Fanzor polypeptide mutations or modifications which affect half-life or stability, such as inclusion (e.g., fusion) of stabilizing or destabilizing domains or sequences. Fanzor polypeptide mRNA stability may be optimized by increasing or decreasing Fanzor polypeptide mRNA stability. In one embodiment, this can be achieved by increasing or Fanzor polypeptide mRNA stability through mRNA modification. nucleic acid component stability may be optimized by increasing or decreasing nucleic acid component stability. In one embodiment, this can be achieved by increasing or decreasing nucleic acid component stability through RNA modification. The stability may be optimized by increasing or decreasing Fanzor polypeptide stability and/or nucleic acid component molecule stability as above. Fanzor polypeptide protein or mRNA immunogenicity or toxicity may be optimized by decreasing Fanzor polypeptide or mRNA immunogenicity or toxicity. In one embodiment, this can be achieved by mRNA or protein modifications. Similarly, in case of DNA based expression systems, DNA immunogenicity or toxicity may be decreased. nucleic acid component immunogenicity or toxicity may be optimized by decreasing nucleic acid component immunogenicity or toxicity. In one embodiment, this can be achieved by nucleic acid component modifications. Similarly, in case of DNA based expression systems, DNA immunogenicity or toxicity may be decreased. The immunogenicity or toxicity may be optimized by decreasing Fanzor polypeptide immunogenicity or toxicity and/or nucleic acid component immunogenicity or toxicity as above, or by selecting the least immunogenic or toxic Fanzor polypeptide/nucleic acid component combination. Similarly, in case of DNA based expression systems, DNA immunogenicity or toxicity may be decreased. Fanzor polypeptide protein or mRNA dose or titer may be optimized by selecting dosage or titer to minimize toxicity and/or maximize specificity and/or efficacy. nucleic acid component dose or titer may be optimized by selecting dosage or titer to minimize toxicity and/or maximize specificity and/or efficacy. The composition dose or titer may be optimized by selecting dosage or titer to minimize toxicity and/or maximize specificity and/or efficacy. The Fanzor polypeptide size may be optimized by selecting minimal protein size to increase efficiency of delivery, in particular for virus mediated delivery. Fanzor polypeptide, nucleic acid component, or complex thereof expression level may be optimized by limiting (or extending) the duration of expression and/or limiting (or increasing) expression level. This may be achieved for instance by using self-inactivating compositions, systems, such as including a self-targeting (e.g., Fanzor polypeptide targeting) nucleic acid component molecule, by using viral vectors having limited expression duration, by using appropriate promoters for low (or high) expression levels, by combining different delivery methods for individual Fanzor system components, such as virus mediated delivery of Fanzor polypeptide encoding nucleic acid combined with non-virus mediated delivery of nucleic acid component, or virus mediated delivery of nucleic acid component combined with non-virus mediated delivery of Fanzor polypeptide or mRNA. Fanzor polypeptide, nucleic acid component, or Fanzor complex spatiotemporal expression may be optimized by appropriate choice of conditional and/or inducible expression systems, including controllable Fanzor polypeptide activity optionally a destabilized Fanzor polypeptide and/or a split Fanzor polypeptide, and/or cell- or tissue-specific expression systems.

[1304] In an aspect, the invention relates to a method as described herein, comprising selection of one or more (therapeutic) target, selecting the functionality of the composition and/or system, selecting composition mode of delivery, selecting composition delivery vehicle or expression system, and optimization of selected parameters or variables associated with the composition and/or its functionality, optionally wherein the parameters or variables are one or more selected from Fanzor polypeptide specificity, nucleic acid component specificity, Fanzor complex specificity, Fanzor polypeptide activity, nucleic acid component molecule activity, Fanzor polypeptide/nucleic acid component complex activity, target cleavage efficiency, target site selection, target sequence length, ability of effector protein to access regions of high chromatin accessibility, degree of uniform enzyme activity across genomic targets, epigenetic tolerance, mismatch/budge tolerance, Fanzor polypeptide stability, Fanzor polypeptide mRNA stability, nucleic acid component stability, Fanzor complex stability, Fanzor polypeptide protein or mRNA immunogenicity or toxicity, nucleic acid component immunogenicity or toxicity, Fanzor polypeptide/nucleic acid component complex immunogenicity or toxicity, Fanzor polypeptide protein or mRNA dose or titer, nucleic acid component dose or titer, Fanzor complex dose or titer, Fanzor polypeptide protein size, Fanzor polypeptide expression level, nucleic acid component expression level, Fanzor polypeptide/nucleic acid component molecule complex expression level, Fanzor polypeptide spatiotemporal expression, nucleic acid component spatiotemporal expression, Fanzor polypeptide/nucleic acid component complex spatiotemporal expression.

[1305] It will be understood that the parameters or variables to be optimized as well as the nature of optimization may depend on the (therapeutic) target, the functionality of the composition and/or system, the system mode of delivery, and/or the composition delivery vehicle or expression system.

[1306] In an aspect, the invention relates to a method as described herein, comprising optimization of nucleic acid component specificity at the population level. Preferably, said optimization of nucleic acid component specificity comprises minimizing nucleic acid component target site sequence variation across a population and/or minimizing nucleic acid component off-target incidence across a population.

[1307] In one embodiment, optimization can result in selection of a Fanzor polypeptide that is naturally occurring or is modified. In one embodiment, optimization can result in selection of a Fanzor polypeptide that has nuclease, nickase, deaminase, transposase, and/or has one or more effector functionalities deactivated or eliminated. In one embodiment, optimizing a TAMspecificity can include selecting a Fanzor polypeptide with a modified TAMspecificity. In one embodiment, optimizing can include selecting a Fanzor polypeptide having a minimal size. In one embodiment, optimizing effector protein stability comprises selecting an effector protein having a short half-life while maintaining sufficient activity, such as by selecting an appropriate Fanzor polypeptide orthologue having a specific half-life or stability. In one embodiment, optimizing immunogenicity or toxicity comprises minimizing effector protein immunogenicity or toxicity by protein modifications. In one embodiment, optimizing functional specific comprises selecting a protein effector with reduced tolerance of mismatches and/or bulges between the nucleic acid component molecule and one or more target loci.

[1308] In one embodiment, optimizing efficacy comprises optimizing overall efficiency, epigenetic tolerance, or both. In one embodiment, maximizing overall efficiency comprises selecting an effector protein with uniform enzyme activity across target loci with varying chromatin complexity, selecting an effector protein with enzyme activity limited to areas of open chromatin accessibility. In one embodiment, chromatin accessibility is measured using one or more of ATAC-seq, or a DNA-proximity ligation assay. In one embodiment, optimizing epigenetic tolerance comprises optimizing methylation tolerance, epigenetic mark competition, or both. In one embodiment, optimizing methylation tolerance comprises selecting an effector protein that modify methylated DNA. In one embodiment, optimizing epigenetic tolerance comprises selecting an effector protein unable to modify silenced regions of a chromosome, selecting an effector protein able to modify silenced regions of a chromosome, or selecting target loci not enriched for epigenetic markers.

[1309] In one embodiment, selecting an optimized nucleic acid component molecule comprises optimizing stability, immunogenicity, or both, or other associated parameters or variables as described herein elsewhere.

[1310] In one embodiment, optimizing nucleic acid component molecule stability and/or nucleic acid component molecule immunogenicity comprises RNA modification, or other nucleic acid component molecule associated parameters or variables as described herein elsewhere. In one embodiment, the modification comprises removing 1-3 nucleotides form the 3′ end of a target complementarity region of the nucleic acid component molecule. In one embodiment, modification comprises an extended nucleic acid component molecule and/or trans RNA/DNA element that create stable structures in the nucleic acid component molecule that compete with nucleic acid component molecule base pairing at a target of off-target loci, or extended complimentary nucleotides between the nucleic acid component molecule and target sequence, or both.

[1311] In one embodiment, the mode of delivery comprises delivering nucleic acid component molecule and/or Fanzor polypeptide, delivering nucleic acid component molecule and/or Fanzor polypeptide mRNA, or delivery nucleic acid component molecule and/or Fanzor polypeptide as a DNA based expression system. In one embodiment, the mode of delivery further comprises selecting a delivery vehicle and/or expression systems from the group consisting of liposomes, lipid particles, nanoparticles, biolistics, or viral-based expression/delivery systems. In one embodiment, expression is spatiotemporal expression is optimized by choice of conditional and/or inducible expression systems, including controllable Fanzor polypeptide activity optionally a destabilized Fanzor polypeptide and/or a split Fanzor polypeptide, and/or cell- or tissue-specific expression system.

[1312] The methods as described herein may further involve selection of the mode of delivery. In one embodiment, nucleic acid component and/or Fanzor polypeptide are or are to be delivered. In one embodiment, nucleic acid component and/or Fanzor polypeptide mRNA are or are to be delivered. In one embodiment, nucleic acid component and/or Fanzor polypeptide provided in a DNA-based expression system or are to be delivered. In one embodiment, delivery of the individual system components comprises a combination of the above modes of delivery. In one embodiment, delivery comprises delivering nucleic acid component and/or Fanzor polypeptide protein, delivering nucleic acid component and/or Fanzor polypeptide mRNA, or delivering nucleic acid component and/or Fanzor polypeptide as a DNA based expression system.

[1313] The methods as described herein may further involve selection of the composition delivery vehicle and/or expression system. Delivery vehicles and expression systems are described herein elsewhere. By means of example, delivery vehicles of nucleic acids and/or proteins include nanoparticles, liposomes, etc. Delivery vehicles for DNA, such as DNA-based expression systems include for instance biolistics, viral based vector systems (e.g. adenoviral, AAV, lentiviral), etc. the skilled person will understand that selection of the mode of delivery, as well as delivery vehicle or expression system may depend on for instance the cell or tissues to be targeted. In one embodiment, the delivery vehicle and/or expression system for delivering the compositions, systems, or components thereof comprises liposomes, lipid particles, nanoparticles, biolistics, or viral-based expression/delivery systems.

### Kits

[1314] In one aspect, the invention provides kits containing any one or more of the elements disclosed in the above methods and compositions. In one aspect, the invention provides a kit comprising one or more of the components described herein. In one embodiment, the kit comprises the compositions herein and instructions for using the kit. In one embodiment, the kit comprises a vector system and instructions for using the kit. In one embodiment, the kit comprises a delivery system and instructions for using the kit. In one embodiment, the kit comprises a vector system and instructions for using the kit. Elements may be provided individually or in combinations, and may be provided in any suitable container, such as a vial, a bottle, or a tube. The kits may include the nucleic acid component and optionally an unbound protector strand as described herein. The kits may include the nucleic acid component with a protector strand bound to at least partially to a reprogrammable spacer portion of the nucleic acid component sequence (i.e., nucleic acid component). Thus, the kits may include the nucleic acid component in the form of a partially double stranded nucleotide sequence as described here. In one embodiment, the kit includes instructions in one or more languages, for example in more than one language. The instructions may be specific to the applications and methods described herein.

[1315] In one embodiment, a kit comprises one or more reagents for use in a process utilizing one or more of the elements described herein. Reagents may be provided in any suitable container. For example, a kit may provide one or more reaction or storage buffers. Reagents may be provided in a form that is usable in a particular assay, or in a form that requires addition of one or more other components before use (e.g., in concentrate or lyophilized form). A buffer can be any buffer, including but not limited to a sodium carbonate buffer, a sodium bicarbonate buffer, a borate buffer, a Tris buffer, a MOPS buffer, a HEPES buffer, and combinations thereof. In one embodiment, the buffer is alkaline. In one embodiment, the buffer has a pH from about 7 to about 10. In one embodiment, the kit comprises one or more oligonucleotides corresponding to a nucleic acid component scaffold, reprogrammable sequence for insertion into a vector so as to operably link the nucleic acid component sequence and a regulatory element. In one embodiment, the kit comprises a homologous recombination template polynucleotide. In one embodiment, the kit comprises one or more of the vectors and/or one or more of the polynucleotides described herein. The kit may advantageously allow to provide all elements of the systems of the invention.

[1316] Further embodiments are illustrated in the following Examples which are given for illustrative purposes only and are not intended to limit the scope of the invention.

### EXAMPLES

### Example 1

[1317] Gene editing is a powerful method for deleting, inserting, or modifying DNA sequences. Since it was first developed, there has been enormous excitement about the potential for gene editing as a therapeutic to treat genetic disorders at their root. High efficiency manipulation of genomic sequences could streamline the development of novel and highly impactful treatments for genetic diseases, such as cancers, autoimmune disorders, and neurological disorders [1, 2, 3, 4].

[1318] In the past few decades, several approaches to gene editing have been developed, such as transcription activator-like effector nucleases (TALENs) and zinc-finger nucleases (ZFNs)[5, 6]. However, these systems are difficult and time-consuming to retarget to specific sequences in the genome because they are entirely protein based [7]. In 2013, Cong et al. and Mali et al. introduced CRISPR-Cas (clustered regularly interspaced short palindromic re-peats and CRISPR-associated protein) as a new class of tool for human genome engineering [8, 9]. CRISPR-Cas systems contain an RNA guided endonuclease which cleaves DNA sequences complementary to the RNA guide. This feature in particular makes CRISPR-Cas a powerful gene editing system: it can be retargeted simply by changing the gRNA (guide-RNA, ˜20nt) [10]. There are many different types of CRISPR-Cas systems in nature, but the two most commonly used ones for genome editing are CRISPR-Cas9 and CRISPR-Cas12, both of which use an RNA-guided single protein effector [11]. Cas9 and Cas12 have been further engineered to expand their utility beyond DNA cleavage. Using dCas (catalytically inactivated Cas variants) fused with various effector proteins allows the dCas system to achieve a range of RNA-guided functions including gene repression and activation, epigenome modulation, and base editing (the exchange of specific DNA bases for another one) [12, 13].

[1319] The robustness and reprogrammability of Cas9 and Cas12 have made them a powerful molecular biology tool, but there is a major bottleneck in their translation to the clinic [14]. Namely, the large size of these proteins (and particularly dCas-based constructs like base editors) renders them unsuitable for use with the most promising gene therapy delivery vectors, adeno-associated virus (AAV) vectors [15]. AAV vectors are derived from a non-enveloped eukaryotic virus and have proven to be one of the safest delivery methods for gene therapies due to their low immunogenicity and tissue specificity [16]. However, the packaging capacity of AAV is limited. Cas9 and gRNA together are ˜4.2 kb in size, whereas AAV can hold a maximum of ˜4.5-5 kb of genomic material. This does not leave enough left-over space to fit the required regulatory elements, such as promoters, to ensure Cas9 and the guide RNA are appropriately expressed.

[1320] Although it is possible to design minimal Cas9-based therapeutics, most genetic diseases cannot be treated with Cas9 itself: Cas9 typically generates loss-of-function mutations, which will rarely be beneficial for treating disease [17]. Rather, additional components are needed, such as donor DNA templates in situations where gene insertion is required to treat a genetic disease or base-editing constructs in situations where a point mutation needs to be corrected. These constructs are usually very large, precluding their efficient delivery [18, 19]. Thus, only a small fraction of genetic diseases are currently treatable with gene editing. Indeed, most ongoing clinical trials using CRISPR-Cas technology aim to treat diseases where editing can be performed ex vivo (such as blood disorders) or genetic diseases where loss of function can be therapeutic (such as LCA10) [20, 21].

[1321] One possible solution to this challenge is to engineer or identify much smaller Cas-like proteins that, even when fused to other proteins to make base editing constructs, can be packaged into AAV. As part of this effort to find smaller CRISPR systems, Altae-Tran et al. took a computational approach to search for proteins with a similar domain architecture as Cas9 and Cas12. They identified 3 highly abundant transposon-encoded nucleases, IscB, IsrB, and TnpB, in prokaryotic genomes [22]. Collectively, these transposon-encoded nucleases are known as obligate mobile element-guided activity (OMEGA) systems. Bacterial insertion sequences (IS) of the IS200/IS605 family can encode TnpA transposases along with an accessory protein, TnpB (FIG. 3A). This TnpB protein is the likely ancestor of Cas12, but it is substantially smaller (400 amino acids (aa) vs 1300 aa in Cas12). Small RNA sequencing revealed a non-coding RNA (ncRNA, 150 nt long) directly downstream of the tnpB gene, similar to the gRNA used by Cas12. This ncRNA, termed an ωRNA, includes the sequence information of the end of the IS (scaffold region) and a short DNA stretch next to the IS (guide region, ˜20 nt). The ωRNA interacts with TnpB through its scaffold region, and brings the protein to the target site (complementary to the guide region), which is then cleaved by TnpB. Both IscB and TnpB have been shown to work in human cells, providing the starting point for development of more compact gene editing tools [22, 23].

[1322] In addition to IscB, IsrB, and TnpB, which, like CRISPR-Cas, are all found in prokaryotes, Altae-Tran et al. also found one eukaryotic OMEGA system, termed Fanzor (FIG. 3B). As Fanzor is often associated with a variety of transposases in transposable elements, the authors predicted that Fanzor may be an accessory protein for the transposable elements and works as a methyltransferase to regulate their transposition. However, it is not known if Fanzor uses an ωRNA analogously to other OMEGA systems nor is the biological function of Fanzor known. Nevertheless, the existence of a eukaryotic OMEGA system is a compelling candidate for development as a gene editing tool.

[1323] To understand Fanzor's mechanism of action and engineer it for genome editing, Applicant first selected a candidate ortholog to study based on computationally mining. Applicant then ex-perimentally determined that Fanzor is associated with an ωRNA, which is located in the downstream region of the locus, similar to TnpB. Preliminary results showed that Fanzor can induce double-strand breaks (DSBs) in an ωRNA-guided manner in the genome of human cell lines (unpublished data), but the efficiency of DSBs observed was too low (<1%) for therapeutic applications. To boost activity in human cells, Applicant took a two-pronged approach, engineering both the ωRNA and the Fanzor protein, creating an optimized system with an enhanced ωRNA guide and point mutants predicted to increase the affinity between the protein and nucleic acids. This optimized Fanzor-ωRNA complex is a prime candidate for further development as the platform for larger gene editing constructs, such as base editors, leading to efficient, compact gene editing tools that can be packaged in AAV, resulting in the next generation of gene editing therapeutics.

### Methods

### 2.1 Cloning

[1324] Plasmids used in this study were cloned using general cloning methodologies including Gibson assembly with NEBuilder HiFi DNA Assembly Master Mix (New England Biolabs,

[1325] E2621L) and golden gate assembly with a variety of type IIS restriction enzymes. Stbl3

[1326] Escherichia coli strain (Thermo Fisher, C737303) was used for DNA cloning. The sequences of cloned constructs were confirmed by whole plasmid sequencing following Tn5 tagmentation after mini-prep of plasmids [25] with QIAprep reagents (QIAGEN, 27106).

2.2 RNA Scaffold Prediction and pU6 guideRNA Expression Vector Construction

[1327] After screening Fanzor proteins for activity and ribonucleoprotein complex formation with ωRNA, one ortholog was selected for downstream engineering. The Fanzor ωRNA secondary structure was predicted by mFold [26]. The RNA-seq analysis for Fanzor ωRNA shows a second RNA species in addition to a major prominent variant, and 4 possible variants were tested for their ability to support human genome targeting. Each scaffold region of the ωRNA variants was cloned under the U6 promoter with two inverted BbsI type IIS restriction sites behind the U6 promoter. Guides were cloned into the scaffolds by golden gate assembly as two annealed complementary oligonucleotides. FIG. 4 shows an experimental workflow of small RNA-seq of ωRNA to identify ncRNA. RNA was pulled down using purified Fanzor protein. Small RNAs were then isolated from this pull-down, randomly fragmented, subjected to adaptor ligation, and amplified by PCR. NGS was then used to sequence the RNA reads, which were then mapped to the Fanzor locus.

### 2.3 Fanzor Mammalian Expression Vector Construction

[1328] Human-codon optimized Fanzor was cloned into two types of plasmids: one containing N-terminal NLS and HA tag (pMJ145), and the other containing C-terminal HA and NLS

[1329] tag (pMJ149). Fanzor mutants were constructed using site-directed mutagenesis with KLD Enzyme Mix (NEB, M0554S) as follows: 1 ng of each template (either pMJ145 or pMJ149) plasmid DNA was resuspended with 1.25 μl forward and reverse primers (final concentration: 0.5 μM). The mixture was amplified with 12.5 μl of Q5 HotStart High-Fidelity 2× Master Mix (NEB, M0492L) under the following thermal cycling conditions: 1 cycle, 98° C., 30 seconds; 25 cycles, 98° C., 10 seconds, 65°, 20 seconds, 72° C. 180 seconds; 1 cycle, 72° C., 300 seconds; 4° C. hold. 1 μl of the PCR product (FIG. 12A-12D and FIG. 13A-13B) was resuspended with 2.5 μl of 2×KLD Reaction Buffer, 0.5 μl of 10×KLD Enzyme Mix, and 1 μl of nuclease-free water. After incubation at room temperature for 30 minutes, 1 μl of the KLD mix from the previous reaction was mixed into Stbl3 competent cells, and then spread onto an ampicillin selection plate and incubated overnight at 37° C.

### 2.4 Mammalian Cell Culture and Transfection

[1330] Mammalian cell culture experiments were performed as previously described [22]. All transfection experiments were performed in the HEK293FT cell line (Thermo Fisher, R70007) grown in Dulbecco's modified Eagle medium with high glucose, sodium pyruvate and Gluta-MAX (Thermo Fisher, 35050061), additionally supplemented with 10% fetal bovine serum (VWR Seradigm, 89510-194). Transfections were performed with Lipofectamine 3000 (Thermo Fisher, L3000015) in 96-well plates unless otherwise noted. Cells were plated at approximately 2.0×10∧4 cells per well 16-20 hours before transfection. For each well on the plate, transfection plasmids (100 ng) were combined with OptiMEM Reduced Serum Medium (Thermo Fisher, 31985062) to a total of 5 μl and mixed with 0.2 μl of P3000 reagent. Separately, 5 μl of OptiMEM was combined with 0.3 μl of Lipofectamine 3000 reagent. Plasmid and Lipofectamine solutions were then combined, incubated at room temperature for 10 minutes, and pipetted onto cells.

### 2.5 Western Blotting

[1331] This analysis was previously described by Saito et al [26]. 2.0×10∧5 of HEK293FT cells were seeded in 12-well plates a day before transfection, and were transfected with a Fanzor (800 ng) and ωRNA expression vector (200 ng). After incubation at 37° C. for 2 days, cells were washed with ice-cold PBS and lysed in lysis buffer (50 mM Tris, pH 8.0, 150 mM NaCl, 1 mM EDTA, 0.1% TritonX-100) with Complete EDTA-free protease inhibitors (Roche 04693159001) for analysis. Samples were boiled for 10 minutes in NuPAGE Sample Buffer (Invitrogen NP0008) with 50 mM dithiothreitol and separated with 4-12% NuPAGE gels (Invitrogen NP0322). Proteins were transferred onto PVDF membranes (Thermo Fisher Scientific IB24001), probed with a primary antibody for either HA tag [HA.C5](ab18181) or α-tubulin (clone DM1A) (Sigma, T9026) or Histone H3 (D1H2) (Cell Signaling Technology 4499) for 1 hour and ECL Mouse IgG, HRP-linked whole antibody (GE Healthcare, NA931V, lot: 12227046) for 1 hour under 5% BOLT-QuickBlocker (G-Biosciences 786-011) in TBS blocking conditions and detected with ECL Western blotting reagent (Thermo Fisher Scientific 32209). FIG. 5 shows an experimental workflow of Western blotting to confirm Fanzor protein expression in HEK293FT cells. Cells are lysed by nonionic detergent containing buffer, and insoluble fractions including cellular debris were separated by table top centrifugation. Extracted proteins are then subjected to SDS-PAGE. After gel electrophoresis, proteins are transferred to PVDF membranes. These membranes are then incubated with primary antibody specific to epitope-tag attached to Fanzor. After blocking, a secondary antibody (labeled with horseradish peroxidase for chemiluminescence detection) is added to bind to the primary antibody. Chemiluminescence imaging is then used to visualize Fanzor protein expression.

### 2.6 Immunofluorescence

[1332] This analysis was previously described by Saito et al. [27]. 2.0×10∧5 of HEK293FT cells were seeded on a Poly-D-Lysine/Laminin coated coverglass (BD354087) in 12-well plates a day before transfection, and transfected with a Fanzor (800 ng) and ωRNA expression vector (200 ng). After incubation at 37° C. for 2 days, cells on the coverglass were washed with PBS, then fixed with 4% paraformaldehyde. After permeabilization with 0.5% TritonX-100 in PBS, the cells were incubated with a primary antibody for HA tag [HA.C5](ab18181) and GAPDH (14C10) (Cell Signaling Technology, 2118) at 4° C. overnight. Then, cells were further incubated with Alexa Fluor 488 Goat anti-Mouse IgG (H+L) Secondary Antibody (Invitrogen, A11001) and Alexa Fluor 568 Goat anti-Rabbit IgG (H+L) Secondary Antibody (invitrogen, A11036) in 10% goat serum (Sigma G9023-10ML) blocking buffer, and mounted with ProLong Gold Antifade Reagent with DAPI (Cell Signaling Technology 8961). Images were captured by STELLARIS 5 confocal microscope platforms (Leica), and processed by ImageJ.

### 2.7 Human Genome Cleavage Assay

[1333] The activity of Fanzor proteins on the human genome was tested as previously described [22]. Briefly, 2.0×10∧4 of HEK293FT cells in 96-well plates were co-transfected with combinations of Fanzor (80 ng) and ωRNA expression plasmid (20 ng). After 3 days of incubation at 37° C., the cells were resuspended in 40 μL QuickExtract DNA Extraction Solution (Lucigen, QE09050) and cycled at 65° C. for 15 minutes, 68° C. for 15 minutes, then 95° C. for 10 minutes to lyse cells. 2 μL of lysate was used as the template for each 12.5 μl-PCR reaction. Target sites were amplified with NEBNext High-Fidelity 2×PCR Master Mix (NEB, M0541L) under the following thermal cycling conditions: 1 cycle, 98° C., 30 seconds; 15 cycles, 98° C., 10 seconds, 65° C., 20 seconds, 72° C., 30 seconds; 1 cycle, 72° C., 30 seconds; 4° C. hold. 1 μL of this first PCR product was used for the template for each 10 μl-second PCR reaction: 1 cycle, 98° C., 30 seconds; 15 cycles, 98° C., 10 seconds, 63° C., 20 seconds, 72° C., 30 seconds; 1 cycle, 72° C., 30 seconds; 4° C. hold (total 30 cycles for first and second PCR reactions). Amplicons were sequenced using a MiSeq Reagent Kit v2, 300-cycle (Illumina, MS-102-2002). Indel efficiency was quantified using the CRISPResso2 pipeline [28]. FIG. 6 shows an experimental workflow for assessing Fanzor-mediated cleavage on the human genome. ωRNA expression vector targeting a locus on the human genome and Fanzor protein expression vectors are co-transfected into HEK293FT cells using lipofectamine. After incubation, cells are lysed to make the DNA accessible for sequencing. NGS is used to quantify indels, which are insertions or deletions, at the targeted locus.

### Results

### 3.1 Comparison of Cas12, TnpB, Fanzor

[1334] The computational identification of Fanzor as a eukaryotic relative of CRISPR-Cas12 and the OMEGA TnpB system revealed similarities in the domain architecture of these effector proteins (FIG. 7A). As a first step toward engineering Fanzor for use as a gene editing tool, Applicant sought to understand how that domain architecture relates to the mechanism of Fanzor by comparing the structures of these three proteins. One key question we were interested in answering was whether Fanzor, like Cas12 and TnpB, is similarly shaped to interact with an RNA guide and target DNA, as no obvious ωRNA was computationally identified for Fanzor in the original study [22]. Applicant compared experimentally solved Cas12a protein complexes with a gRNA [29] and target DNA structure to structural models of ISDra2 TnpB and Fanzor obtained using Alphafold2 [30]. Although Fanzor is significantly smaller than Cas12a, the core shape is very similar, including the REC (light purple) and bridge helix (magenta) domains (FIG. 7B). In Cas12a, the bridge helix domain interacts with the gRNA. This suggests that Fanzor may interact with an RNA guide in a similar manner as Cas12a. One major distinction between Cas12a and TnpB is the size of the RNA guide. In the case of Cas12a, the RNA guide (derived from the CRISPR RNA) is approximately 44 nt long [31], whereas TnpB uses an RNA guide (derived from the ωRNA) that is 150-200 nt long [22]. This difference highlights the trade-off between protein size and RNA guide length. Together, these results suggest that Fanzor does interact with an RNA guide, and that is likely closer in length to TnpB's than Cas12a's RNA guide.

### 3.2 Reconstitution of Fanzor in Human Cells

[1335] Based on structural comparisons, Applicant was encouraged to look for a non-coding RNA that Fanzor specifically binds to. To do this, Fanzor protein (hereafter called FZID16) was purified, and associated RNA species were sequenced, revealing an 88-90 nt-long ωRNA species downstream of the Fanzor ORF (FIG. 8A). The Fanzor protein is frequently located in a putative transposable element flanked by inverted terminal repeats [24], and this minimal ωRNA is derived from the right transposon end (RE) sequence and contains a flanking extension of 16nt at its 3′ end. This is similar to the TnpB ωRNA structure, in which the 3′ flanking extension guides TnpB to target DNA sites. Analogously, in vitro experiments by the Zhang lab showed that in the presence of this minimal ωRNA in which the 3′ extension was reprogrammed to a target of interest, purified FZID16 protein can cut a DNA substrate. TnpB, like its CRISPR relative Cas12a, requires a short sequence motif, called a transposon-associated motif (TAM) (or PAM in the case of Cas12a) for target recognition. In in vitro experiments, Fanzor was found to generate a DSB 20-21 bp downstream of the TAM (FIG. 8B). Based on this preliminary result, Applicant next sought to reconstitute Fanzor in human cells using the minimal ωRNA.

[1336] Because FZID16 is a fungal protein, Applicant first optimized the coding sequence for expression in human cells. Applicant also added a nuclear localization signal (NLS) to the gene to ensure its appropriate subcellular localization. To test if FZID16 is expressed in human cells, plasmids encoding human codon optimized NLS-tagged (either at the N-terminus or C-terminus) FZID16 were transfected into HEK293T human cell lines. To see whether ωRNA expression enhances the stability of the Fanzor protein, Applicant also tested co-expressing these FZID16 with the minimal ωRNA species under a U6 promoter (pMJ162). Two days after transfection, whole cell lysates of transfected cells were subjected to immunoblotting. In parallel, the sub-cellular localization of the proteins in HEK293FT cells was assessed by immunofluorescence. Both N-terminal and C-terminal tagged FZID16 were expressed in HEK293FT cells (FIG. 8C). Applicant observed that a large part of both N-terminal and C-terminal tagged proteins are localized in cytosol, but confirmed that some are localized in nucleus (FIG. 8D).

[1337] Applicant next tested FZID16 for DNA cleavage activity on the human genome. Applicant expressed both N-terminal and C-terminal NLS tagged FZID16 proteins together and an ωRNA bearing a 30nt guide sequence targeting the human genome. Applicant screened 12 guides targeting 8 different loci: EMX1, DNMT1, CCR5, VEGFA, B2M, hROSA26, H11, and LINE1, and confirmed that FZID16 induced indels at 2 of these sites with varying efficiency up to 0.36% (FIG. 8E). This finding established a baseline genome editing activity for Fanzor systems, providing a starting point for downstream engineering.

### Optimization of the ωRNA Scaffold

[1338] Fanzor uses a comparatively larger ωRNA relative to canonical Cas endonucleases, pro-viding a unique angle to engineer the system. Applicant sought to take advantage of this opportunity by optimizing the ωRNA structure to increase the cleavage activity of Fanzor. To engineer the ωRNA, Applicant performed an RNA pull-down using purified Fanzor and then sequenced the associated small RNAs. The minimal ωRNA showed up as a large peak in the RNA-sequencing trace. However, Applicant noticed that there is another peak at −200 bp to −150 bp upstream from the end of its ORF in addition to the downstream prominent peak (FIG. 9A) This suggests that the minimal ωRNA, which does not include this region, may lack features important for robust activity in human cells. To test this hypothesis, Applicant constructed 3 ωRNA scaffold variants (pMJ169, 170 and 171) to tile across this putative extended scaffold region. A second way to optimize the ωRNA is to increase its stability in human cells. Previous work by Karvelis et al. focused on TnpB used a guide RNA that contained a hepatitis delta virus (HDV) ribozyme at the 3′ end, which protects the RNA from degradation in the cell [23]. Thus, Applicant also synthesized an additional ωRNA scaffold variant with an HDV ribozyme attached to the 3′ terminus of the minimal ωRNA (pMJ168). Applicant further added the 30-nt guide sequence targeting B2M (guide ID7; hereafter gID7, FIG. 8E) to these 4 ωRNA scaffold variants. These engineered guides were then transfected into human cells alongside C-terminal NLS-tagged FZID16 to assess cleavage activity.

[1339] Applicant measured indel activity at the B2M target site and found that all extended ωRNA scaffold variants with gID7 facilitated activity (FIG. 9B and FIG. 10A-10E). The ωRNA with the longest scaffold (pMJ171) generated the highest indel frequency (0.78%), increasing the baseline cleavage with minimal ωRNA (0.17%) by ˜4.6 fold. Unexpectedly, Applicant found that the addition of the HDV ribozyme at the 3′ end of the ωRNA scaffold region is not effective on Fanzor ωRNA and that it decreased indel frequency. These results indicate that Fanzor ωRNA is a similar size as the one for TnpB (150-200 nt for ISDra2) [23], although there may be relevant differences in their behavior in human cells. See also Table 23 for ωRNA and plasmid constructs.

TABLE 23

| | Backbone plasmid | omegaRNA seq |
|---|---|---|
| lasmid | Sequence (without guide) | (without guide) |
| pMJ162 | (SEQ ID NO: 565) | (SEQ ID NO: 566) |
| pMJ168 | (SEQ ID NO: 567) | (SEQ ID NO: 568) |
| pMJ169 | (SEQ ID NO: 569) | (SEQ ID NO: 570) |
| pMJ170 | (SEQ ID NO: 571) | (SEQ ID NO: 572) |
| pMJ171 | (SEQ ID NO: 573) | (SEQ ID NO: 574) |
| pMJ204 | (SEQ ID NO: 575) | (SEQ ID NO: 576) |
| pMJ205 | (SEQ ID NO: 577) | (SEQ ID NO: 578) |
| pMJ206 | (SEQ ID NO: 579) | (SEQ ID NO: 580) |

### 3.4 Rational Mutagenesis of Fanzor

[1340] Applicant hypothesized that the low activity of Fanzor on the human genome may be due to weak interactions between the Fanzor protein and either the ωRNA or the target DNA. To test this, Applicant introduced positively charged residues (Lys/Arg/His) in the FZID16 protein to enhance such interactions. Using AlphaFold2, Applicant predicted the 3D structure of the FZID16 protein and identified a “pocket” site between the RuvC (gray) and Nuc domain (green) where double-stranded cleavage occurs (FIG. 10A) [30]. Applicant reasoned that the target DNA may sit in this pocket. Therefore, to increase the strength of the target DNA binding to the protein at this site, Applicant mutated FZID16 residues near the catalytic pocket site to arginine, a positively charged residue that attracts the negatively charged DNA backbone. Applicant cloned these FZID16 mutants into the same two expression vectors (N-terminal or C-terminal NLS). Applicant co-transfected HEK293FT cells with plasmids expressing FZID16 mutants and the ωRNA with the optimal scaffold, pMJ171, and then assayed indels at the targeted locus to assess the relative efficiency of these protein variants. Applicant found that the FZID16 variants showed little difference compared to wildtype, and perhaps even slightly less activity (FIG. 10B). See Table 6 for specific FZD16 mutations in the FZD16 variants in relation to FIG. 10B. Applicant also observed that C-terminal tagged constructs gave the highest levels of activity which is consistent with the cellular expression results (FIG. 8C).

[1341] Applicant next sought to test if increasing the affinity of Fanzor for the ωRNA would enhance activity. However, as the structure of this complex is not known, and therefore the specific amino acids that interact with the ωRNA are unknown, Applicant used a different approach to nominate candidate sites for mutation. Applicant compared the sequence of FZID16 to that of other orthologs, searching for positively charged conserved residues (Lys/Arg/His) among the other orthologs that are not conserved in FZID16 (FIG. 10C). Applicant reasoned that such residues would not be detrimental for protein function based on their conservation and that they would increase the strength of the interaction between the protein and nucleic acids through salt bridge formation. Applicant therefore introduced point mutations at 32 selected sites that met Applicant's criteria (FIG. 10D) by site-directed mutagenesis of both N-terminal HA-NLS and C-terminal NLS-HA tagged FZID16 constructs. Each mutant was expressed in HEK293FT cells with an extended ωRNA scaffold variant (from pMJ171) with gID7, and indel activity was measured at the B2M target site (FIG. 10E, Table 7) Applicant found that several of these point mutants exhibited higher activity than wildtype, in particular, resides in domains likely to interact with the ωRNA (e.g., K-Mut3 (mutation in REC), R-Mut3(WED), R-Mut4(WED), R-Mut5 (Bridge Helix), and H-Mut5 (REC)) led to higher indel rates. FIG. 11 shows further ωRNA variants evaluated for indel activity. These results show that rational protein engineering can improve Fanzor activity in human cells.

TABLE 5
Annotations for FIG. 12A-12D and 13A-13B

| Gel Lane | Sample Name | Experiment Aim |
|---|---|---|
| 1 | N-terminal NLS Pocket-Mut1 | pMJ145 |
| 2 | N-terminal NLS Pocket-Mut2 | pMJ145 |
| 3 | N-terminal NLS Pocket-Mut3 | pMJ145 |
| 4 | N-terminal NLS Pocket-Mut2 | pMJ145 |
| | (by different primers) | |
| 5 | N-terminal NLS Pocket-Mut5 | pMJ145 |
| 6 | No target amplification; | pMJ145 |
| | primer design was wrong. | |
| 7 | N-terminal NLS Pocket-Mut7 | pMJ145 |
| 8 | N-terminal NLS Pocket-Mut1 | pMJ145 |
| | (by different primers) | |
| 9 | No target amplification; | pMJ145 |
| | primer design was wrong. | |
| 10 | N-terminal NLS Pocket-Mut10 | pMJ145 |
| 11 | N-terminal NLS Pocket-Mut11 | |
| 12 | N-terminal NLS Pocket-Mut12 | pMJ145 |
| 13 | C-terminal NLS Pocket-Mut1 | pMJ149 |
| 14 | C-terminal NLS Pocket-Mut2 | pMJ149 |
| 15 | C-terminal NLS Pocket-Mut3 | pMJ149 |
| 16 | C-terminal NLS Pocket-Mut2 | pMJ149 |
| | (by different primers) | |
| 17 | C-terminal NLS Pocket-Mut5 | pMJ149 |
| 18 | No target amplification; | pMJ149 |
| | primer design was wrong. | |
| 19 | C-terminal NLS Pocket-Mut7 | pMJ149 |
| 20 | C-terminal NLS Pocket-Mut1 | pMJ149 |
| | (by different primers) | |
| 21 | No target amplification; | pMJ149 |
| | primer design was wrong. | |
| 22 | C-terminal NLS Pocket-Mut10 | pMJ149 |
| 23 | C-terminal NLS Pocket-Mut11 | pMJ149 |
| 24 | C-terminal NLS Pocket-Mut12 | pMJ149 |
| 25 | N-terminal NLS K-Mut1 | pMJ145 |
| 26 | N-terminal NLS K-Mut2 | pMJ145 |
| 27 | N-terminal NLS K-Mut3 | pMJ145 |
| 28 | N-terminal NLS K-Mut4 | pMJ145 |
| 29 | N-terminal NLS K-Mut5 | pMJ145 |
| 30 | N-terminal NLS K-Mut6 | pMJ145 |
| 31 | N-terminal NLS K-Mut7 | pMJ145 |
| 32 | N-terminal NLS K-Mut8 | pMJ145 |
| 33 | N-terminal NLS K-Mut9 | pMJ145 |
| 34 | N-terminal NLS K-Mut10 | pMJ145 |
| 35 | N-terminal NLS R-Mut1 | pMJ145 |
| 36 | N-terminal NLS R-Mut2 | pMJ145 |
| 37 | N-terminal NLS R-Mut3 | pMJ145 |
| 38 | N-terminal NLS R-Mut4 | pMJ145 |
| 39 | N-terminal NLS R-Mut5 | pMJ145 |
| 40 | N-terminal NLS H-Mut1 | pMJ145 |
| 41 | N-terminal NLS H-Mut2 | pMJ145 |
| 42 | N-terminal NLS H-Mut3 | pMJ145 |
| 43 | N-terminal NLS H-Mut4 | pMJ145 |
| 44 | N-terminal NLS H-Mut5 | pMJ145 |
| 45 | N-terminal NLS H-Mut6 | pMJ145 |
| 46 | N-terminal NLS H-Mut7 | pMJ145 |
| 47 | N-terminal NLS H-Mut8 | pMJ145 |
| 48 | N-terminal NLS H-Mut9 | pMJ145 |
| 49 | N-terminal NLS H-Mut10 | pMJ145 |
| 50 | N-terminal NLS H-Mut11 | pMJ145 |
| 51 | N-terminal NLS H-Mut12 | pMJ145 |
| 52 | N-terminal NLS H-Mut13 | pMJ145 |
| 53 | N-terminal NLS H-Mut14 | pMJ145 |
| 54 | N-terminal NLS H-Mut15 | pMJ145 |
| 55 | N-terminal NLS H-Mut16 | pMJ145 |
| 56 | N-terminal NLS H-Mut17 | pMJ145 |
| 57 | C-terminal NLS K-Mut1 | |
| 58 | C-terminal NLS K-Mut2 | pMJ149 |
| 59 | C-terminal NLS K-Mut3 | pMJ149 |
| 60 | C-terminal NLS K-Mut4 | pMJ149 |
| 61 | C-terminal NLS K-Mut5 | pMJ149 |
| 62 | C-terminal NLS K-Mut6 | pMJ149 |
| 63 | C-terminal NLS K-Mut7 | pMJ149 |
| 64 | C-terminal NLS K-Mut8 | pMJ149 |
| 65 | C-terminal NLS K-Mut9 | pMJ149 |
| 66 | C-terminal NLS K-Mut10 | pMJ149 |
| 67 | C-terminal NLS R-Mut1 | pMJ149 |
| 68 | C-terminal NLS R-Mut2 | pMJ149 |
| 69 | C-terminal NLS R-Mut3 | pMJ149 |
| 70 | C-terminal NLS R-Mut4 | pMJ149 |
| 71 | C-terminal NLS R-Mut5 | pMJ149 |
| 72 | C-terminal NLS H-Mut1 | pMJ149 |
| 73 | C-terminal NLS H-Mut2 | pMJ149 |
| 74 | C-terminal NLS H-Mut3 | pMJ149 |
| 75 | C-terminal NLS H-Mut4 | pMJ149 |
| 76 | C-terminal NLS H-Mut5 | pMJ149 |
| 77 | C-terminal NLS H-Mut6 | pMJ149 |
| 78 | C-terminal NLS H-Mut7 | pMJ149 |
| 79 | C-terminal NLS H-Mut8 | pMJ149 |
| 80 | C-terminal NLS H-Mut9 | pMJ149 |
| 81 | C-terminal NLS H-Mut10 | pMJ149 |
| 82 | C-terminal NLS H-Mut11 | pMJ149 |
| 83 | C-terminal NLS H-Mut12 | pMJ149 |
| 84 | C-terminal NLS H-Mut13 | pMJ149 |
| 85 | C-terminal NLS H-Mut14 | pMJ149 |
| 86 | C-terminal NLS H-Mut15 | pMJ149 |
| 87 | C-terminal NLS H-Mut16 | pMJ149 |
| 88 | C-terminal NLS H-Mut17 | pMJ149 |

TABLE 6
FZD16 Variant mutations

| | Mutation in FZID16 with respect to |
|---|---|
| ID in FIG. 10B | reference FZD16 sequence |
| Pocket-Mut1 | I382R/D383R |
| Pocket-Mut2 | F537S |
| Pocket-Mut3 | L538R |
| Pocket-Mut5 | S545R |
| Pocket-Mut7 | V381R/1382R |
| Pocket-Mut8 | I382R/D383R |
| Pocket-Mut9 | S609R |
| Pocket-Mut10 | K523R |
| Pocket-Mut11 | V629R |
| Pocket-Mut12 | W103R |

TABLE 7
FZID16 Variant Mutations

| | Mutation in FZID16 with respect to |
|---|---|
| ID in FIG. 10E | reference FZD16 sequence |
| K-Mut1 | G127K |
| K-Mut2 | D229K |
| K-Mut3 | Q255K |
| K-Mut4 | I280K |
| K-Mut5 | N355K |
| K-Mut6 | N368K |
| K-Mut7 | N396K |
| K-Mut8 | V409K |
| K-Mut9 | E425K |
| K-Mut10 | E426K |
| R-Mut1 | Q168R |
| R-Mut2 | Q259R |
| R-Mut3 | C310R |
| R-Mut4 | C318R |
| R-Mut5 | A417R |
| H-Mut1 | R39H |
| H-Mut2 | Q116H |
| H-Mut3 | Q168H |
| H-Mut4 | R187H |
| H-Mut5 | Y256H |
| H-Mut6 | Q259H |
| H-Mut7 | R267H |
| H-Mut8 | R305H |
| H-Mut9 | C318H |
| H-Mut10 | R348H |
| H-Mut11 | R387H |
| H-Mut12 | R401H |
| H-Mut13 | R455H |
| H-Mut14 | R460H |
| H-Mut15 | R493H |
| H-Mut16 | Y542H |
| H-Mut17 | R550H |

### Discussion

[1342] A critical bottleneck to expanding the utility of therapeutic gene editing is the development of compact gene editing tools that can be efficiently delivered with currently approved delivery modalities, like AAV. Here, Applicant provides evidence that the eukaryotic OMEGA system Fanzor is an ideal candidate to meet this need. Applicant establishes that Fanzor can be used to edit the genome of human cells and present two approaches for engineering this system to boost activity, considering both the ωRNA and the protein itself. Together, these optimizations substantially increase activity over the baseline editing level and demonstrate the potential for Fanzor as a compact gene editing tool.

[1343] Applicant selected an initial ortholog for development, FZID16, and began by characterizing its expression level and localization in human cells by Western blotting and immunofluorescence, respectively. Applicant found that C-terminal NLS tagged FZID16 is expressed more highly than N-terminal tagged FZID16. Although Applicant used typical SV40-derived NLS for FZID16, the immunofluorescence results revealed that both proteins are still localized mainly in the cytosol, suggesting that for future optimizations, a stronger bipartite NLS or putting an NLS on both the N-terminus and C-terminus at the same time may be tested to increase nuclear localization. However, Applicant also have to consider the position of NLS tag carefully as Applicant observed differences in activity between N- and C-NLS tagged point mutants (FIG. 10E). Future structural analysis of the Fanzor-ωRNA complex would help to optimize NLS tag design.

[1344] Compared to the gRNAs used by Cas systems, the Fanzor ωRNA is substantially larger, providing us with an opportunity to engineer this component of the system. Like Cas9, Applicant observed differences in requires sequences of the gRNA for activity in human cells compared to in vitro experiments [8]. Applicant found that by extending the 5′ boundary of the ωRNA, Applicant were able to improve cleavage activity on the human genome by ˜3 fold. Applicant also explored whether addition of an HDV self-cleaving ribozyme at the 3′ end of the ωRNA, which has been reported to increase activity of TnpB in human cells [23], produced a similar effect with Fanzor. However, this decreased indel frequency. Nevertheless, it would be interesting to see whether using different self-cleaving ribozymes (such as hammerhead and hairpin) could result in increased activity.

[1345] Additionally, Applicant generated a number of Fanzor proteins variants that contained positively charged amino acid residues predicted to increase the affinity between the protein and nucleic acids. Although introducing these residues near the catalytic pocket did not significantly change indel frequencies relative to the wild-type protein, when positively charged residues were introduced at sites that contain such residues in other Fanzor orthologs, Applicant observed a ˜10 fold increase in activity. Among the 32 candidate point mutants at conserved sites, the two that led to the highest increases in activity were in the REC and WED domain, supporting Applicant's hypothesis that altering the protein to increase affinity for nucleic acids is a viable strategy for increasing activity. As with the NLS tag optimizations, determination of the Fanzor structure in complex with the guide RNA (and target DNA) would nominate additional candidate residues to mutate.

[1346] For future Fanzor protein modifications, Applicant could use directed evolution to increase indel activity, a strategy that has been used to optimize other proteins for genome editing [32]. Applicant could perform a screen in E. coli that uses a selection-based method to isolate Fanzor mutants that exhibit high activity. In this screening process, Applicant would introduce a plasmid containing a lethal gene targeted by the ωRNA and a library of Fanzor variants. This would allow us to select only those Fanzor mutants that can cleave the lethal gene. Applicant would then isolate and sequence the plasmids from surviving E. coli to identify Fanzor variant candidates to test in human cells.

[1347] The small size of Fanzor makes it an ideal platform to build out base editing constructs, and a key next step will be to create fusions between Fanzor and other proteins, such as deaminases, to generate a suite of compact genome editing tools. Finally, it will also be important to assess the immunogenicity of Fanzor in a mouse model as a first step toward translating this powerful new tool to the clinic.

### Conclusion

[1348] Although other eukaryotic RNA-guided systems exist, Fanzor represents the first example of such a eukaryotic system that exhibits specific guide loading, restricting its activity to guide-encoded targets. This built-in specificity, its compact size, and its eukaryotic origins all contribute to its suitability for use in therapeutic applications. Here, Applicant demonstrate that Fanzor can induce cleavage at targeted loci in the human genome. Applicant were also able to engineer the system to boost efficiency. Using a two-pronged approach, Applicant mutated both components of the Fanzor system: ωRNA and the Fanzor protein itself. Establishing the correct boundaries of ωRNA and installing Fanzor mutations that promote DNA-binding affinity increased baseline indel activity by 10 fold. Fanzor's compact size opens up a new realm of possibilities for in vivo clinical therapies. In particular, Fanzor's small size makes it ideally suited to use in base editing constructs, which have the potential to treat a large number of genetic diseases.

[1349] Applicant used Fanzor to begin solving a major challenge in gene therapy: the development of compact genome editing tools that can be delivered with existing delivery modalities. Fanzor is a eukaryotic relative of the powerful CRISPR-Cas systems. Like CRISPR-Cas, Fanzor is an RNA-guided system, which Applicant shows can be reprogrammed to cleave targeted locations in the human genome. To develop Fanzor toward clinical use, Applicant engineered both the RNA guide and protein component of this system, arriving at an engineered system with dramatically enhanced activity. This study unlocks the potential of this unusual new system as a therapy to treat thousands of genetic diseases.

### REFERENCES FOR EXAMPLE 1

[1350] [1] D. Cyranoski. Crispr gene-editing tested in a person for the first time. Nature, 539(7630), 2016.
[1351] [2] H. Frangoul, D. Altshuler, M. D. Cappellini, Y.-S. Chen, J. Domm, B. K. Eustace, J. Foell, J. de la Fuente, S. Grupp, R. Handgretinger, et al. Crispr-cas9 gene editing for sickle cell disease and _-thalassemia. New England Journal of Medicine, 384(3):252{260, 2021.
[1352] [3] L. Xu, J. Wang, Y. Liu, L. Xie, B. Su, D. Mou, L. Wang, T. Liu, X. Wang, B. Zhang, et al. Crispr-edited stem cells in a patient with hiv and acute lymphocytic leukemia. New England Journal of Medicine, 381(13):1240{1247, 2019.
[1353] [4] F. J. Bustos, E. Ampuero, N. Jury, R. Aguilar, F. Falahi, J. Toledo, J. Ahumada, J. Lata, P. Cubillos, B. Henr__quez, et al. Epigenetic editing of the dlg4/psd95 gene improves cognition in aged and alzheimer's disease mice. Brain, 140(12):3252{3268, 2017.
[1354] [5] R. Moore, A. Chandrahas, and L. Bleris. Transcription activator-like e_ectors: a toolkit for synthetic biology. ACS synthetic biology, 3(10):708{716, 2014.
[1355] [6] D. Carroll. Progress and prospects: zinc-_nger nucleases as gene therapy agents. Gene therapy, 15(22):1463{1468, 2008.
[1356] [7] N. E. Sanjana, L. Cong, Y. Zhou, M. M. Cunni_, G. Feng, and F. Zhang. A transcription activator-like e_ector toolbox for genome engineering. Nature protocols, 7(1):171{192, 2012.
[1357] [8] L. Cong, F. A. Ran, D. Cox, S. Lin, R. Barretto, N. Habib, P. D. Hsu, X. Wu, W. Jiang, L. A. Marra_ni, et al. Multiplex genome engineering using crispr/cas systems. Science, 339(6121):819{823, 2013.
[1358] [9] P. Mali, L. Yang, K. M. Esvelt, J. Aach, M. Guell, J. E. DiCarlo, J. E. Norville, and G. M. Church. Rna-guided human genome engineering via cas9. Science, 339(6121):823{826, 2013.
[1359] [10] F. Ran, P. D. Hsu, J. Wright, V. Agarwala, D. A. Scott, and F. Zhang. Genome engineering using the crispr-cas9 system. Nature protocols, 8(11):2281{2308, 2013.
[1360] [11] K. S. Makarova, Y. I. Wolf, J. Iranzo, S. A. Shmakov, O. S. Alkhnbashi, S. J. Brouns, E. Charpentier, D. Cheng, D. H. Haft, P. Horvath, et al. Evolutionary classi_cation of crispr{cas systems: a burst of class 2 and derived variants. Nature Reviews Microbiology, 18(2):67{83, 2020.
[1361] [12] T. A. Kazi and S. R. Biswas. Crispr/dcas system as the modulator of gene expression. Progress in Molecular Biology and Translational Science, 178:99{122, 2021.
[1362] [13] A. Eid, S. Alshareef, and M. M. Mahfouz. Crispr base editors: genome editing without double-stranded breaks. Biochemical Journal, 475(11):1955{1964, 2018.
[1363] [14] P. D. Hsu, E. S. Lander, and F. Zhang. Development and applications of crispr-cas9 for genome engineering. Cell, 157(6):1262{1278, 2014.
[1364] [15] F. Uddin, C. M. Rudin, and T. Sen. Crispr gene therapy: applications, limitations, and implications for the future. Frontiers in oncology, 10:1387, 2020.
[1365] [16] M. F. Naso, B. Tomkowicz, W. L. Perry, and W. R. Strohl. Adeno-associated virus (aav) as a vector for gene therapy. BioDrugs, 31(4):317{334, 2017.
[1366] [17] J.-q. Liu and T. Li. Crispr-cas9-mediated loss-of-function screens. Frontiers in Life Science, 12(1):1{13, 2019.
[1367] [18] T. S. Nambiar, P. Billon, G. Diedenhofen, S. B. Hayward, A. Taglialatela, K. Cai, J.-W. Huang, G. Leuzzi, R. Cuella-Martin, A. Palacios, et al. Stimulation of crispr-mediated homology-directed repair by an engineered rad18 variant. Nature communications, 10(1):1{13, 2019.
[1368] [19] A. Lapinaite, G. J. Knott, C. M. Palumbo, E. Lin-Shiao, M. F. Richter, K. T. Zhao, P. A. Beal, D. R. Liu, and J. A. Doudna. Dna capture by a crispr-cas9{guided adenine base editor. Science, 369(6503):566{571, 2020.
[1369] [20] S. Demirci, A. Leonard, J. J. Haro-Mora, N. Uchida, and J. F. Tisdale. Crispr/cas9 for sickle cell disease: applications, future possibilities, and challenges. Cell Biology and Translational Medicine, Volume 5, pages 37{52, 2019.
[1370] [21] D. H. Jo, D. W. Song, C. S. Cho, U. G. Kim, K. J. Lee, K. Lee, S. W. Park, D. Kim, J. H. Kim, J.-S. Kim, et al. Crispr-cas9{mediated therapeutic editing of rpe65 ameliorates the disease phenotypes in a mouse model of leber congenital amaurosis. Science advances, 5(10):eaax1210, 2019.
[1371] [22] H. Altae-Tran, S. Kannan, F. E. Demircioglu, R. Oshiro, S. P. Nety, L. J. McKay, M. Dlaki_c, W. P. Inskeep, K. S. Makarova, R. K. Macrae, et al. The widespread is200/is605 transposon family encodes diverse programmable ma-guided endonucleases. Science, 374(6563):57{65, 2021.
[1372] [23] T. Karvelis, G. Druteika, G. Bigelyte, K. Budre, R. Zedaveinyte, A. Silanskas, D. Kazlauskas, _C. Venclovas, and V. Siksnys. Transposon-associated tnpb is a programmable ma-guided dna endonuclease. Nature, 599(7886):692{696, 2021.
[1373] [24] W. Bao and J. Jurka. Homologues of bacterial tnpb is605 are widespread in diverse eukaryotic transposable elements. Mobile DNA, 4(1): 1{16, 2013.
[1374] [25] J. L. Schmid-Burgk, L. Gao, D. Li, Z. Gardner, J. Strecker, B. Lash, and F. Zhang. Highly parallel pro_ling of cas9 variant speci_city. Molecular cell, 78(4):794{800, 2020.
[1375] [26] M. Zuker. Mfold web server for nucleic acid folding and hybridization prediction. Nucleic acids research, 31(13):3406{3415, 2003.
[1376] [27] M. Saito, D. Hess, J. Eglinger, A. W. Fritsch, M. Kreysing, B. T. Weinert, C. Choudhary, and P. Matthias. Acetylation of intrinsically disordered regions regulates phase separation. Nature chemical biology, 15(1):51{61, 2019.
[1377] [28] K. Clement, H. Rees, M. C. Canver, J. M. Gehrke, R. Farouni, J. Y. Hsu, M. A. Cole, D. R. Liu, J. K. Joung, D. E. Bauer, et al. Crispresso2 provides accurate and rapid genome editing sequence analysis. Nature biotechnology, 37(3):224{226, 2019.
[1378] [29] T. Yamano, H. Nishimasu, B. Zetsche, H. Hirano, I. M. Slaymaker, Y. Li, I. Fedorova, T. Nakane, K. S. Makarova, E. V. Koonin, et al. Crystal structure of cpfl in complex with guide ma and target dna. Cell, 165(4):949{962, 2016.
[1379] [30] J. Jumper, R. Evans, A. Pritzel, T. Green, M. Figurnov, O. Ronneberger, K. Tunyasuvunakool, R. Bates, A._Z__dek, A. Potapenko, et al. Highly accurate protein structure prediction with alphafold. Nature, 596(7873):583{589, 2021.
[1380] [31] B. Zetsche, J. S. Gootenberg, O. O. Abudayyeh, I. M. Slaymaker, K. S. Makarova, P. Essletzbichler, S. E. Volz, J. Joung, J. Van Der Oost, A. Regev, et al. Cpf1 is a single ma-guided endonuclease of a class 2 crispr-cas system. Cell, 163(3):759{771, 2015.
[1381] [32] J. K. Lee, E. Jeong, J. Lee, M. Jung, E. Shin, Y.-h. Kim, K. Lee, I. Jung, D. Kim, S. Kim, et al. Directed evolution of crispr-cas9 to increase its specificity. Nature communications, 9(1): 1{10, 2018.

### Example 2

[1382] FIG. 14 shows the identification of eukaryotic TnpB-like proteins. 11 loci are confirmed (named Spu locus v1-v11). There was no intron. They are well structured by AlphaFold prediction. There are clear transposon ends and ncRNA region was clearly identifiable.

[1383] FIG. 15A-15B shows that Spizellomyces punctatus (ATCC48900; Spu) expresses ncRNA from downstream of a Fanzor open reading frame (ORF).

[1384] FIG. 16A-16C shows an experimental strategy and results for a Fanzor RNP pull down assay in yeast and RNAseq analysis. RNP pull down assay with yeast worked for ncRNA identification for Spu.

[1385] FIG. 17 shows a strategy for a Fanzor RNP pooled pull down assay. The exemplary strategy shown demonstrates 12 contigs in 1 transformation for 1 L of yeast culture.

[1386] FIG. 18A-18B shows results for additional candidates with no introns (a single ORF in the transposon). FIG. 18A shows results from Torulaspora delbrueckii. FIG. 18B shows results for Naegleria lovaniensis.

[1387] FIG. 19A-19B shows results for additional candidates with no introns (2-4 ORFs in the transposon. A catalytic DDE was conserved.

[1388] FIG. 20 shows contigs tested in yeast using the methods described herein.

[1389] FIG. 21 shows an Spu RNP from yeast and RNAseq results. 87-88 nt at analogous position was always observed.

[1390] FIG. 22A-22B shows a T. del. RNP from yeast and RNAseq results. No ncRNA was identified from other yeast species Ashbya gossypii or Eremothecium cymbalariae DBVPG #7215.

[1391] FIG. 23A-23C hows Nlov Fanzor RNP from yeast and RNAseq results.

[1392] FIG. 24A-24B shows Mimiviridae Fanzor RNP from yeast and RNAseq results.

[1393] FIG. 25A-25B shows results from an in vitro clevage/TAM screen with Fanzor-RNP from yeast.

[1394] FIG. 26 shows results demonstrating that Spu Fanzor is active in human cells. In particular, at least the Fanzor Applicant refers to as FZID16 was observed to be active in human cells. Applicant has identified that this Spu has several Fanzor copies in the genome with sequences that vary slightly from one another.

[1395] Tables 8-9 show Fanzor plasmids used in Examples 1 and 2.

TABLE 8
Fanzor plasmids for Examples 1 and 2.

| Plasmid Name | Sequence |
|---|---|
| pMJ145_pCMV-HA-NLS-Hs FZID16 | (SEQ ID NO: 581) |
| pMJ149_pCMV-Hs FZID16-NLS-HA | (SEQ ID NO: 582) |
| pMJ162_pU6-ID16-empty | (SEQ ID NO: 583) |
| pMJ168_pU6-HDV-ID16-empty | (SEQ ID NO: 584) |
| pMJ169 pU6-ID16_RNA1-empty | (SEQ ID NO: 585) |
| pMJ170_pU6-ID16_RNA2-empty | (SEQ ID NO: 586) |
| pMJ171_pU6-ID16_RNA3-empty | (SEQ ID NO: 587) |
| pMJ204_pU6-ID16_RNA4-empty | (SEQ ID NO: 588) |
| pMJ205_pU6-ID16_RNA5-empty | (SEQ ID NO: 589) |
| pMJ206_pU6-ID16_RNA6-empty | (SEQ ID NO: 590) |

TABLE 9
FZID16 Fanzor ortholog

| | | | Native | |
|---|---|---|---|---|
| | | | Locus | |
| | Sequence | | Accession | |
| Name | (Human codon optimized) | Native Fanzor Sequence | No. | Description |
| FZID16 | ATGCCGCCTAAGAAGAAGCAGAAGCTGGA | ATGCCGCCAAAGAAGAAGCAAAA | NW_ | Spizello- |
| | ACGGCTGAAGAAACTGGACAAGCCCACAC | GCTTGAAAGGCTCAAAAAACTCGA | 015971553 | myces |
| | TGCACACCTGTAACAAGACCAGCTTCGCC | CAAACCCACCTTACATACCTGCAA | | punctatus |
| | AAGGCCTTCCTGCCTAACGAGACATACCG | CAAGACGTCCTTTGCAAAGGCTTT | | DAOM |
| | GCAGCGGCTGCTGGACTATATCGCCATCAT | CTTGCCTAATGAGACCTACCGGCA | | BR117 |
| | TCACCAGCTGGCCGACCACGCCTCTCACGC | GCGTCTTCTAGATTACATCGCCATC | | chromosome |
| | CCTGAAGTTTTACATCCTGAGCACCTCCAC | ATCCATCAACTCGCTGACCATGCTT | | Unknown |
| | CAGCAGCTTCCCTGTGGTGCACGAGGATA | CCCACGCTCTCAAATTCTACATCCT | | supercont1. |
| | CCATCGAGGCCATCCTGTACCTGCTGAACA | CTCTACATCCACATCGTCTTTCCCG | | 17, whole |
| | AGGGCGAAGCCTGGCATCCCAGAAAAGAG | GTTGTTCACGAAGATACAATCGAA | | genome |
| | GCCAAGAAGGCCTGGCGGGATTGCCTGCT | GCCATTCTCTATCTTCTCAACAAGG | | shotgun |
| | GCCTTACGTGCAGAGATACTGCCAGATCGT | GGGAGGCTTGGCATCCAAGAAAGG | | sequence |
| | GGGCTTCATTCACCCCAACCTGAGAGGCG | AAGCAAAGAAGGCATGGCGGGAT | | |
| | AGCAGCAGAGCATCAACTACCTGACCGTG | TGTTTGTTGCCATATGTTCAACGGT | | |
| | TCCATGATGACCAACCTGAAAGTGAACGT | ACTGCCAAATCGTCGGCTTCATTC | | |
| | GCAAGAGCACTTCATGCAGATGCTGCTGC | ATCCAAATCTACGAGGCGAGCAGC | | |
| | GGTACATCAATCTGCGCTTCGACGTGAAG | AGTCAATTAATTACCTGACAGTGA | | |
| | GGCCAGAAGCAGAGACTGCCTCCTAAGAG | GTATGATGACGAACCTGAAAGTCA | | |
| | CGACGCCCGCAAGGCCTTTTTCACCCGGCT | ACGTTCAAGAGCATTTCATGCAGA | | |
| | GAGATACCTGAAGTCCGTGTTCCTGTTCGA | TGCTGCTCCGGTACATTAATCTGCG | | |
| | CGTGGTGCCCGAGCTGGAATTCCTGGACG | GTTCGACGTGAAGGGACAGAAGCA | | |
| | ATCTGACCCCTCTGGAAAGCGAGGTGCTG | GCGACTGCCACCGAAAAGCGATGC | | |
| | GAAGAGATCTGGTCCCTGGACCTGCCTTTT | GCGAAAGGCTTTCTTTACTCGGCT | | |
| | CTGCCCAACGATCCTCTGGCCTACGCCATC | ACGCTACTTGAAGTCGGTTTTCCTT | | |
| | GTGGCCGATCCTATGAGCTTCTTCCCAGCC | TTTGATGTGGTGCCCGAGTTGGAG | | |
| | TACTGCAAGCTGAGCGGCCTGTACGAGCA | TTCCTGGATGACTTGACACCATTG | | |
| | GTACGGCTTCCAGCGGTTTAGCGCCATTCC | GAGAGCGAGGTTCTTGAAGAGATT | | |
| | TCTGCGGAGAAGCCTGATCCAGTCTCACGT | TGGTCATTGGATCTCCCATTCCTTC | | |
| | GCGGATCGACACCATCATCCTGTATCAGCA | CTAACGATCCCCTTGCCTACGCCAT | | |
| | CATCCTGTGCATCACCAGACGGGACGCCG | TGTTGCTGATCCGATGTCATTTTTT | | |
| | AGACAGTGGAAAAGGACGACCTGTGGATG | CCCGCGTACTGCAAACTCTCTGGG | | |
| | AGAGTGTGCAACCTGTGCACCAAAGCCTT | CTGTATGAACAATATGGCTTCCAA | | |
| | CCGGTCCAGATGCGGCATGCACTTCGAGG | CGGTTCAGTGCGATACCTCTGCGC | | |
| | GCAGCATCACAACAGATGGCGCCAGCGTG | CGCTCGCTCATTCAAAGTCACGTG | | |
| | TCCGTGTACCTGAAACACCCTGAGGCCGAT | CGAATCGACACCATCATCCTGTAC | | |
| | AAGTACGGCAAGAGAGGCGCCAGAAAGTC | CAGCATATCCTTTGCATCACGCGG | | |
| | CGCCAATACTGTGGCCGCCGAAGTGAAGG | CGAGACGCAGAAACTGTCGAAAA | | |
| | CCCTGTACGTGGAAAACAACCTGCCTGCCT | GGATGATCTGTGGATGCGCGTCTG | | |
| | GTAGAGCCGCCGAGAACGTGGTGGTCATC | CAATCTATGTACCAAGGCTTTTCG | | |
| | GACCCCAACAAGCGGGATATCCTGTACTG | GTCTCGCTGTGGTATGCATTTTGAA | | |
| | CCAGGACAGCAACGGCACCACCTTCAGAT | GGCTCAATCACCACGGATGGAGCC | | |
| | ACACCGCCAACCAGAGAGCCGTGGAAACC | TCGGTGTCTGTATACCTAAAGCAC | | |
| | GGCAGCAGAAGATTCGCCAAGCGGCGGGA | CCAGAAGCAGACAAGTATGGAAA | | |
| | AGCCATGAAGGAAGAAGCCGGCGTTGACC | GCGCGGAGCGAGAAAGTCAGCAA | | |
| | TGATCGAGAGCAGAATCCCTAGCCACAAG | ACACGGTGGCTGCAGAGGTTAAAG | | |
| | ACCATGAACCTGATGGACTTCACCAGATA | CGCTTTATGTGGAGAACAACTTAC | | |
| | CCTGCTCGTGCGGAGAGCCGACTGGGACA | CTGCTTGTCGAGCAGCAGAGAATG | | |
| | GACGGAAAGAGTTCTACTCTCACCCCGCTC | TCGTCGTTATCGACCCAAACAAGC | | |
| | ACACCCGGTGGAAGTGGCACAGCTTCATC | GCGACATTCTCTACTGCCAAGACA | | |
| | AACCGGCAGAAGTCCGAGAGCGACCTGAT | GCAATGGTACGACATTTCGCTACA | | |
| | CAGCAACATGCGGAACAAATACGGCGAGA | CCGCCAACCAGCGAGCCGTGGAGA | | |
| | ACTTCACCGTGGTCATGGGCGATTGGAGC | CTGGAAGCCGGCGGTTTGCAAAGA | | |
| | GACGCTGGAAGAACCGCCAGATTCCAGAC | GACGAGAAGCAATGAAGGAAGAA | | |
| | CAGCAGCAAGACCAAAGGCTGGCGGACCC | GCTGGAGTTGATCTCATAGAATCA | | |
| | TGTTCAAGCGGAACCGGATCGATTGCTTCC | CGAATACCATCCCACAAAACAATG | | |
| | TGCTGGACGAGTACAAGACCTCCAGCGTG | AACCTCATGGACTTCACTCGCTAC | | |
| | TGCCCTAGATGCAGCAGCAGCGAGTTCGT | CTTCTCGTTCGCCGCGCTGATTGGG | | |
| | GGAAAAGAAGTTCAAGACCCGGCCTCACA | ATCGTCGCAAGGAATTCTATTCGC | | |
| | GCAGACCCTGGCGAAGAAGAGAGGGCAA | ATCCTGCTCATACTCGATGGAAAT | | |
| | GATCGAGAAGGTGCACGGCCTGCTGGGCT | GGCACTCCTTCATAAACCGTCAGA | | |
| | GCACCAATCCTAATTGTCTGCAGCAGGCCT | AGAGCGAATCAGACCTCATAAGTA | | |
| | GGACCAGCGGCATGAGATACTGGAACCGG | ACATGCGCAACAAGTACGGTGAAA | | |
| | GACATGCTGAGCACATGCAACATGCTGCT | ACTTTACTGTTGTGATGGGTGATTG | | |
| | GATCGTGCGGTCCATGCTGGATGGCCATG | GAGCGACGCTGGTCGAACTGCGAG | | |
| | GCAGACCTGAGGTGTTCTCTAGATCTGTGC | ATTTCAGACCTCATCAAAGACAAA | | |
| | CTGCCGTGGCCtga (SEQ ID NO: 591) | AGGCTGGCGCACCCTCTTTAAGCG | | |
| | | CAACCGCATTGATTGTTTCCTTCTC | | |
| | | GACGAGTACAAGACCTCATCTGTT | | |
| | | TGCCCTCGCTGTTCCTCATCTGAGT | | |
| | | TTGTGGAGAAAAAATTCAAAACAC | | |
| | | GACCTCATTCAAGACCTTGGCGCC | | |
| | | GTCGTGAAGGCAAGATTGAAAAAG | | |
| | | TCCACGGACTGCTGGGTTGTACCA | | |
| | | ACCCTAACTGTTTGCAGCAAGCCT | | |
| | | GGACATCGGGAATGCGCTACTGGA | | |
| | | ATCGAGATATGCTGTCAACCTGCA | | |
| | | ACATGCTATTGATTGTGAGATCAA | | |
| | | TGTTGGATGGACACGGTAGACCAG | | |
| | | AAGTGTTCAGCAGGAGTGTTCCAG | | |
| | | CCGTAGCGTAG (SEQ ID NO: | | |
| | | 592) | | |

### Example 3—Identifying Representative Remote Fanzor Polypeptides

[1396] Described in this example are strategies for identifying remote Fanzor polypeptides and homologues.

[1397] Applicant mapped about 214 million structures from Alphafold to UniRef50 to reduce redundancy. Structures associated with a low score confidence were discarded. Applicant then annotated the taxonomy for each structure. Applicant then did a structural mining of the structures (using Dali with custom scripts) following the taxonomy (phylum by phylum) starting from Fanzor16 (Spu, see e.g., example 2 herein). For the seeds, Applicant used the RuvC+Bridge Helix (BH) domains, the REC domain, and the WED domain, all independently. Applicant then manually curated the results. For each hit, Applicant then performed genomic mining with an extremely narrow threshold to identify very close homologs in order to align their genomic vicinity and predict the ends. Representative results in which ends were curated are shown in Tables 10-12 and FIGS. 31-33.

TABLE 10
Representative Mollusk Fanzor Polypeptides

| | | |
|---|---|---|
| Mercenaria | XP_ | MNRKRSLSPLTLWKAAHVFKHQNLECWFQFAKDGESHNKVFASDFERTRKRAKLEDEKTFMTT |
| | 045183411.1 | FSVGIRPTRNQKRVLNEMLRVSNHAYNWCNYLVCEKNLKPKEYDLQKYVSKTNSSDVPTDFRM |
| | | NNNDDWYFNNKMTKIRDAACKDFCTMYKSALTNQRKKKKYIKTVSLKDKDDMNPSHGAFEIQ |
| | | KALIRKLKETDSDDYDILNNCLSVMADNFTMRRKDVRNRFLRLSKPVSKLPPLEHAVKIVKTAK |
| | | GKFVLHIPCEPTYTRSKRYDEPFDSLCGIDPGGRTFLTIYDPSKPRAFQIASRCKAPSKPVRKRTKK |
| | | KGEKWHRKKKSQRRVGSTIDKIDSLHAKKDYVNSKMQAAIRRKQPQAKKDRQRQLQKVYYQL |
| | | GNVIRWVHLRCTYNLMQYSYVAIGKIGIPSIIRRQCNGKRRRINKKSVRHLTVWNHCKFRERLV |
| | | YRAKGTKTNVIVQDESYTSKTCSECGTINSKLGGSETFKCTNPSCDYITNRDVNGAKNILRKSLGI |
| | | GSIKTYRA (SEQ ID NO: 593) |
| Mercenaria | XP_ | MKRKREQMTLWKAAFVNGRETFKSWIDKARMLELNCDISSASSTHYSDLDLKSKCAKIEDKFM |
| | 045186055.1 | CTFSVGIRPTSKQNRTLNQMLKVSNYAYNWCNHLVKEKDFKPKQFDLQRVVTKTNSHDVPAEY |
| | | RLPGDDWFFDNKMSSIKLTACKNFCTMYKSARTNQKKTKVDLRNKDTALLREGSFEVQRQYVR |
| | | LLTEKDIPDERIRQSRIALMADNFSKSKKDWKERFLRLSKNVSKIPPLNHDMKVCKRPNGKFILQI |
| | | PCDPICTRQIQVHTSDSICSIDPGGRTFATCYDPSNIKTFQIGPEADKKEIIHKFHNKIDNVHRLLS |
| | | YAQKKKQTQAVQDRIGQLKKLHLKLKTYVDDVHLKLCSYLVKNYKLVVLGRISVSSIVRKDRPN |
| | | HLAKKGNRDLLCWQHFRFRQRLLHRVRGTDCEAIAQDERYTSKTCGNCGVQNNKLGGNETFH |
| | | CKSCNYKTHRDVNGARNILCKYLGHFPFAT (SEQ ID NO: 594) |
| Mercenaria | XP_ | MLFFLVPIKPVALRFSPHFRMKRKREQMTLWKAAFVNGQETFKSWIDKVRMLELNCDISSASST |
| | 045186809.1 | HYSDLNLKTKCAKTEDKFMCTYSVGIRPTSKQKRTLNQMLKVSNYAYNWCNYLVKEKDFKPK |
| | | QFDLQRVVAKTNSTDVPAEYRLPGDDWSFDNKMSGIKLTACKNFCTMYKSAQTNQKKTKVDL |
| | | RNKDIVQLREGSFEVQSKYVRLLTEKDIPGERIRQSRIALTPDSFSKSKKDWKERFLRLSKNVSKIP |
| | | PLSHDMKVCKRPNGKFILQISCDPICTRQIQVQTSDSICSIDPGGRTFATCYDPSNIKTFQIGPEAD |
| | | KKEIIHEFHNKIDYVHRLLSHAQEKKQTQAVQDRIGQLKKLHLKLKTYVDDVHLKLCSYLVKNYK |
| | | LVVLGKISVSSIVRKDRQNHLPKSANRDLLCWQHYRFRQRLLHRVRGTDCEAVAQDERYTSKT |
| | | CGNCGVKNNKLGGKETFHCKSCNYITHRDVNGARNILCKYLGLFPFAA (SEQ ID NO: 595) |
| Mercenaria | XP_ | MKRKREQMTLWKAAFVNGQETFKSWIDKARMLELNCDVSSASSTHYSDLNLKTKCAKTDDKF |
| | 045208820.1 | MCNYSVCIRPTSKQKRTLNQMLKVSNYAYNWCNYLVKEKDFKPKQFDLQRIVAKTNSTDVPAE |
| | | YRLPGDDWFFDNKMSSIKLTACKNFCTMYKSTQTNQKKTKVDLRNKDIVQLREGSFEVQSKYV |
| | | RLLTEKDIPGERIRQSRIALMPDSFSKSKKDWKERFLRLSKNVSKIPPLSHDMKVCKRPNGKFILQI |
| | | SCDPICTRQIQVQTSDSICSIDPGGRTFATCYDPSNIKTFQIGPEADKKEIIHEFHNKIDYVHRLLS |
| | | HAQEKKQTQAVQDRIGQLKKLHLKLKTYVDDVHLKLCSYLVKNYKLVVLGKISVSSIVRKDRPN |
| | | HLAKSANRDLLCWQHYRFRQRLLHRVRGTDCEVIIQDERYTSKTCGNCGEKNNKLGGKETFTC |
| | | ESCNYKTHRDVNGARNILCKYLGLFPFAA (SEQ ID NO: 596) |
| Mercenaria | XP_ | MKRKREQMTLWKAAFVNGRETFKSWIDKVRMLELNCDISSASSTHYSDLNLKTKCAKTEDKFM |
| | 045205872.1 | CTYSVGIRPTSKQKRTLNQMLKVSNYAYNWCNYLVKEKDFKPKQFDLQRVVAKTNSTDVPAE |
| | | YRLPGDDWSFDNKMSGIKLTACKNFCTMYKSAQTNQKKTKVDLRNKDIVQLREGSFEVQSKYV |
| | | SLLTEKDIPGERIRQLRIALMPDSFSKSKKDWKERFLRLSKNVSKIPPLSHDMKVCKRPDGKFILQI |
| | | PCDPICTRQIQVQTSDSICSIDPGGRTFATCYDPSNIKAFQIGPEADKKEIIHEFHNKIDYVHRLLS |
| | | HAQEKKQTQAVQDRIGQLKKLHLKLKTYVDDVHLKLCSYLVKNYKLVVLGKISVSSIVRKDRPN |
| | | HLGKKGNRDLLCWGHYRFRQRLLHRVRGTDCEAITQDERYTSKTCGNCGVKNNKLGGKETFT |
| | | YMKNKHLNVLDKTLT (SEQ ID NO: 597) |
| Dreissena | KAH3690924.1 | MKRKREQMTLWKAAFVNGRETFKSWIDKVRMLELNCDISSASSTHYSDLNLKTKCAKTEDKFM |
| | | CTYSVGIRPTSKQKRTLNQMLKVSNYAYNWCNYLVKEKDFKPKQFDLQRVVAKTNSTDVPAE |
| | | YRLPGDDWSFDNKMSGIKLTACKNFCTMYKSAQTNQKKTKVDLRNKDIVQLREGSFEVQSKYV |
| | | SLLTEKDIPGERIRQLRIALMPDSFSKSKKDWKERFLRLSKNVSKIPPLSHDMKVCKRPDGKFILQI |
| | | PCDPICTRQIQVQTSDSICSIDPGGRTFATCYDPSNIKAFQIGPEADKKEIIHEFHNKIDYVHRLLS |
| | | HAQEKKQTQAVQDRIGQLKKLHLKLKTYVDDVHLKLCSYLVKNYKLVVLGKISVSSIVRKDRPN |
| | | HLGKKGNRDLLCWGHYRFRQRLLHRVRGTDCEAITQDERYTSKTCGNCGVKNNKLGGKETFT |
| | | YMKNKHLNVLDKTLT (SEQ ID NO: 598) |
| Dreissena | KAH3753320.1 | MKRKREDLTLWDAANVHKHKSMWYWWEYIRRKDMVNYEKTDCDVIQLLQSASVKKQKTQS |
| | | DKFLTSFSVGIRPTKHQKRVLNEMLRVSNYTYNWCLWLVNEKGIRPHQFELQKIVCKTNANDV |
| | | DPQYRIENDDWFFNNRMTSVKTTSCKNFYTSYKAAKSLKSKLKRPMSVSNIVQGSFCVPKLFIRN |
| | | LSSKDVSIDNINMLNRYICMIPENFEKRSKPKERFLKLAKPITKIPPFDHDVKIVKRADGMFILNIP |
| | | CDPKYTRRNASNDTIDKRVCGIDPGGRTFATVYDPIDCCVFQVGIKEDKQYVISKLHNKIDHAQM |
| | | HLRKAQNKKQQQAARERIVSLKKTHLKLKTFVDDIHLKLSSHLVKEYQFVALGKINVAPLVKKK |
| | | HLSKRAKRDLLYWQHYRFRQRLTHRTTNTECILDVQNEAYTSKTCGVCGTINKNLEKSETFYCD |
| | | NCKYNTHRDVNGARNILLKSLRMFPFVNSQ (SEQ ID NO: 599) |
| Dreissena | KAH3875098.1 | MKRKREDLTLWDAAHVHKHKSMWYWWEYIRRKDMVNHEKTDCDVIQLLQSASVKKQKTQS |
| | | DKFFTSFSVGIRPTKHQKRVLNEMLRVSNYTYNWCLWLVNEKGIEPHQFELQKIVCKTNANDVD |
| | | PQYRMENDDWFFNNKMTSVKTTSCKNFYTSYKAAKSLKSKLKRPMSVSNIVQGSFCVPKLFVR |
| | | NLSSKDVSIDNINMLNRYICMIPENFEKRSKPKERFLKLAKPITKIPPFDHDVKIVKRADGMFILNI |
| | | PCDPKYTRRNASNDTIDKRVCGIDPGGRTFATVYDPIDCSVFQVGIEEDKQYVISKLHNKIYHAH |
| | | KHLTKAQNKKQQQAASERIVSLKKTHLKLKTFVDDIHLKLSSHLVKEYEYVALGKINVAQLVKT |
| | | DRPKPLSPRAKRDLLYWQHYRFRQRLTHRTTNTECILDVQNEAYTSKTCGVCGTINKNLEKSET |
| | | FFCDQCKYNTHRDVNGARNILLKSLRMFPFEKQQQ (SEQ ID NO: 600) |
| Dreissena | KAH3777210.1 | MKRKRENFTLWDAANVHKHKSMWYWWEHIRRKDMVNHEKTDCDVIQLLQSASVKKQKTQS |
| | | DKFLTSFSVGIRPTKHQKRVLNEMLRVSNYTYNWCLWLVDEKGQRPHLFELQKIVCKTTANDV |
| | | DPYYRMENDDWFFNNKMSTIKLTSCKNFCTSYKSAKSLKSKLKRPMSVSNIIQGSFCVQKLFIRR |
| | | LSDKDVSIDNTQMQNRYICMMPDNFEKRSNPKERFLKLAKPITKIPPIDHDVKIVKRADGMFIMN |
| | | IPCDPKYTRRNASNNTIEKRVCGIDPGGRTFATVYDPIDCCVFQVGIKEDKQYVISKLHNKIDHAH |
| | | MHLTKAQNKKQQQAARERIVSLKKTHLKLKTFVDDIHLKLSSHLVKEYEYVALGKINVAQLVK |
| | | TDRPKPLSPRAKRDLLYWQHYRFRQRLTHRTTNTECILDVQNEAYTSKTCGVCGTINKNLEKSE |
| | | TFYCDNCKYNTHRDVNGARNILLKSLRMFPFVNSQL (SEQ ID NO: 601) |
| Dreissena | KAH3822762.1 | MKRKREDLTLWDAANVHKHKSMWYWWEYIRRKDLINHEKTDCDVIQLLQSASVKKQKTHSD |
| | | DFLTSFSVGIRPTKHQKQVLNEMLRVSNYTYNWCLWLVNEKGLRPHQFELQKIVCKTNARDVD |
| | | PQYRMENDDWFFNNKMTRVKGTSCKNFCTSYKSAKALKSKLKRPMPISNIIEGSFGVPNLYIRLL |
| | | SSKDVCTHETNMQNRYICMMPDNFEKRSNPKERFLKLAKRITNIPPINHDVKIVKRADGMFIMNI |
| | | PCDPKYTRRNASNDTIEKRVCGIDPGGRTFATVYDPIDCCVFQVGIKEDKQYVISKLHNKIDHAH |
| | | MHLTKAQNKKQQQAARERIVSLKKTHLKLKTFVEDIHLKLSSHLVKEYHYVALGKINVAPMVK |
| | | KKHLSKRAKRDLLYWQHYRFRQRLTHRTTNTDCIFEVQNEAYTSKTCGVCGKINENLEKSETFY |
| | | CDQCKYNTHRDVNGARNILLKSLNMFPFEKKQQ (SEQ ID NO: 602) |
| Dreissena | KAH3892374.1 | MKRKREQLTLWDAANVHKHKSMWYWWQSIRRKDLVNHDKTACDVMELLQSASHKKQNTQS |
| | | DKFLTSFSVGIRPTKHQKRVLNEMLRVSNYTYNWCLWLVNEKGLKPLQFTLQKIVCKTNAGDV |
| | | DPQYRIENDEWFFNNKMSTIKLTSCKNFCTSYKSAKSLKSKLKRPMSVSNIVQGSFCVQKVLLRH |
| | | LSGKDVFTNNANMQNQYICMMPDNFEKRSNPKERFLKLAKRITKIPPIDHDVKIVKRANGTFVL |
| | | NIPCDPTYTRRNTSNDTIEKRVCGIDPGGRTFATVYDPIDCSVFQVGIEEDKQYVMSKLHNKINH |
| | | AHKHLTKAQNKQQQQAAQERIVSLKKIHFKLKTFVDDIHLKLSSHLVKEYQYVALGKINVAQLV |
| | | KTDRPKPLSPRSKRDLLNWQHFRFRQRLTHRTTNTDCILEVQNEAYTSMTCGVCGKIKKNLEKS |
| | | ETFYCDQCKYNTHRDVNGARNILLKSLHMFPFEKQQQ (SEQ ID NO: 603) |
| Dreissena | KAH3796522.1 | MKRKRENFTLWDAANVHKHKSMWYWWEHIRRKDMVNHEKTDCDVIQLLQSASVKKQKTQS |
| | | DKILTSFSVGLRPTKHQKQVLNEMLRVSNYTYNWCLWLVDEKGQRPHLFELQKIVCKTTANDV |
| | | DPYYRMENDDWFFNNKMSNIKLTSCKNFCTSYKSAKSLKSKLIRPMSVSNIIQGSFCVQKVLLRH |
| | | LSDKDVSTDNMLNRYICMMPDNFEKRSKPKERFLKLAKPITKIPPIDHDVKIVKRADGMFIMNIP |
| | | CDSKYTRRNASNDTIEKRVCGIDPGGRTFATVYDPIDCCVFQVGIKEDKQYVIRKLHDKIDHAHK |
| | | HLTKAQKKKQQKAAQERIVSLKKIHFKLKTFVDDIHLKLSSHLVKEYKYVALGKINVAQLVKTD |
| | | RPKPLSKRAKRDLLSWQHYRFRQRLTHRTTNTDCILEVQNEANTSKTCGVCGEKDDNLGKSETY |
| | | YCIKCEYNTHRDVNGARNILLKSLHMFPFVNSQQ (SEQ ID NO: 604) |
| Dreissena | KAH3785325.1 | MVNHEKTDCDVIQLLQSASVKKQKTQSDKFLTSFSVGIRPTKHQKRVLNEMLRVSNYTYNWCL |
| | | WLVNEKGIRPHQFELQKIVCKTNASDVDPQYRMANDDWFFNNKMTSIKTTSCKNFFTSYKAAK |
| | | SLKSKLKRPMCVSNIIQGSFCVRKEFIRHLSGKDVSTDNMLNRYICMMPDNFEKRSKPKERFLKL |
| | | AKPITNIPPINHDVKIVKRADGMFIMNIPCDPKYTRRNASNDTIEKRVCGIDPGGRTFATVYDPIDC |
| | | CVFQVGIKEDKQYVISKLHNKIDHAHKHLTKAQNKKQQQAASERIVSLKKTHLKLKTFVEDIHL |
| | | KLSSHLVKEYQYVALGKINVAQLVKTDRPKPLSKRAKRDLLSWQHYRFRQRLTHRTTNTDCILE |
| | | VQNEANTSKTCGVCGEKDDNLGKSETYYCIKCEYNTHRDVNGARNILLKSLHMFPF (SEQ ID |
| | | NO: 605) |
| Dreissena | KAH3700187.1 | MANDDWFFNNKMTSIKTTSCKNFFTSYKAAKSLKSKLKRPMCVSNIIQGSFCVRKEFIRHLSGKD |
| | | VSTDNMLNRYICMMPDNFEKRSKPKERFLKLAKPITNIPPINHDVKIVKRADGMFIMNIPCDPKY |
| | | TRRNASNDTIEKRVCGIDPGGRTFATVYDPIDCCVFQVGIKEDKQYVISKLHNKIDHAHKHLTKA |
| | | QNKKQQQAASERIVSLKKTHLKLKTFVEDIHLKLSSHLVKEYQYVALGKINVAQLVKTDRPKPL |
| | | SKRAKRDLLSWQHYRFRQRLTHRTTNTDCILEVQNEANTSKTCGVCGEKDDNLGKSETYYCIKC |
| | | EYNTHRDVNGARNILLKSLHMFPFKKHQK (SEQ ID NO: 606) |
| Dreissena | KAH3721835.1 | MGCCKRPQTQSMWYWWQSIRRKDLVNHDKTACDVMELLQSASHKKQNTQSDKFLTSFSVGIR |
| | | PTKHQKRVLNEMLRVSNYTYNWCLWLVNEKGLKPLQFTLQKIVCKTNAGDVDPQYRIENDEW |
| | | FFNNKMSTIKLTSCKNFCTSYKSAKSLKSKLKRPMSVSNIVQGSFCVQKVLLRHLSGKDVFTNNA |
| | | NMQNQYICMMPDNFEKRSNPKERFLKLAKRITKIPPIDHDVKIVKRANGTFVLNIPCDPTYTRRN |
| | | TSNDTIEKRVCGIDPGGRTFATVYDPIDCSVFQVGIEEDKQYVMSKLHNKINHAHKHLTKAQTNS |
| | | NNKQHRNELYHCRKYTLS (SEQ ID NO: 607) |
| Dreissena | KAH3856132.1 | MKRKREDLTLWDAANVHKHKSMWYWWEYIRRKDLINHEKTDCDVIQLLQSASVKKQKTQSD |
| | | KFLTSFSVGIRPTKHQKQVLNEMLRVSNYTYNWCLWLVNEKGLKPHQFELQKIVCKTNARDVD |
| | | PQYRMANDDWFFNNKMTRVKGTSCKNFCTSYKSAKALKSKLKRPMPISNIIEGSFGVPNLYIRLL |
| | | SSKDVCTHETNMQNRYICMMPDNFEKRSNPKERFLKLAKRITNIPPINHDVKIVKRADGMFIMNI |
| | | PCDPKYTRRNASNDTIEKRVCGIDPGAVCHVRGSTIAANGVAKFRVTAKTEE (SEQ ID |
| | | NO: 608) |
| Dreissena | KAH3856132.1 | MLNRYICMIPDNFEKRSKPKERFLKLAKPITKIPPIDHDVKIVKRADGMFIMNIPCDPKYTRRNAS |
| | | NDTIDKRVCGIDPGGRTFATVYDPIDCSVFQVGIEEDKQYVISKLHNKIYHAHKHLTKAQNKKQ |
| | | QQAASERIVSLKKTHLKLKTFVEDIHLKLSSHLVKEYQYVALGKINVAQLVKTDRPKPLSKRAK |
| | | RDLLSWQHYRFRQRLTHRTTNTDCILEVQNEANTSKTCGVCGEKDDNLGKSETYYCIKCEYNTH |
| | | RDVNGARNILLKSLSMFPFEKKQQ (SEQ ID NO: 609) |
| Dreissena | KAH3739195.1 | MTSVKGTSCKNFSTSYKSATSLKLKQKRPMSVSNIFQGSFCVPKKFIRHLSGSDVSIDNTNMQNR |
| | | YICMMPDNFEKRSNPKERFLKIAKPITKIPPIDHDVKIVKRADGTFIMKIPCDPKYTRRNASNDSIE |
| | | KRVCGIDPGGRTFATVYDQIESSVFQVGIEEDKQYLISKLHNKIDHAHMHLTKAQNKKQQQAAR |
| | | ERIVSLKKTHLKLKTFVEDIHLKLSAHLVKEYQYVALGKINVAQLVKKNRPKPLSPRANRFAML |
| | | ATLQISPKAYSPNYEHRMHIGCSK (SEQ ID NO: 610) |
| Batillaria | KAG5708924.1 | MKRTYSATKSSLTLWTAASVKTTSAPKVVTTFSGWMKKILPTRAETSLTLINPADIADPSPPKKK |
| | | AKKTTPATPKPTLRIYKIGLRPSPAQRKTLNACIVAANFAYNQCVHLVQHKVCKPHLYDLQKIV |
| | | AKMKTPEDINHRYAPDRDGWFWKSSTIVRLLATKDFCAAYKAIVSNKKKDVAVIKYKTYDDPE |
| | | AINPLSGLFGCQKQYATVTQAGLRLLPRLFGKDPIPLVKKKPKVATIDHDFKIEKTSKGKFVLCLT |
| | | VECSLLRRVKPPAPLFEDGYIHACGIDPGVRSFVTVYDPTRQDCYQFGTSAQKAERLDPITNAIDN |
| | | WNSFVDQHRDKAPPTAIESWSRKTKKLWYKLKNQVRSLHDQVIAHLLGAYNFISLGKLDVSCF |
| | | RRGTTAKSTNRWLRIYRHFEFRTKLLARVEGTDNCR VEITDER WTSKTCGMCRSIHRELGAKEL |
| | | FECPNCHYTCHRDVHGARNILLRSFGQFPV (SEQ ID NO: 611) |
| Batillaria | KAG5707941.1 | MKRTYSATKSSLTLWTAASVKTTSAPKVVTTFSGWMKKILPTRAETSLTLINPADIADPSPPKKK |
| | | AKKTTPATPKPTLRIYKIGLRPSPAQRKTLNACIVAANFAYNQCVHLVQHKVCKPHLYDLQKIV |
| | | AKMKTPEDINHRYAPDRDGWFWKSSTIVRLLATKDFCAAYKAIVSNKKKDVAVIKYKTYDDPE |
| | | AINPLSGLFGCQKQYATVTQAGLRLLPRLFGKDPIPLVKKKLKVATIDHDFKIEKTSKGKFVLCLT |
| | | VECSLLRRVKPPAPLFEDGYIHACGIDPGVRSFVTVYDPTRQDCYQFGTSAQKAERLDPITNAIDN |
| | | WNSFVDQHRDKAPPTAIESWSRKTKKLWYKLKNQVRSLHDQVIAHLLGAYNFISLGKLDVSCF |
| | | RRGTTAKSTNRWLRIYRHFEFRTKLLARVEGTDNCRVEITDERWTSKTCGMCRSIHRELGAKEL |
| | | FECPNCHYTCHRDVHVARNILLRSFGQFPV (SEQ ID NO: 612) |
| Batillaria | KAG5698421.1 | MKRTYSATKSSLTLWTAASVKTTSAPKVVTTFSGWMKKILPTRAETSLTLINPADIADPSPPKKK |
| | | AKKTTPATPKPTLRIYKIGLRPSPAQRKTLNACIVAANFAYNQCVHLVQHKVCKPHLYDLQKIV |
| | | AKMKTPEDINHRYAPDRDGWFWKSSTIVRLLATKDFCAAYKAIVSNKKKDVAVIKYKTYDDPE |
| | | AINPLSGLFGCQKQYATVTQAGLRLLPRLFGKDPIPLVKKKLKVATIDHDFKIEKTSKGKFVLCLT |
| | | VECSLLRRVKPPAPLFEDGYIHACGIDPGVRSFVTVYDPTRQDCYQFGTSAQKAERLDPITNAIDN |
| | | WNSFVDQHRDKAPPTAIESWSRKTKKLWYKLKNQVRSLHDQVIAHLLGAYNFISLGKLDVSCF |
| | | RRGTTAKSTNRWLRITDTLNFGQNCSLEWRELTTVEWRSPTNAGPQRRVACADPSTANLGQKN |
| | | YSSAPTATTPATETCTELETSC (SEQ ID NO: 613) |
| Elysia | RUS69625.1 | MAEKLRKTLWIPGNEPDSDCTVSITGKLNELVNSIDPAPEALGIYKVKFKLTRHQHNVLKDLLAA |
| | | SNLAWNWTKWLIEDKGIKRKDEKTLQSIVAKKSIEDPLMAPREVHDNAKLLHKTSTIRLTGMKS |
| | | YLSALKSSMTLHKGRMEKFDVDYKELYPASGTFTVQKLFIKKFDISMVNKGVRSKVPEAFYRLSI |
| | | TPDSFGNRNEFTERFLRISKKRSYDRMPPINHDSQIQLRKDGHWLLLIPCDRSYLRCKQPESIEKSV |
| | | VGVDPGGRTFQTTYDPIKREVKEFHSNKGAEFRYIELMKVKAKRHEEHAKNVKSFPKYKEHKA |
| | | AARKYWHKYETKRNDLHRKLSSKMVRENKLIVIGDLSTKNACKKGGKLHKKSKDDLYTWAHY |
| | | EFRQRLIDRARGTNTKVIVQDESYTSMTCGNCGHRKTDLGGDKVYNCTECGCSIGRDVNGGRNI |
| | | LIKAMIE (SEQ ID NO: 614) |
| Elysia | RUS69626.1 | MAEIIRKQLWYPGYKPENLSGVVEKLKEVGASNDESALGTFKIKLRPTAYQKACLKRVLAASNL |
| | | AWNWTKWLIEEKGVSWKDKKTMQAIVVKKSIESLENQDMVAPEVRANQQLLSKTTSVRLTAM |
| | | CSFVAATKSSMTLHKGCTRKFDVGYKELYPRSGTFGVQKPYIRKFEESMLPAKMPTEARKNFNR |
| | | LRLSILPNSFAAKGNPNERFLRIGKRRSWESMPPISHDCKVEMRKDGSWLLLIPCDRSYLRFSKPV |
| | | AEKNHAVSLDPGVRTFQTEYNPFKQETRNHGSQRDKDRINFFKTKAQRHEVLAKTNKKEYVRK |
| | | EHKRQADKYWHKHGKYRDNIHRELASKLVNENDLVIVGDFSSSRCAAKRAGSKLTKQTRAEM |
| | | YSWAHYRFKQRLIERARGTGTRVHFQDESYTSKTCGNCGNIKEDLGGNKTYACEVCGVVMDR |
| | | DVNGARNIMIKSLTKN (SEQ ID NO: 615) |

TABLE 11
Representative Insect Fanzor Polypeptides

| | | |
|---|---|---|
| Contarinia | XP_ | MLFERSVQMTEVAALASLSILFILNEALDNDDRAFFLKPHPSLFIADCFRAVLNQHVNNINSQYRI |
| | 031620448.1 | LPEFRFMVERNSEEQFRWPDDEKLGNGLRYFYKQYITNIQTNTNTWCEKRLENFFRMRCWYRN |
| | | RFHNGSRFDNIDIRNAKEFSYRFKNLTNGNNVDPQRVEKFNILMRDLTEIGWSGTVSMKFFAKY |
| | | RWFESLWLFGQMQRQIEVYHSHAEQWYTIHEMFRNNPNFQEPTINRPPKISSFALIPLCDYHLKN |
| | | VRLDITDLYNKIVNELDLVPSFLNTQTNRMNKRNLKYYTQTDRSGLWNMLFDVGKINKLGKSK |
| | | PFHHQILTDSVSISIMYKKPQRQQRPQRQQRPQQTTQANRGPEKLIGKKYIIGIDPNEKSWLTVVR |
| | | RNIQKTPDEPAVEENIIIPNQRFHWETQQKKRDKEAKKLAGWFDIEEKEHLKTYPYRPPSPRNST |
| | | WKSYIEYRIKMLRKGMAAYATREYARLDLDHHIRSTRVNDQIAVRVTNNKPSLVQFGAWAMK |
| | | PDRPFGIKKRKRCPGSRKFRVSIKKLGHSEVEMQDEWGTSQTCANCQERFPRHTKDDRFKVCYD |
| | | CRAKKIDGLPDSVAGLPDIIVSTVNRRVLRRKRAIIKRQIIDGNREAVNEKIRTGRLMSKVKVTYK |
| | | NWPLNVDDDDVVPQTVTWHRDIVAAKCIMLKGMNQLETEYSLFNVFALNYIGLCRIFDVPLPVS |
| | | LLRPPDYNNNVN (SEQ ID NO: 616) |
| Contarinia | XP_ | MDDDELDDNQPEESKYVVIKCGLQTILRQQHERIERVGEVVTKMLFERSVQMTEVAALASLSILF |
| | 031634920.1 | ILNEALDNDDRAFFLKPHPSLFIADCFRAVLNQHVNNIRSQYRILPEFRFMVERNSEEQFRWPDDE |
| | | KLGNGLRYFYKQYITNIQTNTNTWCEKRLENFFRMRCWYRNRFHNGSRFDNIDIRNAKEFSYRF |
| | | KNLTNGNNGNNVDPQRVEKFNILMRDLTEIGWSGTVSMKFFAKYRWFESLWLFGQMQRQIEVY |
| | | HSHAEQWHTIHEMFRNNPNFQEPTINRPPKISSFALIPLCDYHLKNVRLDIKDLYYKIVNELDLVP |
| | | SFLNTRTNRMNKRNLKYYTQTDRSGLWNMLFDVGEINKLGKSKSFHHQILTDSVSISIMYKKPQ |
| | | RQQRPQRQQRPQQTTQANRGPEKLIGKKYIIGIDPNEKSWLTVVRRNIQKTPDEPAVEENIIIPNQ |
| | | RFHWETQQKKRDKEAKKLAGWFDIEEKEHLKTYPYRPPSPRNSTWKSYIEYRIKMLRKGMAAY |
| | | ATREYARLDLDHHIRSTRVNDQIAVCVTNNKPSLVQFGAWAMKPDRPFGIKKRKRCPGSRKFRV |
| | | SIKKLGHSEVEMQDEWGTSQTCANCQERFPRHTKDDRFKVCYDCRAKKIDGLPDSVAGLPDIIV |
| | | STVNRRVLRRKRAIIKRQIIDGNREAVNEKLQTGRLMSKVKVTYKNWPLNVDDDDVVPQTVTW |
| | | HRDIVAAKCIMLKGMNQLETEYSLFNVFALNYIGLCRIFDVPLPVSLLRPPDQNNNVN (SEQ ID |
| | | NO: 617) |
| Contarinia | XP_ | MDDDELDDNQPEESKYVVIKCGLQTILRQQHERIERVGEVVTKMLFERSVQMTEVAALASLSILF |
| | 031635312.1 | ILNEALDNDDRAFFLKPHPSLFIADCFRAVLNQHVNNINSQYRILPEFRFMVERNSEEQFRWPDDE |
| | | KLGNGLRYFYKQYITNIQTNTNTWCEKRLENFFRMRCWYRNRFHNGSRFDNIDIRNAKEFSYRF |
| | | KNLTNGNNGNNVDPQRVEKFNILMRDLTEIGWSGTVSMKFFAKYRWFESLWLFGQMQRQIEVY |
| | | HSHAEQWYTIHEMFRNNPNFQEPTINRPPKISSFALIPLCDYHLKNVRLDIKDLYNKIVNELDLVP |
| | | SFLNTRTNRMNKRNLKYYTQTDRSGLWNMLFDVGEINKLGKSKSFHHQILTDSVSISIMYKKPQ |
| | | RQQRPQRQQRPQQTTQANRGPEKLIGKKYIIGIDPNEKSWLTVVRRNIQKTPDEPAVEENIIIPNQ |
| | | RFHWETQQKKRDKEAKKLAGWFDIEEKEHLKTYPYRPPSPRNSTWKSYIEYRIKMLRKGMAAY |
| | | ATREYARLDLDHHIRSTRVNDQIAVRVTNNKPSLVQFGAWAMKPDRPFGIKKRKRCPGSRKFRV |
| | | SIKKLGHSEVEMQDEWGTSQTCANCQERFPRHTKDDRFKVCYDCRAKKIDGLPDSVAGLPDIIV |
| | | STVNRRVLRRKRAIIKRQIIDGNREAVNEKIRTGRLMSKVKVTYKNWPLNVDDDDVVPQTVTW |
| | | HRDIVAAKCIMLKGMNQLETEYSLFNVFALNYIGLCRIFDVPLPVSLLRPPDYNNNVN (SEQ ID |
| | | NO: 618) |
| Contarinia | XP_ | MDDDELDDNQPEESKYVVIKCGLQTILRQQHERIERVGEVVTKMLFERSVQMTEVAALASLSILF |
| | 031637771.1 | ILNEALDNDDRAFFLKPHPSLFIADCFRAVLNQHVNNIRSQYRILPEFRFMVERNSEEQFRWPDDE |
| | | KLGNGLRYFYKQYITNIQTNTNTWCEKRLENFFRMRCWYRNRFHNGSRFDNIDIRNAKEFSYRF |
| | | KNLTNGNNGNNVDPQRVEKFNILMRDLTEIGWSGTVSMKFFAKYRWFESLWLFGQMQRQIEVY |
| | | HSHAEQWHTIHEMFRNNPNFQEPTINRPPKISSFALIPLCDYHLKNVRLDIKDLYYKIVNELDLVP |
| | | SFLNTRTNRMNKRNLKYYTQTDRSGLWNMLFDVGEINKLGKSKSFHHQILTDSVSISIMYKKPQ |
| | | RQQRPQRQQRPQQTTQANRGPEKLIGKKYIIGIDPNEKSWLTVVRRNIQKTPDEPAVEENIIIPNQ |
| | | RFHWETQQKKRDKEAKKLAGWFDIEEKEHLKTYPYRPPSPRNSTWKSYIEYRIKMLRKGMAAY |
| | | ATREYARLDLDHHIRSTRVNDQIAVCVTNNKPSLVQFGAWAMKPDRPFGIKKRKRCPGSRKFRV |
| | | SIKKLGHSEVEMQDEWGTSQTCANCQECFPRHTKDDRFKVCYDCRAKKIDGLPDSVAGLPDIIV |
| | | STVNRRVLRRKRAIIQRQIIDGNREAVNEKLQTGRLMSKVKVTYKNWPLNVDDDDVVPQTVTW |
| | | HRDIVAAKCIMLKGMNQLETEYSLFNVFALNYIGLCRIFDVPLPVSLLRPPDQNNNVN (SEQ ID |
| | | NO: 619) |
| Bradysia | XP_ | MYETNFKNNVKTHAQKRIVRLFKLWFIEANGVKPSSRHMKVLKNAATFMFKRKSTVPRNPYLT |
| | 037040211.1 | QRLMMYMPPQIVAMVANSNERGFMNKLHNAFNWFRMVPLYLRIQSDIDQYQATCRAADEPIH |
| | | VRNFHVVPLHNSKTKYIRIDSATLKLMLQHLKIHPTKPSLKQPNKRVCLTNAEFEDAVDPTGTFN |
| | | PNWFNYFKWSAVKKMQRHKEFDYQFLTNGVAVSLQFIVDQPPEPETFEKVMEKQKIKYRKFGQ |
| | | RFNNNQYKTIIGIDPGYKLYLAAVSKDMRTNEETLFRLTSRKFHNMCQQNIRDRKAKRYTSQLE |
| | | TEMAHDREVNFGGTIASPMSATNYMLFIDHRLKHFNSCIALYTQNKYTELAFHKYVHTQKAMD |
| | | GIVNELLPSSRSHERSLLVIGGTEFNPSAPIKKYRRCPGVRQLVKFVRKRTGCDIVYADEYNTSQV |
| | | CGRCQRRFKTSDDETIQHKRWERKGARMRLCSNCTPNDNIIPLPTTINTRMSPRAQHLHRLAITN |
| | | RLFFNVAAYSMEDAKRESDNIHYIAENCCYDVSHDKHTFDPNDRTTQLKCVWNRDISAARNILI |
| | | KGVASITGIPAPRTLYRQTQINEENSSDESMD (SEQ ID NO: 620) |
| Bradysia | XP_ | MKNTKELSDSDTDIEKRQRKWQHQRQQKGNKKPKKRGQSNGNGNGKDSDDDFVSTKKVYNSP |
| | 037024089.1 | PKLPNVAAVGRRKNVIPKKPPVSSNVNVNVLDSPPKLPNVAAAPKKPPVSSAAINAALLNATTK |
| | | DRSSSPSNATAASNPAINITSHRNTTSSIIGSGRTGSTQEVAHPLPIRQSPPPMEYGSEWDTDGEA |
| | | TIAQLKQMQRKRPSKKAHSTSTKPEVKQTPVQSNRKRAASTDEASDAVEATTKRSTSTKRSKASK |
| | | RSKATKTQQDSADEAGDADEETTKRSTSTKRSKASKRSKVTKTQQDSADEAGDADEATTKRST |
| | | STKRSKASKAQQRKDDDENGNRAVIQTQLEEIIFLGNVFDKSIRRFTCPFATCNVNYSTFLNLKN |
| | | HVKKTHEETLQKPIETDTNNWRRIQNANNRFDITTVKQKLRPLIIDGETIIKKQRVLEPLATEKTE |
| | | VATKVFDIMNKQAVELSKLAILFSSLVYFDVYNTISDPENGNEIDRIFEEEFNWKEMILEFKQFQR |
| | | NTAKAKKPRPDKHNTFFDLCRKYDVETYFTETSQNAWNSIVDTFATNFKTNITTHLYSRIRKWL |
| | | AFKLRDGKKKKDVCGKENRKDINNKIYHTIKFLFDSEKCTQAEEVQHELICELQKICQFPNFNHG |
| | | GRSYFERLRYDFKEDGDDDLGKPKRKRKCAAPKKTTKKSKKKKKKTQNNGPRLNWFQMVPA |
| | | MVRLQRRIYEINLSRKQTLIDAGIIKEKKKRKRKRKRKRKRKNESKPEPSSTENKRQAGGTKKKR |
| | | EIDPEATHYAKLPNFIVVPQNSFHTMHFPIDTKALFDILKNLPQFMAILNQAEFLELQIDDDPNRK |
| | | TTNPFWYFLFNIQKMETATKKFGGRITTNGSDVSIQYCKLRKEKELTKAEILEMASNRKRKHDVI |
| | | DSDSESESEDDDDDDDDNAKTIKTDPAIVSALTNITNMEDLSVSGVDLGVRNVAATVIRKWSKS |
| | | SDGYEVHESNVLHKSKDYHYKAGFARRQRKGKKLHGEFDERYQKDRQSQPIEPSQRSPDYIKFL |
| | | DSRLKWFNEGTATYMQRVVTNVKFDKFRSTQKQMMAMAKEIVGDINVHDKATTQPSKIRVVF |
| | | VGNCSTPANSTIKGHRRSPGNAPIVRYLKQIPQTYVDATIDEYCTTKKCSRCYETLDDVEFSKERL |
| | | KLCHNCKLAENSTSTNLVSTYQRKKVIAEAMIPITEDYPKPTQFERAQRVAMERTKRWSFGDKM |
| | | RMAARIKLKSTTYTVNTTATLKHLYWNRDGNAARNIMQLGLCQYNDCLPIEFNKDEAFQRPKK |
| | | KD (SEQ ID NO: 621) |
| Bradysia | XP_ | MKNTKELSSDSDTDIEKRQRKWQHQRQQKGNKKPKKRGQSNGNGNGKDSDDDFVSTKKVYNS |
| | 037033154.1 | PPKLPNVAAVGRRKNVIPKKPPVSSNVNVNVLDSPPKLPNVAAAPKKPPVSSAAINAALLNATTK |
| | | DRSSSPSNATAASNPAINITSHRNTTSSIIGSGRTGSTQEVAHPLPIRQSPPPMEYGSEWDTDGEA |
| | | TIAQLKQMQRKRPSKKAHSTSTKPEVKQTPVQSNRKRAASTDEASDAVEATTKRSTSTKRSKASK |
| | | RSKATKTQQDSADEAGDADEETTKRSTSTKRSKASKRSKVTKTQQDSADEAGDADEATTKRST |
| | | STKRSKASKAQQRKDDDENGNRAVIQTQLEEIIFLGNVFDKSIRRFTCPFATCNVNYSTFLNLKN |
| | | HVKKTHEETLQKPIETDTNNWRRIQNANNRFDITTVKQKLRPLIIDGETIIKKQRVLEPLATEKTE |
| | | VATKVFDIMNKQAVELSKLAILFSSLVYFDVYNTISDPENGNEIDRIFEEEFNWKEMILEFKQFQR |
| | | NTAKAKKSRPDKHNTFFDLCRKYDVETYFTETSQNAWNSIVDTFATNFKTNITTHLYSRIRKWL |
| | | AFKLRDGKKKKDVCGKENRKDINNKIYHTIKFLFDSEKCTQAEEVQHELICELQKICQFPNFNHG |
| | | GRSYFERLRYDFKEDGDDDLGKPKRKRKCAAPKKTTKKSKKKKKKTQNNGPRLNWFQMVPA |
| | | MVRLQRRIYEINLSRKQTLIDAGIIKEKKKRKRKRKRKRKRKNESKPEPSSTENKRQAGGTKKKR |
| | | EIDPEATHYAKLPNFIVVPQNSFHTMHFPIDTKALFDILKNLPQFKAILNQAEFLELQIDDDPNR |
| | | KTTNPFWYFLFNIQKMETATKKFGGRITTNGSDVSIQYCKLRKEKELTKAEILEMASNRKRKHDVID |
| | | SDSESESEDDDDDDDDNAKTIKTDPAIVSALTNITNMEDLSVSGVDLGVRNVAATVIRKWSKSS |
| | | DGYEVHESNVLHKSKDYHYKAGFARRQRKGKKLHGEFDERYQKDRQSQPIEPSQRSPDYIKFLD |
| | | SRLKWFNEGTATYMQRVVTNVKFDKFRSTQKQMMAMAKEIVGDINVHDKATTQPSKIRVVFV |
| | | GNCSTPANSTIKGHRRSPGNAPIVRYLKQIPQTYVDATIDEYCTTKKCSRCYETLDDVEFSKERLK |
| | | LCHNCKLAENSTSTNLVSTYQRKKVIAEAMIPITEDYPKPTQFERAQRVAMERTKRWSFGDKMR |
| | | MAARIKLKSTTYTVNATATLKHLYWNRDGNAARNIMQLGLCQYNDCLPIEFNKDEAFQRPKKK |
| | | D (SEQ ID NO: 622) |
| Bradysia | XP_ | MKNTKELSSDSDTDIEKRQRKWQHQRQQKGNKKPKKRGQSNGNGNGKDSDDDFVSTKKVYNS |
| | 037042105.1 | PPKLPNVAAVGRRKNVIPKKPPVSSNVNVNVLDSPPKLPNVAAAPKKPPVSSAAINAALLNATTK |
| | | DRSSSPSNATAASNLAINITSHRNTTSSIIGSGRTGSTQEVAHPLPIRQSPPPMEYGSEWDTDGEA |
| | | TIAQLKQMQRKRPSKKAHSTSTKPEVKQTPVQSNRKRAASTDEASDAVEATTKRSTSTKRSKASK |
| | | RSKATKTQQDSADEAGDADEETTKRSTSTKRSKASKRSKVTKTQQDSADEAGDADEATTKRST |
| | | STKRSKASKAQQRKDDDENGNRAVIQTQLEEIIFLGNVFDKSIRRFTCPFATCNVNYSTFLNLKN |
| | | HVKKTHEETLQKPIETDTNNWRRIQNANNRFDITTVKQKLRPLIIDGETIIKKQRVLEPLATEKTE |
| | | VATKVFDIMNKQAVELSKLAILFSSLVYFDVYNTISDPENGNEIDRIFEEEFNWKEMILEFKQFQR |
| | | NTAKAKKPRPDIHNTFFDLCRKYDVETYFTETSQNAWNSIVDTFATNFKTNITTHLYSRIRKWLA |
| | | FKLRDGKKKKDVCGKENRKDINNKIYHTIKFLFDSEKCTQAEEVQHELICELQKICQFPNFNHGG |
| | | RSYFERLRYDFKEDGDDDLGKPKRKRKCAAPKKTTKKSKKKKKKTQNNGPRLNWFQMVPAM |
| | | VRLQRRIYEINLSRKQTLIDAGIIKEKKKRKRKRKRKRKRKNESKPEPSSTENKRQAGGTKKKREI |
| | | DPEATHYAKLPNFIVVPQNSFHTMHFPIDTKALFDILKNLPQFKAILNQAEFLELQIDDDPNRKTT |
| | | NPFWYFLFNIQKMETATKKFGGRITTNGSDVSIQYCKLRKEKELTKAEILEMASNRKRKHDVIDS |
| | | DSESESEDDDDDDDDNAKTIKTDPAIVSALTNITNMEDLSVSGVDLGVRNVAATVIRKWSKSSD |
| | | GYEVHESNVLHKSKDYHYKAGFARRQRKGKKLHGEFDERYQKDRQSQPIEPSQRSPDYIKFLDS |
| | | RLKWFNEGTATYMQRVVTNVKFDKFRSTQKQMMAMAKEIVGDINVHDKATTQPSKIRVVFVG |
| | | NCSTPANSTIKGHRRSPGNAPIVRYLKQIPQTYVDATIDEYCTTKKCSRCYETLDDVEFSKERLKL |
| | | CHNCKLAENSTSTNLVSTYQRKKVIAEAMIPITEDYPKPTQFERAQRVAMERTKRWSFGDKMR |
| | | MAARIKLKSTTYTVNTTATLKHLYWNRDGNAARNIMQLGLCQYNDCLPIEFNKDEAFQRPKKK |
| | | D (SEQ ID NO: 623) |
| Bradysia | XP_ | MEYGSEWDTDGEATIAQLKQMQRKRPSKKAHSTSTKPEVKQTPVQSNRKRAASTDEASDAVEA |
| | 037051825.1 | TTKRSTSTKRSKASKRSKATKTQQDSADEAGDADEETTKRSTSTKRSKASKRSKVTKTQQDSAD |
| | | EAGDADEATTKRSTSTKRSKASKAQQRKDDDENGNRAVIQTQLEEIIFLGNVFDKSIRRFTCPFA |
| | | TCNVNYSAFLNLKNHVKKTHEETLQKPIETDTNNWRRIQNANNRFDIATVKQKLRPLIIDGETIIK |
| | | KQRVLEPLATEKTEVATKVFDIMNKQAVELSKLAILFSSLVYFDVYNTISDPENGNEIDRIFEEEF |
| | | NWKEMILEFKQFQRNTAKAKKSRPDKHNTFFDLCRKYDVETYFTETSQNAWNSIVDTFATNFKT |
| | | NITTHLYSRIRKWLAFKLRDGKKKKDVCGKENRKDINNKIYHTIKFLFDSEKCTQAEEVQHELIC |
| | | ELQKICQFPNFNHGGRSYFERLRYDFKADGDDDLGKPKRKRKCAAPKKTTKKSKKKKKKTQNN |
| | | GPRLNWFQMVPAMVRLQRRIYEINLSRKQTLIHAGIIKEKKKRKRKRKRKRKRKNESKPEPSSTE |
| | | NKRQAGGTKKKREIDPEATHYAKLPNFIVVPQNSFHTMHFPIDTKALFDILKNLPQFKAILNQAEF |
| | | LELQIDDDPNRKTTNPFWYFLFNIQKMETATKKFGGRITTNGSDVSIQYCKLRKEKELTKAEILE |
| | | MASNRKRKHDVIDSDSESESEDDDDDDDDDNAKTIKTDPAIVSALTNITNMEDLSVSGVDLGVR |
| | | NVAATVIRKWSKSSDGYEVHESNVLHKSKDYHYKAGFARRQRKGKKLHGEFDERYQKDRQSQ |
| | | PIEPSQRSPDYIKFLDSRLKWFNEGTATYMQRVVTNVKFDKFRSTQKQMMAMAKEIVGDINVH |
| | | DKATTQPSKIRVVFVGNCSTPANSTIKGHRRSPGNAPIVRYLKQIPQTYVDATIDEYCTTKKCSRC |
| | | YQTLDDVEFSKERLKLCHNCKLAENSTSTNLVSTYQRKKVIAEAMIPITEDYPKPTQFERAQRVA |
| | | MERTKRWSFGDKMRMAARIKLKSTTYTVNTTATLKHLYWNRDGNAARNIMQLGLCQYNDCLP |
| | | IEFNKDEAFQRPKKKD (SEQ ID NO: 624) |
| Leptopilina | XP_ | MEKKNDNVNSDRSPPSRQENEIRRVEELNNFHRRAVSRPFIQVLPSSNPLPQFNLTSNRSLELENR |
| | 043477481.1 | PPQQTSARIQRTVSSPFIPVLPFESNEGRVRRPLFDPTSMEEASSSTSGITEEEVSLDEIPSNVQI |
| | | EKFQFFDENTRMSEGSGVDYCKSKEHDFDDDTTLSWQRNLGLMNIVSSSSFKDSSTPMDIDNEEKEE |
| | | ETTSSPTPKKRYKLNLKEEKLVEDVFSQQSTSKEQKLGRKTPLKKKKSLSPIPSTSRQADENDYL |
| | | QSLNLQEEKDSTFKIPEPLATPSNMKKTTKSTARKEKQQQQQQTKFTIKTGFESFCPNEQIRTIVN |
| | | DQVQMLSRMFILISLLVNFALRHPTNTFLLDEWSKNGPDYLTITYLFKEKEPVKSTKNAFLKKLR |
| | | EEFVPEFSEYMGRPFEKFDCTNLTSQVQQMAAQMNTNFTTNLTTHCRNRLAKFFKNELLKKSPS |
| | | YKERKSRVIDEKSIEERDMKRKEEKRKRARKNKKKRIKWDKKKRMKRKSGRQKRIEKHNKCRN |
| | | LYPNNKKMRDKLINIQSKTEQKSRNVDLRKIVYDARKTIGRNRGKKKSSKKPRIQPPKTTPKNKT |
| | | CRNLQKEITPENETSDETSATIEKDKAEEEEEEEKEGYTIKTLIDNLLLNKCESEKLNQMNLEKLN |
| | | FGDIEDKNTCHKFLPFYIRLQKYFVDEKIKGFMLVPIMKPGLKYICYTNTALSDLEIVFKKKQNKT |
| | | EEKTPTKKMTRAEISKQEAEHKKLISPVKEKHKKLSSDKKILTRDIKLIKSEKNPYNKKRLAELQL |
| | | KLKVLNEDLSIINSELKNISENHKKVVTERNQDKYLENERRWERLFNFSKLRVNKKKYKFSGTIM |
| | | TDGIAVSVIYNVIKPKKIIDFSPTEQENVRDKTKYKILKGLDPGLKLAFGGVEREMQQDFDINSKD |
| | | KPIKIPTATFRFETQECKRRSILYKVGNDPKTYYENLLETPEFKDNVNHRDPSLIIPCTKFLLRTFY |
| | | DQQPNMENKKIARLRWDKYMLVQRETDYLADYLVGNREKKQLIAIGSPKISPWMRGHVRMPL |
| | | KKVVRRLAEEQDKYKNLRLVFVDEFNTTKMCSTCDQKMKILRNRTAYCSSCRIAWNRDVNAG |
| | | RNILNLALVRLGIIQKEQLPDSTKFRAIAEIE (SEQ ID NO: 625) |

TABLE 12
Other Representative Remote Fanzor Polypeptides

| | | |
|---|---|---|
| SAR | RLN86397.1 | MRLKVRTPQLLLRRLIGARKQACTMESIMDGVTEPNLSIRVDSNAAGTGTIFGSITDEHLVLL |
| | | FVLLRANPSRRPASGSSFSFFAMSGKRTKVDPPDKKTKRQCSDVGQRKARNKNTECSIVKCS |
| | | LKSFCQKSASVLPWDSVLKDTNKAVAEAYILANLRVVRLCEAGRPIPALDQEFYYQCLSAVS |
| | | VGLTARKKVDDEDLRQSVELYKSWRDPNVSFASSAHISYGWFQNASSQMATNASNHVVVN |
| | | FYRRIQKYVKQRVGITGKERYELLRDVLAPTYAGSDERVLGFRRWIPRNAEGYIDKEKPHLI |
| | | LPVTYRFLQFIEQENYRKREGPRYEQLRSFSLLPMKRGFECSHFKMCKLGLYALLRRAGIQIP |
| | | EIKRKEGQPCWNDVVDEWWHRLFKITKCETENRKFAGEISTDGKAVSIVLRKPKLPEPEKSP |
| | | SLKKDPKQYNFGEVWGLDPGRRDLFVATNNFGETIACSTREFYEDAKYTSSNMTTRYWIDH |
| | | NPKILEAIRNMPSPKTCSLQKLEAYVRFLSPRLDRLLDFRMAKPFRKLKFRRYIFMKNKLREL |
| | | CAKLTARAGANTLIGFGDWSATDYGGFIKKCPTGPVKKLEKELKRYCIVDSVPEFRTSKLHA |
| | | DCRRELTYQYALRTCKDGIVRRVKVYSVLHYPHNGCFGMTVNRDQNASKNILLLTLPHFLG |
| | | QDRHPACCRQGT (SEQ ID NO: 626) |
| SAR | POM76581.1 | MSCKRKKKADVPGKAKRQRPDVRERIKRNKTTEISVVKCSLNSFCNESARALPWESVLKDM |
| | | NKAVKEAFILANIRVLHLCNVNRPIPPLDQVFYYNCLSAVSVDLRARRKIDDADLRQSVELY |
| | | KSWLDSAVQYSSSAYISSGWFENASLQMATNASNHIVVNFYRRFQKYVKQRFGITGKDRYE |
| | | LLRDVLAPNYEDNNQLVTELRGWIPRNEDGFIDKANPHLMLPVMYRFLQFIEAENDSHHDD |
| | | LEFQQLRTFSLLPLKRGFECSHFKMCKLGLHALLQRAGISIPPLQAKDGLVWNDVVNEWWY |
| | | KLFKIAKFETEYRKFAGEILTDGKAVSIVLRKPKRPLQEKQTKKDSKTYNFSEVWGLDPGRR |
| | | DLFVATNNFGQTISCSSREFYEEAKYKSSNKTTHYWIEHDPKILEAIRNMPSPKTCSLQILEMY |
| | | VRFLIPRIDLLLDFRMAKPFRKLKFRRYIFMKKKLRELCQKLTARAGRNTLIGFGDWSATDY |
| | | GGLIKKCPGGPVRKLEKELKHYCTVDSIPEFRTSKLHADCHRELTYQFALRKCKDEVVRLVK |
| | | IYSVLHCRHNGCFGMTVNRDQNASKNILLLTLPHFFGQDRHPAFCRQRS (SEQ ID NO: 627) |
| Crypto- | XP_ | MSNIRIVKRKAKGFFKCEDLVTIKDAVKAAHRIMSDASILVRSYYLRWFQSSYPLDSDDKEL |
| phycea | 005840014.1 | ELEHFHISMACSIVQGITRPPVRGVGPEQSVKIDVENDMLDEYKRLYERAPNDKENETDLSLS |
| | | HVLAYSIDNLLTAYKNNIEAHFSKYVKRFIRCDMLAKGFNKSEANRVAAIYTNAYIYDSSLD |
| | | LEPDFMERLGLEATSYSSLFPSKINKGGFPRVYDLKANPWVYLPKMVMINQALETDFSSVEH |
| | | KERRLLNPLPFYSSFVPMHIRIDTSGLSQLLMTKDRLDDFKRSYLAEFGVSLNIKNKGDMLAS |
| | | FEKIFGRKATSNREAGLYATEMWSFLTNLKTCRQWKELDGVVRKNDPKGTQWMFDNAVV |
| | | TDGVSISFQVIDNSMFGRKAFSGRKKRVACQEANDEEDSKQVTREELKTSKLLGCDPGKRDI |
| | | LAITDGIKTICYTKGQRDMDTHKTIRLRTSLKRRRGCGLEEYETQVMNRFQKRSCHPEMFRR |
| | | YACSRKRMEHMLLECYSHPVFREFKFLVYNKTKSSEHRFMHRVLETFKRPQTNLSKARCAS |
| | | GVMRMNALKEVQRHGDIIIGWGNWGKNPNALRCSAGPTPGIGIRRRFESLFKTTTVPEHYTS |
| | | QECPSCKGRCLRKATGNPIMRHHLLRCTNDSCCSRWWNRNVAGAFNILTRLLDGQTLSGNE |
| | | TTGDGLGGDDL (SEQ ID NO: 628) |

### Example 4—Structural Mining for Fanzor Polypeptides and NcRNA Locations

[1398] A general structural mining strategy for identifying suitable Fanzor polypeptides and homologues are shown in FIGS. 27-28. Seeds for the mining method were Fanzor1 and Fanzor2 of Bao and Jurka. 2013. Mobile DNA 4, Article No. 12. Candidates resulting from the structural mining and curation were tested in human cells. Genomic mining results were manually curated to align very closely related Fanzors. Specifically, the closely related Fanzors were close enough related that ends could be predicted. Fanzor16 (Fz16) was demonstrated to work in human cells and the border ncRNA. See also Example 2 herein.

### Example 5—Empty Fanzor Loci

[1399] Using the structural and genomic mining approach previously described (see e.g., Example 4 herein), Applicant also identified at least 23 “empty” Fanzor loci that encode the ncRNA, the IR ends, but not the Fanzor protein itself. Without being bound by theory, Applicant believes these are Fanzor attraction sites. See e.g., FIGS. 29-30.

### Example 7

[1400] Fanzor systems that included N- or C-terminal NLS tagged Fanzor (FZID16) prolylpeptides were evaluated using guide sequences of varying lengths (11-30 nucleotides (nt)). Activity of the system was evaluated by detecting indels as previously described (see strategy related to e.g., FIG. 10B). Results are shown in FIG. 34.

### Example 8

[1401] Additional Fanzor (FZID16) variants were generated (see e.g., FIG. 35 for mutations in relation to wild-type FZID16). Activity of the Fanzor variants were evaluated by detecting indels as previously described (see e.g., Example 2). Results are shown in FIG. 35.

### Example 9

[1402] Additional Fanzor systems and components were identified in various organisms using bioinformatical analysis and other techniques, including but not limited to structural mining, modeling, and analysis. FIG. 36 shows results from bioinformatical and expression characterization of a Fanzor polypeptide and ωRNA from an exemplary algae (Guillardia theta). Structural mining was used to identified Fanzor systems and components. FIG. 37 shows the predicted secondary structure of the ωRNA from G. theta of FIG. 36. FIG. 38 shows results from bioinformatical characterization and identification of G. theta predicted transposon ends from the identified G. theta ωRNA structure.

[1403] FIG. 39 shows results from bioinformatical and expression characterization of a Fanzor polypeptide and ωRNA from Mollusca (Batillaria attramentaria), an exemplary multicellular eukaryotic organism. FIG. 40 shows a predicted secondary structure of the ωRNA from B. attramentaria of FIG. 39. Structural mining was used to identified Fanzor systems and components.

[1404] FIG. 41 shows results from the bioinformatical and expression characterization of Fanzor polypeptides and ωRNA identified in Mollusca (Dreissena polymorpha), an exemplary multicellular eukaryotic organism. 4 contigs were evaluated, ωRNA was identified in 2 of them. FIG. 42A-42B shows the predicted secondary structure exemplary ωRNAs identified the two contigs from D. polymorpha of FIG. 41. Structural mining was used to identified Fanzor systems and components.

[1405] FIG. 43 shows results from the bioinformatical and expression characterization of Fanzor polypeptides and ωRNA identified in Mollusca (Mercenaria mercenaria), an exemplary multicellular eukaryotic organism. 4 contigs were evaluated, ωRNA was identified in 3 of them. FIG. 44A-44C shows the predicted secondary structures of exemplary ωRNAs identified the three contigs from M. mercenaria of FIG. 43. Structural mining was used to identified Fanzor systems and components.

[1406] FIG. 45A-45C shows results from the bioinformatical analysis and prediction of transposon ends of ωRNA identified in M. mercenaria. Boxes indicate accession numbers of contigs where ωRNA was identified of the 4 contigs evaluated. FIG. 45A-45B shows LE and RE transposon end analysis prior to considering ωRNA structure. FIG. 45C shows transposon end bioinformatical analysis from the ωRNA structure, which clarified the transposon LE and RE ends. Structural mining was used to identified Fanzor systems and components.

[1407] Table 13 provides polynucleotide sequences of and/or encoding exemplary Fanzor system components from representative Fanzor type 1 and Fanzor type 2 systems.

TABLE 13
Additional Exemplary Fanzor systems

| | | | | Predicted | |
|---|---|---|---|---|---|
| | Accession | | | omegaRNA by | |
| Type | No. | Description | Sequence (ORF) | RNP-RNAseq | TAM |
| Fanzor 1 | NW_00543 | Guillardia | ATGTCAAACATTAGGATTGTAAAACG | CACTATCCGGTAACG | 5′-NNTTAA-3′ |
| (Cas12-like) | 4667 e | theta | AAAGGCGAAGGGCTTCTTCAAGTGTG | AAACTACCGGAGAC | |
| | | CCMP2712 | AGGACCTAGTCACAATCAAGGATGCT | GGGTTAGGAGGTGAC | |
| | | unplaced | GTCAAGGCAGCTCATAGGATCATGTC | GACCTCTAAAACCTA | |
| | | genomic | AGATGCGTCCATACTCGTCCGGTCATA | GAACTTAGAGTGCAA | |
| | | scaffold | TTATCTGCGATGGTTCCAGAGCTCATA | AAACGCCATTACGAT | |
| | | GUITH | TCCCCTTGATTCAGATGACAAGGAACT | TGTGATGCCTATTCA | |
| | | scaffold_7, | TGAGCTTGAGCACTTCCATATATCCAT | AGGGTGTCCCAAGTG | |
| | | whole | GGCCTGCAGCATAGTCCAGGGTATAA | TAAAAAGAAAGCAC | |
| | | genome | CAAGGCCTCCAGTCCGTGGTGTTGGTC | TCTAAGAGCATTAAA | |
| | | shotgun | CTGAACAATCTGTCAAGATAGACGTC | CTCTA (SEQ ID NO: | |
| | | sequence | TTCAATGACATGTTAGATGAGTATAA | 630) | |
| | | | GAGGCTGTACGAGCGTGCTCCAAATG | | |
| | | | ATAAAGAGAACGAAACGGACCTCTCT | | |
| | | | CTATCGCATGTCTTAGCATATTCCATC | | |
| | | | GACAACCTTCTTACCGCGTATAAAAA | | |
| | | | CAACATCGAAGCCCATTTCTCAAAAT | | |
| | | | ATGTCAAACGCTTCATCCGATGTGATA | | |
| | | | TGTTGGCTAAGGGCTTCAATAAGTCTG | | |
| | | | AGGCAAACAGAGTGGCGGCAATATAT | | |
| | | | ACCAATGCCTATATTTATGACTCATCC | | |
| | | | CTCGACCTGGAACCAGACTTTATGGA | | |
| | | | AAGATTAGGCCTTGAGGCAACAAGTT | | |
| | | | ATTCATCTCTATTCCCCTCTAAGATAA | | |
| | | | ATAAGGGCGGTTTTCCAAGGGTCTAT | | |
| | | | GACCTGAAGGCCAACCCTTGGGTCTA | | |
| | | | TCTTCCAAAGATGGTCATGATAAATCA | | |
| | | | GGCCTTAGAGACAGACTTCTCTTCTGT | | |
| | | | AGAGCATAAGGAGAGGAGGCTGCTCA | | |
| | | | ATCCACTGCCCTTCTATTCATCGTTTG | | |
| | | | TTCCGATGCACATACGGATTGATACAT | | |
| | | | CCGGCTTATCGCAGCTGCTGATGACTA | | |
| | | | AGGATAGGCTTGATGATTTCAAGAGA | | |
| | | | TCTTATCTTGCTGAGTTTGGAGTAAGT | | |
| | | | CTAAATATAAAGAACAAGGGTGATAT | | |
| | | | GCTAGCAAGTTTTGAGAAGATCTTTGG | | |
| | | | CCGGAAGGCAACATCCAATAGAGAGG | | |
| | | | CCGGATTGTATGCAACAGAGATGTGG | | |
| | | | AGCTTCTTGACAAACCTGAAGACATG | | |
| | | | CCGTCAATGGAAGGAGCTTGATGGGG | | |
| | | | TTGTTCGTAAGAACGATCCCAAGGGA | | |
| | | | ACACAATGGATGTTTGACAATGCTGTT | | |
| | | | GTAACGGACGGTGTTTCAATCTCATTC | | |
| | | | CAGGTGATCGATAACAGCATGTTTGG | | |
| | | | ACGGAAGGCCTTCTCTGGCAGGAAGA | | |
| | | | AGAGGGTAGCATGTCAGGAGGCCAAT | | |
| | | | GATGAAGAAGATAGCAAGCAGGTAAC | | |
| | | | AAGAGAAGAGCTAAAGACATCGAAGC | | |
| | | | TCTTGGGATGTGACCCTGGGAAGAGA | | |
| | | | GACATCCTAGCAATAACAGATGGCAT | | |
| | | | AAAGACTATCTGTTACACCAAGGGGC | | |
| | | | AGAGAGACATGGACACGCATAAGACA | | |
| | | | ATAAGGTTGAGAACCAGTCTGAAGAG | | |
| | | | GCGCCGAGGCTGCGGCCTAGAGGAGT | | |
| | | | ATGAGACACAGGTGATGAACCGGTTC | | |
| | | | CAGAAACGGTCATGCCATCCTGAGAT | | |
| | | | GTTTCGACGCTATGCCTGTTCCAGGAA | | |
| | | | GAGGATGGAACACATGCTGCTTGAAT | | |
| | | | GTTATTCTCATCCAGTCTTTAGAGAGT | | |
| | | | TCAAATTCTTGGTTTACAACAAGACTA | | |
| | | | AGAGCTCCGAACATAGGTTCATGCAT | | |
| | | | AGGGTGTTGGAAACATTCAAACGGCC | | |
| | | | GCAAACAAACCTGAGCAAGGCGAGGT | | |
| | | | GTGCGTCAGGAGTTATGCGTATGAAT | | |
| | | | GCCTTGAAGGAGGTCCAAAGGCATGG | | |
| | | | AGATATCATTATAGGGTGGGGCAACT | | |
| | | | GGGGAAAGAATCCAAACGCGCTACGA | | |
| | | | TGCTCGGCAGGACCAACCCCAGGCAT | | |
| | | | TGGAATAAGGAGAAGGTTTGAATCGC | | |
| | | | TGTTCAAAACAACAACAGTGCCAGAA | | |
| | | | CACTACACCTCCCAAGAATGTCCGAG | | |
| | | | TTGTAAGGGACGATGCCTAAGAAAGG | | |
| | | | CAACTGGCAACCCGATCATGAGACAC | | |
| | | | CATCTGCTTCGTTGTACAAACGATAGT | | |
| | | | TGCTGTAGCAGGTGGTGGAATCGGAA | | |
| | | | TGTAGCCGGGGCGTTCAACATCCTAA | | |
| | | | CAAGGCTGTTGGATGGACAAACACTA | | |
| | | | TCCGGTAACGAAACTACCGGAGACGG | | |
| | | | GTTAGGAGGTGACGACCTCTAA (SEQ | | |
| | | | ID NO: 629) | | |
| Fanzor 2 | NW_02554 | Mercenaria | ATGAAGAGAAAACGAGAACAGATGA | TTAGGGCTCGATTCT | 5′-NNTTAA-3′ |
| (TnpB-like) | 2472 | mercenaria | CTTTGTGGAAAGCCGCGTTCGTCAATG | TTGCCTTCTCGATGC | |
| | | isolate | GACGGGAAACGTTCAAGTCATGGATT | ATTTATTGCCACAGA | |
| | | YKG-2019 | GACAAGGCACGAATGCTGGAATTGAA | TTTTGCTAATGCAGT | |
| | | unplaced | CTGTGACATCTCTTCTGCAAGCTCGAC | TTCTGAGGCAAGAAT | |
| | | genomic | ACATTACTCGGATCTGGATTTGAAAA | GTGTTCGGGTAAAAA | |
| | | scaffold, | GCAAGTGTGCTAAGATAGAAGACAAG | GAGTTAATGGGCAAA | |
| | | ASM14805 | TTTATGTGTACATTTTCTGTCGGCATT | CTAT | |
| | | 67v1.1 | CGACCTACTTCTAAGCAAAACCGAAC | (SEQ ID NO: 632) | |
| | | original_ | TTTGAACCAGATGCTGAAAGTGAGCA | | |
| | | 1912, | ACTACGCCTACAATTGGTGTAATCACC | | |
| | | whole | TAGTTAAGGAGAAAGACTTCAAACCT | | |
| | | genome | AAGCAGTTCGACTTGCAAAGAGTGGT | | |
| | | shotgun | TACTAAAACGAATTCGCACGACGTTC | | |
| | | sequence | CGGCCGAGTACAGACTTCCCGGAGAC | | |
| | | | GACTGGTTTTTCGACAACAAGATGTCT | | |
| | | | TCTATCAAGTTGACCGCCTGTAAGAAC | | |
| | | | TTTTGCACCATGTACAAGTCTGCTCGA | | |
| | | | ACCAATCAGAAGAAAACAAAGGTCGA | | |
| | | | TCTCAGAAACAAAGACACTGCTTTGTT | | |
| | | | ACGCGAAGGATCGTTCGAAGTGCAGA | | |
| | | | GACAATACGTGAGGTTGCTAACGGAA | | |
| | | | AAAGACATACCAGACGAACGAATTCG | | |
| | | | GCAATCGAGAATAGCCTTAATGGCAG | | |
| | | | ACAACTTTTCGAAATCCAAGAAGGAC | | |
| | | | TGGAAAGAAAGGTTTCTCCGACTTTCG | | |
| | | | AAAAATGTGTCTAAGATACCTCCTTTA | | |
| | | | AATCACGACATGAAAGTGTGCAAACG | | |
| | | | TCCGAACGGAAAATTCATACTGCAAA | | |
| | | | TTCCATGCGATCCAATATGTACGCGAC | | |
| | | | AGATACAAGTGCACACCTCGGACTCG | | |
| | | | ATATGTTCCATCGATCCTGGAGGCAG | | |
| | | | GACGTTCGCGACGTGCTACGATCCTA | | |
| | | | GCAATATAAAGACATTTCAAATCGGA | | |
| | | | CCTGAGGCAGACAAGAAGGAAATCAT | | |
| | | | TCACAAATTCCACAACAAGATCGATA | | |
| | | | ATGTTCACCGTCTCTTGTCATATGCTC | | |
| | | | AAAAGAAAAAGCAGACGCAAGCAGT | | |
| | | | GCAAGACAGAATCGGACAGCTGAAGA | | |
| | | | AGCTGCACTTGAAACTGAAAACGTAC | | |
| | | | GTCGATGACGTGCACTTGAAACTGTG | | |
| | | | CTCGTACCTGGTCAAGAATTACAAACT | | |
| | | | GGTCGTTCTTGGCAGGATATCGGTTTC | | |
| | | | GTCCATCGTGAGAAAAGACAGACCGA | | |
| | | | ACCATTTGGCCAAAAAAGGCAACAGG | | |
| | | | GACTTGCTGTGTTGGCAACATTTCAGA | | |
| | | | TTCAGACAGAGACTGTTACATAGAGT | | |
| | | | TCGTGGCACGGACTGCGAAGCGATCG | | |
| | | | CTCAAGACGAACGGTACACTTCAAAG | | |
| | | | ACATGTGGTAACTGTGGAGTGCAAAA | | |
| | | | CAACAAACTGGGTGGAAATGAAACGT | | |
| | | | TTCATTGTAAAAGTTGCAACTACAAA | | |
| | | | ACTCACAGGGACGTCAACGGAGCGAG | | |
| | | | AAACATTCTTTGCAAATACTTGGGACA | | |
| | | | TTTTCCATTTGCTACATAA | | |
| | | | (SEQ ID NO: 631) | | |
| Fanzor 2 | NC_05931 | Mercenaria | ATGAAGAGAAAACGAGAACAGATGA | TTCGGGTTCGATTCT | 5′-NNNTAG-3′ |
| (TnpB-like) | 2 | mercenaria | CTTTGTGGAAAGCCGCGTTTGTCAACG | ATCCCCAGGGCTCGA | |
| | | isolate | GGCAGGAAACGTTCAAGTCCTGGATT | ATGCATTTTTGTCAC | |
| | | YKG-2019 | GACAAGGCACGAATGCTGGAATTGAA | AGATTTTGCCAATGC | |
| | | chromosome | CTGTGACGTCTCTTCTGCAAGCTCGAC | AAGATCTGGGGGCA | |
| | | 7, | ACATTACTCTGATCTGAACTTGAAGAC | AGAATGTCTCCGGGT | |
| | | ASM14805 | AAAGTGTGCCAAGACAGACGACAAAT | GAAAAGAGTCAGGC | |
| | | 67v1.1, | TTATGTGTAATTATTCTGTCTGCATAC | TGGAAAGATT (SEQ | |
| | | whole | GACCGACTTCTAAGCAGAAGCGAACG | ID NO: 634) | |
| | | genome | TTGAACCAGATGCTCAAGGTGAGCAA | | |
| | | shotgun | CTATGCTTACAATTGGTGCAATTACCT | | |
| | | sequence | AGTTAAGGAGAAAGACTTCAAACCGA | | |
| | | | AGCAGTTCGACTTGCAAAGAATTGTC | | |
| | | | GCTAAAACGAATTCAACAGACGTTCC | | |
| | | | GGCCGAATACAGGCTTCCAGGAGACG | | |
| | | | ACTGGTTTTTCGACAACAAGATGTCCT | | |
| | | | CTATCAAGTTGACCGCCTGTAAGAACT | | |
| | | | TTTGCACCATGTACAAGTCTACTCAAA | | |
| | | | CCAACCAGAAGAAAACAAAGGTCGAT | | |
| | | | CTCAGAAACAAAGACATTGTTCAGTT | | |
| | | | ACGCGAAGGATCGTTTGAAGTTCAAA | | |
| | | | GCAAGTACGTGAGATTGCTAACGGAA | | |
| | | | AAAGACATACCAGGCGAACGAATTCG | | |
| | | | GCAATCGAGAATTGCTTTGATGCCAG | | |
| | | | ACAGTTTTTCGAAATCAAAGAAGGAC | | |
| | | | TGGAAAGAAAGGTTTCTCAGGCTTTC | | |
| | | | GAAAAATGTATCTAAGATACCACCTTT | | |
| | | | GAGTCACGACATGAAGGTATGCAAAC | | |
| | | | GTCCGAATGGGAAATTCATACTGCAG | | |
| | | | ATTTCATGCGATCCAATATGTACTCGA | | |
| | | | CAGATACAAGTGCAAACTTCAGATTC | | |
| | | | GATATGTTCAATCGATCCGGGAGGCA | | |
| | | | GGACTTTTGCGACATGCTATGATCCTA | | |
| | | | GCAATATAAAGACATTTCAGATCGGA | | |
| | | | CCCGAGGCAGACAAAAAGGAAATCAT | | |
| | | | TCACGAATTTCACAACAAGATCGATT | | |
| | | | ATGTTCACCGTCTCTTGTCGCATGCTC | | |
| | | | AGGAGAAAAAGCAGACGCAAGCGGT | | |
| | | | GCAAGACAGAATCGGACAACTGAAGA | | |
| | | | AGCTGCACCTCAAACTGAAAACGTAC | | |
| | | | GTCGACGACGTGCACTTGAAATTGTG | | |
| | | | CTCGTACCTGGTCAAGAACTACAAAC | | |
| | | | TGGTCGTTCTCGGCAAGATATCGGTTT | | |
| | | | CGTCCATCGTGAGAAAAGACAGGCCG | | |
| | | | AACCATCTTGCCAAAAGCGCTAACAG | | |
| | | | GGACTTGCTCTGTTGGCAGCACTACAG | | |
| | | | ATTCAGACAGAGATTGTTACACAGAG | | |
| | | | TCCGTGGCACGGACTGCGAAGTGATC | | |
| | | | ATACAAGACGAACGTTACACTTCCAA | | |
| | | | GACCTGTGGTAATTGCGGTGAGAAGA | | |
| | | | ACAACAAACTCGGTGGAAAGGAAACG | | |
| | | | TTTACTTGTGAAAGTTGCAATTACAAA | | |
| | | | ACTCATCGAGACGTCAACGGAGCGAG | | |
| | | | AAACATTCTGTGCAAATACTTGGGACT | | |
| | | | TTTTCCATTTGCAGCGTAA | | |
| | | | (SEQ ID NO: | | |
| | | | 633) | | |

[1408] FIG. 46 shows results from the bioinformatical characterization of Fanzor polypeptides and ωRNA identified in an exemplary fungus (Batrachochytrium salamandrivorans, JAKFGG010000033). FIG. 46 shows analysis of 5 contigs were evaluated. Boxes indicate contigs where ωRNA was identified. FIG. 47 shows the predicted secondary structure an exemplary ωRNA identified from B. salmandrivorans of FIG. 46.

[1409] FIG. 48A-48B shows results from the bioinformatical characterization of Fanzor polypeptides and ωRNA identified in an exemplary fungi (Parasitella parasitica, LN731931 (FIG. 48A) and LN731111 (FIG. 481B)). FIG. 49A-49B shows the predicted secondary structure an exemplary fungi (Parasitella parasitica, LN731931 (FIG. 49A) and LN731111 (FIG. 49B)).

### Example 10

[1410] Bioinformatical characterization of small TnpB-like Fanzor genes/polypeptides in Naegleria lovaniensis (Nlov). See e.g., FIG. 50A-50D, FIG. 53A-FIG. 53G and Table 14. Seven copies were identified (labeled as ID34, ID35, ID36, ID37, ID38, ID39, and ID40). ID35 had activity in yeast. The start codon predicted by DNA sequence characterization was incorrect as determined by AF2 prediction. See e.g., the arrow and circle in FIG. 50A. The small deletion (see circle in FIG. 50A), ID35 recovered its structure and demonstrated activity. Besides ID35, all N-terminal extended proteins could bind to omegaRNA as demonstrated by Nlov Fanzor yeast RNP-RNAseq analysis. As shown in FIG. 50B-50C there was a noncoding RNA (ncRNA) that was always 125 nt at an analogous position in each of the Nlov Fanzor copies. Without being bound by theory this is believed to be an omegaRNA (FIG. 50C-50D).

[1411] A TAM screen identified the TAM sequence for the Nlov Fanzors as 5′-(A)NCCG-3′. See e.g., FIG. 51.

[1412] Fanzors ID34-ID40 were codon optimized for human and were analyzed for their ability to target the human genome by an indel assay in human cells. Two RNA species from ID35, one (143nt) was identified by yeast-RNP RNAseq and the extended version (277nt) were tested. ID35 (active in yeast) was also active in human cells. ID36 and ID38 also worked with the 277 nt RNA scaffold (FIG. 52A). A 0.71% indel rate was achieved by ID36 with ID35 277 nt RNA scaffold (FIG. 52B). Without being bound by theory it is possible that N-terminal extension does not matter in human cells. FIG. 53A-53G show maps of Nlov Fanzors identified by bioinformatic analysis.

TABLE 14
Nlov Fanzors

| Nlov | | | Polypeptide |
|---|---|---|---|
| Fanzor ID | Nucleotide sequence | Polypeptide sequence | Size |
| ID34 | atctcaacgaatgaagagaagtagagaggatgaacctactc | MKRSREDEPTHPPTNPSLAHGIIPF | 495 amino |
| | atcctcctactaatccatctcttgcacacggcatcattcca | WDEYSQQVSDELWACSRDSFHEF | acids |
| | ttctgggatgagtactcacaacaagtatcggatgaactttgg | NQYNNKGCTDRWFKFSQFTVIES | |
| | gcatgttcaagagattcctttcatgagtttaatcagtacaac | KPVFDVPLNVHYSITENVAFDNSK | |
| | aacaagggatgcactgacagatggttcaaattttctcaattc | KPPQLKKAKKNQKTPQKFQADKS | |
| | actgtgattgaatcaaagccagtgtttgatgttccactcaat | LKIRLYPNEQERTTLNQWMGTAR | |
| | gttcattactctataacagaaaatgtggcttttgataactct | WIYNKCLEFTNKSKGVKKNKKNF | |
| | aaaaagccacctcagctcaagaaggcaaagaagaatcaaaag | RTFVVNNDNYQTENQWVVNTPY | |
| | acgccccaaaaatttcaagcagacaaatcattgaaaattcg | DVRDAAANELLTAFKTNFEKKKA | |
| | tctctaccccaatgaacaagaaaggacaacattgaatcagt | GMIDKFMIRFRRKKDRKDHFVLH | |
| | ggatgggaactgctcgttggatctacaacaagtgtttagaa | CKHWKKKTGLYSFIRNIKSAKPLP | |
| | ttcaccaacaaatccaaaggtgtcaagaaaaataagaaga | EELQYDSIIIKNKLNHYYLCIPQVL | |
| | atttcagaacgtttgtggtgaacaacgataattatcagacag | DIRGENQAPQHSGQVVALDPGVR | |
| | aaaatcagtgggttgtaaatactccttatgacgtaagagatg | TFQTTFDLNGYSTKWGSGGAERIG | |
| | ctgccgctaatgaattgttgactgcatttaaaacaaattttga | RLCCAYDKLQSKWSQPEVRHCKR | |
| | aaagaagaaagctggaatgattgacaagttcatgatccgtt | YKYKRAGRRIQQKIRNIVDDLLKK | |
| | tcaggcgaaagaaagacagaaaagatcatttcgttctacat | LCLWLCRNYQVILLPSFETQKMV | |
| | tgcaagcactggaagaaaaagactggactgtattcttttata | KKLHRRINSKTARKMLTWSHYRF | |
| | aggaacatcaagagtgccaaacctttgcctgaggagcttc | KQRLLHKAREHPWTHIYIVNEAY | |
| | agtacgattccatcattattaagaacaagttgaaccattatta | TSKTCSCCGHVYTVGSSEVFRCPS | |
| | tttatgtattccacaagtactggacattaggggtgagaacca | CGSIFDRDINGARNILLRFLTTHRIS | |
| | agcccctcaacattcaggacaagttgtagcattggatccag | F* (SEQ ID NO: 636) | |
| | gagtaagaacatttcagaccacctttgatttgaatggttattc | | |
| | aaccaaatggggctcaggaggtgccgaaagaattggtag | | |
| | attgtgttgcgcgtatgacaagttgcaatcgaagtggtctca | | |
| | accagaagtcagacattgcaaaagatacaagtacaagag | | |
| | agcaggaagaagaattcaacaaaagattagaaatattgtg | | |
| | gatgatcttctcaagaaactgtgtttgtggctgtgtcgaaact | | |
| | accaagtgattttacttccttcgtttgagactcagaaaatggt | | |
| | aaagaaactccataggagaattaatagcaagacagcaag | | |
| | aaaaatgttgacttggtcacattacagattcaagcaaagatt | | |
| | gcttcacaaagctagagagcatccgtggacacacatttata | | |
| | ttgtcaacgaagcgtatacatccaaaacttgctcatgttgtg | | |
| | gacatgtttatacggttggatcatctgaagtgtttcgttgtcc | | |
| | atcatgtggctcaatttttgacagagatatcaatggagcaag | | |
| | aaatattcttcttcgattccttactactcatagaattagtttt | | |
| | (SEQ ID NO: 635) | | |
| ID35 | agagaagtagagaggatgaacctactcatcctcctactaat | MNLLILLLIHLLHTASFHSWACSR | 477 amino |
| | ccatctcttgcacacggcatcattccattcatgggcatgttc | DSFHEFNQYNNKGCTDGWFNFSQ | acids |
| | aagagattcctttcatgagtttaatcagtacaacaacaaggg | FTVIESQPVFDVPLNVHHSITENVA | |
| | atgcactgacggatggttcaacttttctcaattcactgtgatt | FDNSKKPPQLKKAKKGQKTPQKF | |
| | gaatcccagccagtatttgatgttccactcaatgttcatcact | QADKSMKIRLYPNEQERTTLNQW | |
| | ctataacagagaatgtggcttttgataactctaaaaagccac | MGTARWIYNKCLEFTNKSKGVKK | |
| | ctcagctcaagaaggcaaagaagggtcagaagactcccc | NKKNFRTFVVNNDNYQTENQWV | |
| | aaaaatttcaagcggacaaatcaatgaaaattcgtctctacc | VNTPYDVRDAAAIELLTAFNTNFE | |
| | ccaatgaacaagaaaggacaacattgaatcagtggatgg | KKKAGTIDKFMIRFRRKKDRKDH | |
| | gaactgctcgttggatctacaacaagtgtttagaattcacca | FVLRCKHWKKKSGMYSFIRNIKS | |
| | acaaatccaaaggtgtcaagaaaaataagaagaatttcag | AEPLPEELQYDSIIIKNKLNHYYLC | |
| | aacgtttgtggtgaacaacgataattatcagacagaaaatc | IPQVLDIRGENQAPQHSGQVVALD | |
| | agtgggttgtaaatactccttatgacgtaagagatgctgcc | PGVRTFQTTFDLNGYSTKWGSGG | |
| | gctattgaattgttaactgcgttcaacactaattttgaaaaga | AERIGRLCCAYDKLQSKWSQPEV | |
| | agaaggctggaacgattgacaagttcatgatccgtttcagg | RHCKRYKYKRAGRRIQQKIRNIVD | |
| | cgaaagaaagacagaaaagatcatttcgttctgcgttgcaa | DLHKKLCLWLCRNYQVILLPSFET | |
| | gcactggaagaaaaagagtggaatgtattcttttataagga | QKMVKKLHRRINSKTARKMLTW | |
| | acatcaagagcgccgaacctttgcctgaggagcttcagtatga | SHYRFKQRLLHKAREHPWTHIYIV | |
| | ttccatcattattaagaacaagttgaaccattattatttatgt | NEAYTSKTCSCCGHVYTVGSSEVF | |
| | attccacaagtactggatattaggggtgagaaccaagccc | RCPSCGSIFDRDINGARNILLRFLT | |
| | ctcaacattcaggacaagttgtagcattggatccaggagta | THRISF* (SEQ ID NO: 638) | |
| | agaacatttcagaccacctttgatttgaatggttattcaacca | | |
| | aatggggctcaggaggtgccgaaagaattggtagattgtg | | |
| | ttgcgcgtatgacaagttacaatcgaagtggtctcaaccag | | |
| | aagtcagacattgcaaaagatacaagtacaagagagcag | | |
| | gaagaagaattcaacaaaagattagaaatattgtggatgat | | |
| | ttacacaagaaactgtgtttgtggctgtgtcgaaactaccaa | | |
| | gtgatcttacttccttcgtttgagactcagaaaatggtaaaga | | |
| | aactccacaggagaattaatagcaagacagcaagaaaaa | | |
| | tgttgacttggtcacattacagattcaagcaaagattgcttca | | |
| | caaagctagagagcatccgtggacacacatttatattgtca | | |
| | acgaagcgtatacatccaaaacttgctcatgttgtggacat | | |
| | gtttatacggttggatcatcggaagtgtttcgttgtccatcat | | |
| | gtggctcaatttttgacagagatatcaatggagccagaaat | | |
| | attcttcttcgattccttactactcatagaattagtttt (SEQ | | |
| | ID NO: 637) | | |
| ID36 | tctcaacgaatgaagagaagtagagaggatgaacctactc | MKRSREDEPTHPPTNPSLAHGIIPF | 495 amino |
| | atcctcctactaatccatctcttgcacacggcatcattccatt | WNEYSQQVSDKLWACSRDSFHEF | acids |
| | ctggaatgagtactcacaacaagtatcggataaactttggg | NQYNNKGCTDGWFNFSQFTVIES | |
| | catgttcaagagattcctttcatgagtttaatcagtacaacaa | KPVFDVPLNVHHSITENVAFDNSK | |
| | caagggatgcacagacggatggttcaacttttctcaattca | KPPQLKKAKKNQKTPQKLQADKS | |
| | ctgtgattgaatccaagccagtgtttgatgttccactcaatgt | LKIRLYPNEQERTTLNQWMGTAR | |
| | ccatcactctataacagagaatgtggcttttgataactctaaa | WIYNKCLEFTHNFKDVKKNKKNF | |
| | aagccacctcagctcaagaaagcaaaaaagaatcaaaag | RTFVVNNDNYQTENQWVVNTPY | |
| | acgccccaaaaattgcaagcagacaaatcattgaaaatcc | DVRDAAAIELLTAFNTNFEKKKA | |
| | gactctaccccaatgaacaagaaaggacaacattgaatca | GMIDKFMIRFRRKKDRKDHFVLH | |
| | gtggatgggaactgctcgttggattacaacaagtgcttag | CKHWKKKSGLYSFIRNIKSAEPLP | |
| | aatttacacacaatttcaaagatgtcaagaaaaataagaag | EELQYDSIIIKNKLNHYYLCIPQVL | |
| | aatttcagaacgtttgtggtgaataacgataattatcagaca | DIRGENQAPQHSGQVVALDPGVR | |
| | gaaaatcagtgggttgtgaatactccttatgacgtaagaga | TFQTTFDLNGYSTKWGSGGAERIG | |
| | cgctgccgctattgaattgttgactgcgttcaacactaatttt | RLCCAYDKLQSKWSQPEVRHCKR | |
| | gaaaagaagaaggctggaatgattgacaagttcatgatcc | YKYKRAGRRIQQKIRNIVDDLHK | |
| | gtttcaggcgaaagaaagacagaaaagatcattttgttcta | KLCLWLCRNYQVILLPSFETQKM | |
| | cattgcaagcactggaagaaaaagagtggactgtattctttt | VKKLHRRINSKTARKMLTWSHYR | |
| | ataaggaatatcaagagtgccgaacctttgcctgaggagc | FKQRLLHKAREHPWTHIYIVNEAY | |
| | ttcagtatgattccatcattattaagaacaagctgaaccatta | TSKTCSCCGHVYTVGSSEVFRCPS | |
| | ttatttatgtattccacaagtactggatattaggggtgagaac | CGSIFDRDINGARNILLRFLTTHGIS | |
| | caagcccctcaacattcaggacaagttgtagcattggatcc | F* (SEQ ID NO: 640) | |
| | aggagttagaacatttcagaccacctttgatttgaacggttat | | |
| | tcaaccaaatggggctcaggaggtgccgaaagaattggt | | |
| | agattgtgttgcgcgtatgacaagttacaatcgaagtggtct | | |
| | caaccagaagtcagacattgcaaaagatacaagtacaag | | |
| | agagcaggaagaagaattcaacaaaagattagaaatattg | | |
| | tggatgatttacacaagaaactgtgtttgtggttgtgtcgaaa | | |
| | ctaccaagtgatcttacttccttcgtttgagactcagaaaatg | | |
| | gtaaagaaactccataggagaattaatagcaagacagcaa | | |
| | gaaaaatgttgacttggtcacattacagattcaagcaaagat | | |
| | tgcttcacaaagctagagagcatccgtggacacacatttat | | |
| | attgtcaacgaagcgtacacatccaaaacttgctcatgttgt | | |
| | ggacatgtttatacggttggatcatctgaagtgtttcgttgtc | | |
| | catcatgtggctcaatttttgacagagatatcaatggagcca | | |
| | gaaatattcttcttcgattccttactactcatggaattagtttt | | |
| | (SEQ ID NO: 639) | | |
| ID37 | tctcaacgaatgaagagaagtagagaggatgaacccact | MKRSREDEPTHPPTNPSLAHGIIPF | 495 amino |
| | catcctcctactaatccatctcttgcacacggcatcattccat | WDEYSQQVSDKLWACSRDSFHEF | acids |
| | tctgggatgagtactcacaacaagtatcggataaactttgg | NQYNNKGCTDGWFNFSQFTVIES | |
| | gcatgttcaagagattcctttcatgagtttaatcagtacaaca | KPVFDVPLSVHHSITENVAFDNSK | |
| | acaagggatgcactgacggatggttcaacttttctcaattca | KPPQLKKAKKNQKVAQKFQADK | |
| | ctgtgattgaatccaagccagtgtttgatgttccactcagtgt | SLKIRLYPKEQERTTLNQWMGTA | |
| | ccatcactctataacagagaatgtggcttttgataactctaaa | RWIYNKCLEFTHNFKGVKKNKKN | |
| | aagccacctcagctcaagaaagcaaaaaagaatcaaaag | FRTVVVNNDNYQTENQWVVNTP | |
| | gtggcccaaaaatttcaagcagacaaatccttgaaaatccg | YDVRDAAAIELLTAFKTNFEKKK | |
| | actctaccccaaagaacaagaaaggacaacattgaatcag | AGTIDKFMIRLRRKKDRKDHFVL | |
| | tggatgggaactgctcgttggatctacaacaagtgtttaga | HCKHWKKKNGLYSFIRNIKSAEPL | |
| | atttacacacaacttcaaaggtgtcaagaaaaataagaaga | LEELQYDSIIIKNKLNRYYLCIPQV | |
| | atttccgaacggttgtggtgaacaatgataattatcagacag | LEIRGENQAPQHSGQVVALDPGV | |
| | aaaatcagtgggttgtaaatactccttatgacgtaagagatg | RTFQTTFDLNGYSTKWGSGGAERI | |
| | ctgctgctattgaattgttgactgcgtttaaaacaaactttga | GRLCCAYDKLQSKWSQPEVRHCK | |
| | aaagaagaaagctggaacaattgacaagttcatgatccgtt | RYKYKRAGRRIQQKIRNIVDDLHK | |
| | taaggcgaaagaaagacagaaaagatcatttcgttctacat | KLCLWLCRNYQVILLPSFETQKM | |
| | tgcaagcactggaagaaaaagaatggactgtattcttttata | VKKLHRRINSKTARKMLTWSHYR | |
| | aggaacatcaagagtgccgaacctttgcttgaggagcttc | FKQRLLHKAREHPWTHIYIVNEAY | |
| | agtacgattccatcattattaagaacaagttgaaccgttatta | TSKTCSCCGHVYTVGLSEVFRCPS | |
| | tttatgtattccacaagtactggaaattaggggtgagaacca | CGSIFDRDINGARNILLRFLTTHRIS | |
| | agcccctcaacattcaggacaagttgtagcgttggatccag | F* (SEQ ID NO: 642) | |
| | gagtaagaacatttcagaccacctttgatttgaatggttattc | | |
| | aaccaaatggggctcaggaggtgccgaaagaattggtag | | |
| | attgtgttgcgcgtatgataagttacaatcgaagtggtctca | | |
| | accagaagtcagacattgcaaaagatacaagtacaagag | | |
| | agcaggaagaagaattcaacaaaagattagaaatattgtg | | |
| | gatgatctacacaagaaactgtgtttgtggttgtgtcgaaac | | |
| | taccaagtgatcttacttccttcgtttgagactcagaaaatgg | | |
| | taaagaaactccataggagaattaatagcaagacagcaag | | |
| | aaaaatgttgacttggtcacattacagattcaagcaaagatt | | |
| | gcttcacaaagctagagagcatccgtggacacacatttata | | |
| | ttgtcaacgaagcgtacacatccaaaacttgctcatgttgtg | | |
| | gacatgtttatacggttggattatctgaagtgtttcgttgtcca | | |
| | tcatgtggctcaatttttgacagagatatcaatggagcaaga | | |
| | aatattcttcttcgattccttactactcatagaattagcttt | | |
| | (SEQ ID NO: 641) | | |
| ID38 | tctcaaacaatgaagagaagtagagaggatgagcccact | MKRSREDEPTHPPTNPSLAHGIIPF | 495 amino |
| | catcctcctactaatccatctcttgcacacggcatcattccat | WDEYSQQVSDKLWACSRDSFHEF | acids |
| | tctgggatgagtactcacaacaagtatcggataaactttgg | NQYNNKGCTDGWFNFSQFTVIES | |
| | gcatgttcaagagattcctttcatgagtttaatcagtacaaca | KPVFDVPLNVHHSITENVAFDNSK | |
| | acaagggatgcacagacggatggttcaacttttctcaattc | KPPQLKKAKKNQKVAQKFQADK | |
| | actgtgattgaatccaagccagtgtttgatgttccactcaatg | SLKIRLYPNEQERTTLNQWMGTA | |
| | tccatcactctataacagagaatgtggcttttgataactctaa | RWIYNKCLEFTNKSKGVKKNKKN | |
| | aaagccacctcagctcaagaaagcaaaaaagaatcaaaa | FRTFVVNNDNYQTENQWVVNTP | |
| | ggtggcccaaaaatttcaagcagacaaatccttgaaaatcc | YDVRDAAAIELLTAFNTNFEKKK | |
| | gactctaccccaatgaacaagaaaggacaacattgaatca | AGTIDKFMIRFRRKKDRKDHFVLH | |
| | gtggatgggaactgctcgttggatctataacaagtgtttaga | CKHWKKKSGLYSFIRNIKSSEPLPE | |
| | attcactaacaaatccaaaggtgtcaagaaaaataagaag | ELQYDSIIIKNKLNHYYLCIPQVLD | |
| | aatttcagaacgtttgtggtgaacaacgataattatcagaca | IRGENQAPQHSGQVVALDPGVRT | |
| | gaaaatcagtgggttgtgaatactccttatgacgtaagagat | FQTTFDLNGYSTKWGSGGAERIG | |
| | gctgccgctattgaattgttgactgcgttcaacactaattttg | RLCCAYDKLQSKWSQPEVRHCKR | |
| | aaaagaagaaggctggaacgattgacaagttcatgatccg | YKYKRAGRRIQQKIRNIVDDLHK | |
| | ttttaggcgaaagaaagacagaaaagatcatttcgttctaca | KLCLWLCRNYQVILLPSFETQKM | |
| | ttgcaagcactggaagaaaaagagtggactgtattcttttat | VKKLHRRINSKTARKMLTWSHYR | |
| | aaggaacatcaagagttccgaacctttgcctgaggagcttc | FKQRLLHKAREHPWTHIYIVNEAY | |
| | agtacgattccatcattattaagaacaagttgaaccattatta | TSKTCSCCGHIYTVGSSEVFRCPSC | |
| | tttatgtattccacaagtactggatattaggggtgagaacca | GSIFDRDINAARNILLRFLTTHRISF | |
| | agcccctcaacattcaggacaagttgtagcattggatccag | * (SEQ ID NO: 644) | |
| | gagtaagaacatttcagaccacctttgatttgaatggttattc | | |
| | aaccaaatggggctcaggaggtgccgaaagaattggtag | | |
| | attgtgttgcgcgtatgacaagttacaatcgaagtggtctca | | |
| | accagaagtcagacattgcaaaagatacaagtacaagag | | |
| | agcaggaagaagaattcaacaaaagattagaaatattgtg | | |
| | gatgatttacacaagaaactgtgtttgtggttgtgtcgaaact | | |
| | accaagtgattttacttccttcgtttgagactcagaaaatggt | | |
| | aaagaaactccacaggagaattaatagcaagacagcaag | | |
| | aaaaatgttgacttggtcacattacagattcaagcaaagatt | | |
| | gcttcacaaagctagagagcatccgtggacacacatttata | | |
| | ttgtcaacgaagcgtatacatccaaaacttgctcatgttgtg | | |
| | gacatatttatacggttggatcatccgaagtgtttcgttgtcc | | |
| | atcatgtggctcaatttttgacagagatatcaatgcagcaag | | |
| | aaatattcttcttcgattccttactactcatagaattagtttt | | |
| | (SEQ ID NO: 643) | | |
| ID39 | tctcaaacaatgaagagaagtagagaggatgaacctactc | MKRSREDEPTHPPTNPSLAHGIIPF | 385 Amino |
| | atcctcctactaatccatctcttgcacacggcatcattccatt | WDEYSQQVSDELWACSRDSFHEF | Acids |
| | ctgggatgagtactcacaacaagtatcggatgaactttggg | NQYNNKGCTDGWFNFSQFTVIES | |
| | catgttcaagagattcctttcatgagtttaatcagtacaacaa | KPVFDVPLNVHHSITENVAFDNSK | |
| | caagggatgcactgacggatggttcaacttttctcaattcac | KPPQLKKAKKNQKVAQKFQADK | |
| | tgtgattgaatccaagccagtgtttgatgttccactcaatgtt | SLKIRLYPNEQERTTLNQWMGTA | |
| | caccactccataacagagaatgtggcttttgataactctaaa | RWIYNKCLEFTHNFKDVKKNKKN | |
| | aagccacctcagctcaagaaagcaaaaaagaatcaaaag | FRTFVVNNDNYQTENQWVVNTP | |
| | gtggcccaaaaatttcaagcagacaaatccttgaaaatccg | YDVRDAAAIELLTAFNTNFEKKK | |
| | actctaccccaatgaacaagaaaggacaacattgaatcag | AGMIDKFMIRFRRKKDRKDHFVL | |
| | tggatgggaactgctcgttggatctacaacaagtgcttaga | HCKHWKKKSGLYSFIRNIKSAEPL | |
| | atttacacacaacttcaaagatgtcaagaaaaacaagaag | PEELQYDSIIIKNKLNHYYLCIPQV | |
| | aatttcagaacgtttgtggtgaacaacgataattatcagaca | LDIRGENQAPQHSGQVVALDPGV | |
| | gaaaatcagtgggttgtgaatactccttatgacgtaagagat | RTFQTTFDLNGYSTKWGSGGAERI | |
| | gctgccgctattgaattgttgactgcgttcaacactaattttg | GRLCCAYDKLQSKWSQPEVRHCK | |
| | aaaagaagaaggctggaatgattgacaagttcatgatccg | RYKYKRAGRRIQQKIRNIVDDLHK | |
| | tttcaggcgaaagaaagacagaaaagatcattttgttctcca | NCVCGCVETTK* | |
| | ctgcaagcactggaagaaaaagagtggactgtattcttttat | (SEQ ID NO: 646) | |
| | aaggaacatcaagagtgccgaacctttgcctgaggagctt | | |
| | cagtacgattccatcattattaagaacaagttgaaccattatt | | |
| | atttatgtatcccacaagtactggatattaggggtgagaacc | | |
| | aagcccctcaacattcaggacaagttgtagcattggatcca | | |
| | ggagtaagaacatttcagaccacctttgatttgaatggttatt | | |
| | caaccaaatggggctcaggaggtgccgaaagaattggta | | |
| | gattgtgttgcgcgtatgataagttgcaatcgaagtggtctc | | |
| | aaccagaagtcagacattgcaaaagatacaagtacaaga | | |
| | gagcaggaagaagaattcaacaaaagattagaaatattgt | | |
| | ggatgatcttcacaagaactgtgtttgtggctgtgtcgaaac | | |
| | taccaag (SEQ ID NO: 645) | | |
| ID40 | Tctcaaacaatgaagagaagtagagaggatgaacctact | MKRSREDEPTHPPTNPSLAHGIIPF | 327 amino |
| | catcctcctactaatccatctcttgcacacggcatcattccat | WDEYSQQVSDELWACSRDSFHEF | acids |
| | tctgggatgagtactcacaacaagtatcggatgaactttgg | NQYNNKGCTDGWFNFSQFTVIES | |
| | gcatgttcaagagattcctttcatgagtttaatcagtacaaca | KPVFDVPLNVHHSITENVAFDNSK | |
| | acaagggatgcactgacggatggttcaacttttctcaattca | KPPQLKKAKKNQKVAQKFQADK | |
| | ctgtgattgaatccaagccagtgtttgatgttccactcaatgt | SLKIRLYPNEQERTTLNQWMGTA | |
| | tcatcactctataacagagaatgtggcttttgataactctaaa | RWIYNKCLEFTNKSKGVKKNKKN | |
| | aagccacctcagctcaagaaagcaaaaaagaatcaaaag | FRTFVNNDNYQTENQWVVNTPY | |
| | gtggcccaaaaatttcaagcagacaaatccttgaaaatccg | DVRDAAAIELLTAFKTNFEKKKA | |
| | actctaccccaatgaacaagaaaggacaacattgaatcag | GTIDKFMIRFRRKKDRKDHFVLHC | |
| | tggatgggaactgctcgttggatctacaacaagtgtttaga | KHWKKKNGLYSFIRNIKSAEPLPV | |
| | attcaccaacaaatccaaaggtgtcaagaaaaataagaag | ELQYDSIIIKNKLNHYYLCIPQVLD | |
| | aatttcagaacgtttgtgaacaacgataattatcagacagaa | IRGENQAPQHSGQVVALDPGVRT | |
| | aatcagtgggttgtgaatactccttatgacgtaagagatgct | FQTTFDLNGYSTKMGLRRCRKNW | |
| | gccgctattgaattgttgactgcgttcaaaacgaacttcgaa | * (SEQ ID NO: 648) | |
| | aagaagaaggctggaacgattgacaagttcatgatccgttt | | |
| | taggcgaaagaaagacagaaaagatcattttgttctccact | | |
| | gcaagcactggaagaaaaagaacggactgtattcttttatt | | |
| | aggaacatcaagagtgccgaacctttgcctgtggagcttc | | |
| | agtacgattccatcattattaagaacaagttgaaccattatta | | |
| | tttatgtattccacaagtactggatattaggggtgagaacca | | |
| | agcccctcaacattcaggacaagttgtagcattggatccag | | |
| | gagtaagaacatttcagaccacctttgatttgaatggttattc | | |
| | aaccaaaatggggctcaggaggtgccgaaagaattgg | | |
| | (SEQ ID NO: 647) | | |

### Example 11

[1413] The structure of a representative Fanzor complexed with an omega RNA and target was modeled. FIG. 54 shows ternary Fanzor-omega RNA-target DNA complex modeling data based on Spu Fanzor (ID83). The chain ID of the protein is P, the omega RNA is W, the DNA target strand is T, and the DNA non-target strand is N. FIG. 55A-55D show views of the 3D model structure (FIGS. 55A and 55C) and 3D ribbon model (FIGS. 55B and 55D) for an exemplary Fanzor-omega RNA-target DNA complex generated from the data shown in FIG. 54. NTS refers to the non-target strand. TS refers to the target strand.

### Example 12

[1414] Additional Fanzor mutants were engineered and analyzed for functionality against a target locus in the human genome using an indel assay. FIG. 56A-56D show results from functional screening of Fanzor mutation variants. N- or C-terminally tagged (previously described) SpuFanzor wild-type (WT) or variants harboring mutations were screened for indel activity against a target locus in the human genome (FIG. 56A). Applicant also conducted R-substitution scanning of untagged Spu Fanzor WT (Fanzor ID16) or variants harboring point mutations in the Wedge (WED) and/or Bridge Helix domain (FIG. 56B). Untagged or Tagged (C- or N-terminal tag) WT or SpuFanzor mutation variants harboring mutations in the RuvC domain were screened for indel activity against a target locus in the human genome (FIG. 56C). (FIG. 56D) Untagged or Tagged (C- or N-terminus) WT or SpuFanzor mutation variants harboring various combinations of point mutations were screened for indel activity against a target locus in the human genome (FIG. 56D).

### Example 13

[1415] FIG. 57 shows a comparison of the architectures of TnpB/Fanzor/Cas12 proteins. FIG. 58 shows a detail of the REC architecture of TnpB, Fanzor2 and Fanzor 1 (e.g., ID83). The scaffoldREC (scaREC) can harbor REC1 domain. From a structural comparison of all Cas12 proteins (X-ray crystal structures and models), TnpB, and Fannzor (ID83), Applicant observed that the gRNA/omegaRNA contains a core region that interacts the same way in each system with the WED/BH areas of the TnpB and some Cas12 proteins, while the remaining portion seems to evolve freely to, without being bound by theory, retain some stability. Applicant referred to this observed core region in the gRNAs the “nexus area”. The nexus area is a hairpin structure (See also e.g., FIG. 59B). Applicant also observed that the scaffoldREC+wREC (a WED domain harbored by a REC domain) cover the hybrid spacer:target duplex on one side. The Bridge helix (BH)+bREC cover the other side of the hybrid spacer:target duplex (FIG. 59A). Colors noted in FIG. 59A are represented in greyscale. Applicant also observed in their models that these REC domains that protect the hybrid spacer:target are isolated and do not interact much with other parts of the protein and seem to only cover the hybrid region. As such and without being bound by theory, Applicant identified these REC domains as domains and/or locations within the protein suitable for engineering chimeric proteins harboring REC domains from different proteins.

### Example 14

[1416] As previously discussed, Applicant identified that the REC domains that protect the hybrid spacer:target complex are suitable for chimeric engineering. As shown in FIG. 60A-60L Applicant modeled Cas12 protein complexes (FIG. 60A-60K show Cas12a-Cas12k, respectively, and FIG. 60L shows Cas12m). Three Cas12 proteins (Cas12a, Cas12d, and Cas12e in FIG. 60A, 60D, and 60E, respectfully) contain a secondary wREC (wREC2) domain positioned right after their first REC domain (wREC1). Applicant observed that Cas12 of FIG. 60C may have a REC upstream of the WED. The Cas12 of FIG. 60F was modeled to form a dimer, thus resulting the dimer having two RECs. Applicant has identified that these wREC2 domains of e.g., Cas12a, Cas12d, and Cas12e are suitable for insertion into Fanzor so as to generate a chimeric Fanzor. Further, Applicant has identified several exemplary positions within different Fanzors where the chimeric REC2 domains can be inserted. These sites are S246 in Fanzor ID83, N259 in Fanzor ID16, K165 in Fanzor ID89, and G210 in Fanzor ID 36. Applicant also at least envisions insertions at positions analogous to these in other Fanzors and in homologues and orthologs thereof. FIG. 61A-61C shows dentification and modeling of a secondary wREC (wREC2) in Cpf1 (Cas12a) (FIG. 61A), Cas12d (FIG. 61B), and Cas12e (FIG. 61C). The chimeric REC2 domain can be directly fused and/or linked (e.g., via a GS linker or other linker described herein) to the Fanzor polypeptide. The linker can be included at the N- and/or C terminus of the REC2 sequence.

The REC2 sequence from Cpfl (Cas12a) was:
(SEQ ID NO: 649)
NTLSFILEEFKSDEEVIQSFCKYKTLLRNENVLETAEALFNELNS
IDLTHIFISHKKLETISSALCDHWDTLRNALYERRISELTGKITK
SAKEKVQRSLKHEDINLQEIISAAGKELSEAFKQKTSEILSHAHA
ALDQPLPTTLKKQEEKEILKSQLDSLLGLYHLLDWFAVDESNEVD
PEFSARLTGIKLEMEPSLSFYNKARNYATKKPYS.
The REC2 sequence from Cas12d was:
(SEQ ID NO: 650)
NLRNIPRFFGESKKEQFNKFINKSLPTIDVGLKILEDIRNALETV
SVRKPPSITEEYVTKQLEKLSRKYKINAFNSNRFKQITEQVLRKY
NNGELPKISEVFYRYPRESHVAIRILPVKISNPRKDISYLLDKYQ
ISPDWKNSNPGEVVDLIEIYKLTLGWLLSCNKDFSMDFSSYDLKL
FPEAASLIKNFGSCLSGYYLSKMIFNCITSEIKGMITLYTRD.
The REC2 sequence from Cas12e was:
(SEQ ID NO: 651)
PVVERRENEVDWWNTINEVKKLIDAKRDMGRVFWSGVTAEKRNTI
LEGYNYLPNENDHKKREGSLENPKKPAKRQFGDLLLYLEKKYAGD
WGKVFDEAWERIDKKIAGLTSHIEREEARNAEDAQSKAVLTDWLR
AKASFVLERLKEMDEKEFYACEIQLQKWYGDLRGNPFAVEAE

### Example 15

[1417] To assess the diversity of Fz, applicants searched for Fz proteins from TnpB and Fz seeds using structural mining of an Alphafold database and sequence profile mining of the non-redundant NCBI database (see Methods, Example 15) and then built a phylogenetic tree from 3,003 curated representatives (FIG. 62A). The tree contains a large number of branches with prokaryotic TnpB proteins, 80 viral proteins, and 649 proteins from various eukaryotic species (FIG. 68, Tables 15 and 20). Eukaryotic hits are mainly spread within two distinct large branches that reflect the two types of Fz protein, Fanzor1 (Fz1) and Fanzor2 (Fz2), that were previously described⁷. Both branches forming Fz1 and Fz2 emerge from two different branches of TnpBs, suggesting an independent origin whereby two distinct TnpBs were horizontally transferred to eukaryotic hosts. Fz1 is highly spread in fungi, in particular in incertae sedis species, but also found in protists, arthropods, plants, and eukaryotic viruses, in particular in giant viruses. Fz2 is found broadly in fungi, in a few instances in mollusks, choanoflagellates and eukaryotic viruses, the large majority of which are also giant viruses. The presence of TnpB is observed in both Fz branches with a significant presence in branches hosting giant viruses that infect hosts living in symbiosis with bacteria (e.g., Acanthamoeba castellanii mamavirus) and sporadically in branches hosting SAR (Stramenopiles, Alveolates and Rhizaria) or fungi, raising the possibility that TnpBs were horizontally transferred from prokaryotes to eukaryotic hosts (Tables 15 and 20). Although the two Fz systems likely emerged from the transfer of two distinct TnpBs to two eukaryotic hosts, the diversity of eukaryotic hosts for both Fz systems and the presence of Fz in eukaryotic viruses and in numerous fungi, both of which are potential vectors for horizontal gene transfer, suggest Fz was also likely transferred among eukaryotic species. Aside from Fz1 and Fz2 branches, Applicant found additional branches and sometimes single leaves with eukaryotic proteins emerging from other diverse TnpB branches from around the tree. Manual examination of these eukaryotic radiations revealed they were from hosts featuring lifestyles deeply connected to bacterial species (e.g., bacterivores, living with parasitic bacteria, etc. . . . , Tables 15 and 20). These examples further suggest ongoing acquisition of TnpB from bacteria to generate eukaryotic Fanzors.

TABLE 15

| Fanzor | | | protein | | |
|---|---|---|---|---|---|
| Branches | Tree node | NCBI acc | size in aa | domain | contig accesison |
| FZ1 | node302node | AEP15317.1 | 650 | Viruses | JF974310.1 |
| FZ1 | node304node | CAH6420741.1 | 753 | Viruses | CALPDY010000002.1 |
| FZ1 | node307node | CAH6420238.1 | 680 | Viruses | CALPDY010000002.1 |
| FZ1 | node320node | AYV82100.1 | 632 | Viruses | MK072338.1 |
| FZ1 | node329node | AYV77714.1 | 726 | Viruses | MK072066.1 |
| FZ1 | node317node | AYV81939.1 | 419 | Viruses | MK072324.1 |
| FZ1 | node318node | AYV83137.1 | 738 | Viruses | MK072386.1 |
| FZ1 | node322node | AYV77370.1 | 768 | Viruses | MK072042.1 |
| FZ1 | node308node | AYV77114.1 | 445 | Viruses | MK072010.1 |
| FZ1 | node319node | AYV83337.1 | 681 | Viruses | MK072388.1 |
| FZ1 | node301node | ATZ80196.1 | 826 | Viruses | MF782455.1 |
| FZ1 | node327node | QIG60031.1 | 637 | Viruses | MN940580.1 |
| FZ1 | node323node | ATZ80674.1 | 626 | Viruses | MF782455.1 |
| FZ1 | node310node | ARF09744.1 | 814 | Viruses | KY684086.1 |
| FZ1 | node314node | VBB17860.1 | 756 | Viruses | UPSH01000001.1 |
| FZ1 | node325node | AYV78669.1 | 683 | Viruses | MK072088.1 |
| FZ1 | node324node | ATZ80118.1 | 698 | Viruses | MF782455.1 |
| FZ1 | node326node | AYV79948.1 | 876 | Viruses | MK072201.1 |
| FZ1 | node2511node | AJD20157.1 | 642 | Viruses | KM610234.1 |
| FZ1 | node2510node | QNH90560.1 | 553 | Viruses | MN320360.1 |
| FZ1 | node2544node | AYV82494.1 | 906 | Viruses | MK072383.1 |
| FZ1 | node2545node | AYV84552.1 | 777 | Viruses | MK072411.1 |
| FZ1 | node2560node | AYV86408.1 | 670 | Viruses | MK072507.1 |
| FZ1 | node2048node | ATU83390.1 | 782 | Viruses | MF768985.1 |
| FZ1 | node2049node | AUF82705.1 | 587 | Viruses | KY322437.1 |
| FZ1 | node2050node | QIG60107.1 | 575 | Viruses | MN940580.1 |
| FZ1 | node77node | NP_597947.1 | 757 | Viruses | NC_002687.1 |
| FZ1 | node1174node | AUF82525.1 | 693 | Viruses | KY322437.1 |
| FZ2 | node1373node | QYA18551.1 | 316 | Viruses | MZ420154.1 |
| FZ2 | node1218node | BCU03134.1 | 654 | Viruses | LC625835.1 |
| FZ2 | node1216node | QPB44359.1 | 731 | Viruses | MW018138.1 |
| FZ2 | node1217node | AVK76442.1 | 664 | Viruses | MG011690.1 |
| FZ2 | node1748node | ARF10041.1 | 363 | Viruses | KY684094.1 |
| FZ2 | node1747node | YP_009507514.1 | 409 | Viruses | NC_038553.1 |
| FZ2 | node1792node | QOI90150.1 | 576 | Viruses | MT663534.1 |
| FZ2 | node1786node | YP_001497574.1 | 645 | Viruses | NC_009898.1 |
| FZ2 | node1793node | YP_009665491.1 | 439 | Viruses | NC_043235.1 |
| FZ2 | node1739node | YP_009352508.1 | 406 | Viruses | NC_034249.1 |
| FZ2 | node1730node | AYV77780.1 | 514 | Viruses | MK072066.1 |
| FZ2 | node1725node | AYV85267.1 | 644 | Viruses | MK072444.1 |
| FZ2 | node1724node | BCS82632.1 | 501 | Viruses | AP024483.1 |
| FZ2 | node1723node | AKI78974.1 | 529 | Viruses | KM982401.1 |
| FZ2 | node1727node | BCS83717.1 | 489 | Viruses | AP024483.1 |
| FZ2 | node1721node | AEQ60366.1 | 482 | Viruses | JF801956.1 |
| FZ2 | node1719node | AYV77672.1 | 572 | Viruses | MK072066.1 |
| FZ2 | node1720node | YP_003969989.1 | 416 | Viruses | NC_014637.1 |
| FZ2 | node1726node | QKU35668.1 | 420 | Viruses | KY523104.2 |
| FZ2 | node1735node | ARF08566.1 | 458 | Viruses | KY684083.1 |
| FZ2 | node1731node | CAH6419602.1 | 301 | Viruses | CALPDW010000001.1 |
| FZ2 | node1737node | ARF08269.1 | 461 | Viruses | KY684083.1 |
| FZ2 | node1716node | ARF10353.1 | 840 | Viruses | KY684103.1 |
| FZ2 | node1722node | AYV78324.1 | 505 | Viruses | MK072074.1 |
| FZ2 | node1718node | ATZ80679.1 | 657 | Viruses | MF782455.1 |
| FZ2 | node1732node | AYV78371.1 | 573 | Viruses | MK072076.1 |
| FZ2 | node1738node | CAH6421108.1 | 560 | Viruses | CALPDW010000003.1 |
| FZ2 | node1753node | ARF12317.1 | 359 | Viruses | KY684111.1 |
| FZ2 | node1377node | ARF10201.1 | 725 | Viruses | KY684103.1 |
| FZ2 | node1756node | AYV79516.1 | 540 | Viruses | MK072150.1 |
| FZ2 | node1736node | YP_003986594.1 | 545 | Viruses | NC_014649.1 |
| FZ2 | node1784node | QIG60123.1 | 508 | Viruses | MN940580.1 |
| FZ2 | node1791node | AQN68586.1 | 634 | Viruses | KY110734.1 |
| FZ2 | node1744node | QKE50536.1 | 464 | Viruses | MN956669.1 |
| FZ2 | node2357node | QJX72058.1 | 478 | Viruses | MN830295.1 |
| FZ2 | node2374node | QKE50206.1 | 305 | Viruses | MN956669.1 |
| FZ2 | node1815node | UMO78250.1 | 803 | Viruses | MZ420562.1 |
| FZ2 | node1808node | QBZ81754.1 | 627 | Viruses | MK174290.1 |
| FZ2 | node1821node | DAN33190.1 | 447 | Viruses | BK022527.1 |
| FZ2 | node1814node | QZI86954.1 | 493 | Viruses | MW824372.1 |
| FZ2 | node1749node | CAZ69458.1 | 640 | Viruses | FN429076.1 |
| FZ2 | node1757node | ABU43614.1 | 548 | Viruses | DQ491003.2 |
| FZ2 | node1763node | DAT04529.1 | 478 | Viruses | BK042838.1 |
| FZ2 | node520node | YP_006908738.1 | 446 | Viruses | NC_018874.1 |
| FZ2 | node783node | DAR60917.1 | 415 | Viruses | BK057759.1 |

| Fanzor | ncbi | | potential hosts (for |
|---|---|---|---|
| Branches | description | species | viral Fz candidates) |
| FZ1 | hypothetical | Emiliania huxleyi | Eukaryotic algae |
| | protein | virus 88 | |
| FZ1 | Hypothetical | uncultured | N.A. |
| | protein | virus | |
| FZ1 | Hypothetical | uncultured | N.A. |
| | protein | virus | |
| FZ1 | transposase | Homavirus sp. | Unknown |
| FZ1 | hypothetical | Edafosvirus sp. | Unknown |
| | protein | | |
| FZ1 | hypothetical | Harvfovirus sp. | Unknown |
| | protein | | |
| FZ1 | hypothetical | Hyperionvirus sp. | Unknown |
| | protein | | |
| FZ1 | hypothetical | Dasosvirus sp. | Unknown |
| | protein | | |
| FZ1 | hypothetical | Barrevirus sp. | Unknown |
| | protein | | |
| FZ1 | hypothetical | Hyperionvirus sp. | Unknown |
| | protein | | |
| FZ1 | putative | Bodo saltans | Bodo saltans |
| | chaperone | virus | (protozoa) |
| | Hsp70/DnaK | | |
| FZ1 | transposase | Dishui Lake large | Eukaryotic algae |
| | | algae virus 1 | |
| FZ1 | hypothetical | Bodo saltans | Bodo saltans |
| | protein | virus | (protozoa) |
| FZ1 | hypothetical | Indivirus | Unknown |
| | protein | ILV1 | |
| FZ1 | hypothetical | Yasminevirus | Unknown |
| | protein | sp. GU-2018 | |
| FZ1 | hypothetical | Edafosvirus sp. | Unknown |
| | protein | | |
| FZ1 | hypothetical | Bodo saltans | Bodo saltans |
| | protein | virus | (protozoa) |
| FZ1 | hypothetical | Gaeavirus sp. | Unknown |
| | protein | | |
| FZ1 | transposase | Tipula oleracea | Tipula oleracea |
| | | nudivirus | (insecta) |
| FZ1 | maco-A 94/286 | Mamestra | Mamestra |
| | | configurata | configurata |
| | | nucleopolyhedrovirus A | (insecta) |
| FZ1 | hypothetical | Hyperionvirus | Unknown |
| | protein | sp. | |
| FZ1 | hypothetical | Hyperionvirus | Unknown |
| | protein | sp. | |
| FZ1 | hypothetical | Sylvanvirus | Unknown |
| | protein | sp. | |
| FZ1 | ORF62 | White spot | Crustacea |
| | | syndrome virus | |
| FZ1 | hypothetical | Tetraselmis | Eukaryotic algae |
| | protein | virus 1 | |
| FZ1 | putative | Dishui Lake large | Algae |
| | transposase | algae virus 1 | |
| | DNA-binding | | |
| | domain protein | | |
| FZ1 | EsV-1- | Ectocarpus | Eukaryotic algae |
| | 178/222 | siliculosus | |
| | paralog 3 | virus 1 | |
| FZ1 | hypothetical | Tetraselmis | Eukaryotic algae |
| | protein | virus 1 | |
| FZ2 | RuvC-like | Clandestinovirus | Vermamoeba |
| | nuclease | | vermiformis (amoeba) |
| | Rnase H fold | | |
| FZ2 | transposase | Pandoravirus | Amoeba |
| | | japonicus | |
| FZ2 | Transposase | Acanthamoeba | Acanthamoeba |
| | | castellanii | castellanii (amoeba) |
| | | medusavirus | |
| FZ2 | Transposase | Pandoravirus | Acanthamoeba |
| | | neocaledonia | castellanii (amoeba) |
| FZ2 | hypothetical | Indivirus | Unknown |
| | protein | ILV1 | |
| FZ2 | transposase | Heterosigma akashiwo | Eukaryotic algae |
| | | virus 01 | |
| FZ2 | hypothetical | Pyramimonas | Pyramimonas orientalis |
| | protein | orientalis virus | (eukaryotic algae) |
| FZ2 | transposase | Paramecium | Paramecium bursaria |
| | | bursaria | (ciliate, endosymbiotic |
| | | Chlorella virus NY2A | relationship with green algae) |
| FZ2 | transposase | Paramecium | Paramecium bursaria |
| | | bursaria | (ciliate, endosymbiotic |
| | | Chlorella virus NYs1 | relationship with green algae) |
| FZ2 | transposase | Kaumoebavirus | Vermamoeba |
| | | | vermiformis (amoeba) |
| FZ2 | transposase | Edafosvirus sp. | Unknown |
| FZ2 | putative | Satyrvirus sp. | Unknown |
| | transposase | | |
| FZ2 | putative | Cotonvirus | Acanthamoeba |
| | transposase | japonicus | castellanii (amoeba) |
| FZ2 | putative | Acanthamoeba | Acanthamoeba |
| | transposase | polyphaga | (amoeba) |
| | | mimivirus | |
| FZ2 | putative | Cotonvirus | Acanthamoeba |
| | transposase | japonicus | castellanii (amoeba) |
| FZ2 | putative | Acanthamoeba | Acanthamoeba |
| | transposase | castellanii | (amoeba) |
| | | mamavirus | |
| FZ2 | putative | Edafosvirus sp. | Unknown |
| | transposase | | |
| FZ2 | transposase | Cafeteria | Cafeteria |
| | | roenbergensis | roenbergensis |
| | | virus BV-PW1 | (SAR) |
| FZ2 | putative | Tupanvirus | Acanthamoeba |
| | transposase | soda lake | (amoeba) |
| FZ2 | transposase | Catovirus CTV1 | Unknown |
| FZ2 | Transposase | uncultured virus | N.A. |
| FZ2 | transposase | Catovirus CTV1 | Unknown |
| FZ2 | transposase | Hokovirus HKV1 | Cercozoa (SAR) |
| FZ2 | transposase | Edafosvirus sp. | Unknown |
| FZ2 | hypothetical | Bodo saltans virus | Bodo saltans |
| | protein | | (protozoa) |
| FZ2 | transposase | Edafosvirus sp. | Unknown |
| FZ2 | Transposase | uncultured virus | N.A. |
| FZ2 | transposase | Klosneuvirus KNV1 | Cercozoa (SAR) |
| FZ2 | transposase | Hokovirus HKV1 | Cercozoa (SAR) |
| FZ2 | transposase | Faunusvirus sp. | Unknown |
| FZ2 | transposase | Acanthamoeba | Acanthamoeba |
| | | polyphaga | polyphaga (amoeba) |
| | | mimivirus | |
| FZ2 | putative | Dishui Lake large | Eukaryotic algae |
| | transposase | algae virus 1 | |
| FZ2 | putative | Saudi | Acanthamoeba |
| | transposase | moumouvirus | polyphaga (amoeba) |
| FZ2 | putative | Faustovirus | Vermamoeba |
| | transposase | | vermiformis (amoeba) |
| FZ2 | putative | Faustovirus | Vermamoeba |
| | transposase | | vermiformis (amoeba) |
| FZ2 | putative | Faustovirus | Vermamoeba |
| | transposase | | vermiformis (amoeba) |
| FZ2 | HTH OrfB IS605 | Pandoravirus | Amoeba |
| | superfamily | belohorizontensis | |
| | domain containing | | |
| | protein | | |
| FZ2 | Transposase | Pandoravirus | Amoeba |
| | domain containing | celtis | |
| | protein | | |
| FZ2 | endonuclease | Siphoviridae sp. | Bacteria and archaea |
| FZ2 | transposase | Vibrio phage | Vibrionaceae |
| | | 184E37.3a | |
| FZ2 | putative | Emiliania | Eukaryotic algae |
| | transposase | huxleyi virus | |
| | | 99B1 | |
| FZ2 | hypothetical | Paramecium | Paramecium bursaria |
| | protein | bursaria | (ciliate, endosymbiotic |
| | | Chlorella virus AR158 | relationship with green algae) |
| FZ2 | endonuclease | Bacteriophage sp. | N.A. |
| FZ2 | putative | Abalone herpesvirus | Mollusca |
| | methyltransferase | Victoria/AUS/2009 | |
| FZ2 | endonuclease | Myoviridae sp. | Bacteria and archaea |

TABLE 20

| | Fanzor | | | | | | potential hosts (for |
|---|---|---|---|---|---|---|---|
| SEQ ID NO: | Branches | NCBI acc | domain | contig accesison | ncbi description | species | viral Fz candidates) |
| 837 | — | NVM03739.1 | Archaea | JABXJV010000359.1 | IS200/IS605 family element | Candidatus Helarchaeota archaeon | |
| | | | | | transposase accessory protein | | |
| | | | | | TnpB | | |
| 838 | — | NVM04333.1 | Archaea | JABXJV010000431.1 | IS200/IS605 family element | Candidatus Helarchaeota archaeon | |
| | | | | | transposase accessory protein | | |
| | | | | | TnpB | | |
| 839 | — | OKY77440.1 | Archaea | MSDW01000002.1 | IS605 OrfB-like transposable | Candidatus | |
| | | | | | element containing RNAse H- | Methanohalarchaeum | |
| | | | | | like and Zn finger domain | thermophilum | |
| 840 | — | MCD6209451.1 | Archaea | JAGGRR010000020.1 | transposase | Methanophagales archaeon | |
| 841 | — | WP_235847844.1 | Archaea | NZ_FTNR01000016.1 | transposase | Natronorubrum thiooxidans | |
| 842 | — | WP_008309348.1 | Archaea | NZ_AOLW01000015.1 | RNA-guided endonuclease | Haloarcula amylolytica | |
| | | | | | TnpB family protein | | |
| 843 | — | RLG38354.1 | Archaea | QMVQ01000038.1 | transposase | Candidatus Alkanophagales | |
| | | | | | | archaeon | |
| 844 | — | MCD6369834.1 | Archaea | JAGHBO010000127.1 | transposase | Thermoproteales archaeon | |
| 845 | — | RLJ07810.1 | Archaea | QMZY01000033.1 | hypothetical protein | Candidatus | |
| | | | | | | Aenigmarchaeota archaeon | |
| 846 | — | WP_232463155.1 | Archaea | NZ_CP020362.1 | transposase | Sulfolobus acidocaldarius | |
| 847 | — | MCF3653870.1 | Archaea | JAJPCT020000026.1 | transposase | Aigarchaeota archaeon | |
| 848 | — | WP_127015818.1 | Bacteria | NZ_CP016379.1 | RNA-guided endonuclease | Anoxybacter fermentans | |
| | | | | | TnpB family protein | | |
| 849 | — | RLE58830.1 | Archaea | QMRF01000364.1 | hypothetical protein | Thermoprotei archaeon | |
| 850 | — | WP_011763211.1 | Archaea | NC_008701.1 | zinc ribbon domain-containing protein | Pyrobaculum islandicum | |
| 851 | — | MBM3475533.1 | Bacteria | VGFC01000235.1 | IS200/IS605 family element | Armatimonadetes | |
| | | | | | transposase accessory protein | bacterium | |
| | | | | | TnpB | | |
| 852 | — | MCG2782859.1 | Archaea | JAKLPR010000075.1 | transposase | Candidatus Altiarchaeales | |
| | | | | | | archaeon | |
| 853 | — | MCD6500410.1 | Bacteria | JAGGXV010000003.1 | transposase | bacterium | |
| 854 | — | WP_254859909.1 | Archaea | NZ_CP101323.1 | transposase | Natronomonas | |
| | | | | | | gomsonensis | |
| 855 | — | RLI75800.1 | Archaea | QMZA01000029.1 | hypothetical protein | Archaeoglobales archaeon | |
| 856 | — | WP_048201095.1 | Archaea | NZ_CP009149.1 | RNA-guided endonuclease | Methanocaldococcus | |
| | | | | | TnpB family protein | bathoardescens | |
| 857 | — | MCK9370299.1 | Bacteria | JALNYV010000013.1 | transposase | Candidatus Dojkabacteria | |
| | | | | | | bacterium | |
| 858 | — | PKN01052.1 | Bacteria | PHAN01000013.1 | hypothetical protein | Elusimicrobia bacterium | |
| | | | | | | HGW-Elusimicrobia-1 | |
| 859 | — | MCD6311017.1 | Bacteria | JAGHEB010000033.1 | transposase | Elusimicrobia bacterium | |
| 860 | — | WP_166344716.1 | Bacteria | NZ_JAAOEF010000001.1 | RNA-guided endonuclease | Desulfofundulus sp. | |
| | | | | | TnpB family protein | TPOSR | |
| 861 | — | MQY53380.1 | Bacteria | WJPA01000062.1 | IS200/IS605 family element | Firmicutes bacterium | |
| | | | | | transposase accessory protein | | |
| | | | | | TnpB | | |
| 862 | — | MBN1665469.1 | Bacteria | JAFGHT010000007.1 | transposase | Anaerolineales bacterium | |
| 863 | — | MBT9260177.1 | Bacteria | JAHHQG010000042.1 | transposase | Clostridiales bacterium | |
| 864 | — | WP_051655365.1 | Bacteria | NZ_JNIV01000049.1 | RNA-guided endonuclease | Deinococcus marmoris | |
| | | | | | TnpB family protein | | |
| 865 | — | MBV8383070.1 | Bacteria | JAFAKJ010000562.1 | transposase | Planctomycetaceae | |
| | | | | | | bacterium | |
| 866 | — | WP_011877244.1 | Bacteria | NC_009253.1 | RNA-guided endonuclease | Desulforamulus reducens | |
| | | | | | TnpB family protein | | |
| 867 | — | MBU1173536.1 | Bacteria | JAHIRD010000289.1 | transposase | Proteobacteria bacterium | |
| 868 | — | MBS3149914.1 | Archaea | JAGVZF010000030.1 | transposase | Candidatus | |
| | | | | | | Woesearchaeota archaeon | |
| 869 | — | RLI86053.1 | Archaea | QMZG01000080.1 | hypothetical protein | Candidatus Altiarchaeales | |
| | | | | | | archaeon | |
| 870 | — | MBS3063698.1 | Archaea | JAGVWE010000006.1 | transposase | Candidatus Diapherotrites | |
| | | | | | | archaeon | |
| 871 | — | QBM01489.1 | Archaea | MK005744.1 | CRISPR-associated protein | uncultured archaeon | |
| | | | | | Cas14b.11 | | |
| 872 | — | MBI5228463.1 | Archaea | JACRGE010000001.1 | IS200/IS605 family element | Candidatus Micrarchaeota | |
| | | | | | transposase accessory protein | archaeon | |
| | | | | | TnpB | | |
| 873 | — | OIO21000.1 | Archaea | MNVE01000014.1 | hypothetical protein | Candidatus Micrarchaeota | |
| | | | | | | archaeon CG1_02_47_40 | |
| 874 | — | MBI2547365.1 | Archaea | JACPJT010000005.1 | IS200/IS605 family element | Candidatus | |
| | | | | | transposase accessory protein | Aenigmarchaeota archaeon | |
| | | | | | TnpB | | |
| 875 | — | QBM01449.1 | Archaea | MK005741.1 | CRISPR-associated protein | uncultured archaeon | |
| | | | | | Cas14b.5 | | |
| 876 | — | QBM01369.1 | Archaea | MK005738.1 | CRISPR-associated protein | uncultured archaeon | |
| | | | | | Cas14b.2 | | |
| 877 | — | MBI4116245.1 | Archaea | JACQLK010000010.1 | IS200/IS605 family element | Candidatus Pacearchaeota | |
| | | | | | transposase accessory protein | archaeon | |
| | | | | | TnpB | | |
| 878 | — | PIU29902.1 | Archaea | PEXD01000061.1 | hypothetical protein | Candidatus | |
| | | | | | | Woesearchaeota archaeon | |
| | | | | | | CG07 land 8_20_14_0_80_ | |
| | | | | | | 44_23 | |
| 879 | — | RLG18211.1 | Archaea | QMVF01000123.1 | hypothetical protein | Candidatus Micrarchaeota | |
| | | | | | | archaeon | |
| 880 | — | MBC7219345.1 | Archaea | JACIWF010000047.1 | IS200/IS605 family element | Hadesarchaea archaeon | |
| | | | | | transposase accessory protein | | |
| | | | | | TnpB | | |
| 881 | — | RLG21245.1 | Archaea | QMVG01000004.1 | hypothetical protein | Candidatus Micrarchaeota | |
| | | | | | | archaeon | |
| 882 | — | OGY23893.1 | Bacteria | MHCP01000019.1 | hypothetical protein | Candidatus Woykebacteria | |
| | | | | | | bacterium RBG_13_40_15 | |
| 883 | — | MBI5347120.1 | Archaea | JACRMX010000011.1 | IS200/IS605 family element | Candidatus | |
| | | | | | transposase accessory protein | Aenigmarchaeota archaeon | |
| | | | | | TnpB | | |
| 884 | — | MBS3802889.1 | Archaea | JAGXLH010000185.1 | IS200/IS605 family accessory | Candidatus | |
| | | | | | protein TnpB-related protein | Thermoplasmatota | |
| | | | | | | archaeon | |
| 885 | — | MCL5253686.1 | Archaea | JAMCXG010000049.1 | transposase | Candidatus | |
| | | | | | | Thermoplasmatota | |
| | | | | | | archaeon | |
| 886 | — | MBI2938750.1 | Archaea | JACPRH010000061.1 | IS200/IS605 family element | Thaumarchaeota archaeon | |
| | | | | | transposase accessory protein | | |
| | | | | | TnpB | | |
| 887 | — | AFU60114.1 | Archaea | CP002408.1 | putative transposase | Candidatus Nitrososphaera | |
| | | | | | | gargensis Ga9.2 | |
| 888 | — | NHV07420.1 | Archaea | JAAOZO010000232.1 | IS200/IS605 family element | Thaumarchaeota archaeon | |
| | | | | | transposase accessory protein | | |
| | | | | | TnpB | | |
| 889 | — | QLJ53099.1 | Archaea | CP058998.1 | hypothetical protein | Candidatus | |
| | | | | | | Fermentimicrarchaeum | |
| | | | | | | limneticum | |
| 890 | — | MBU3896690.1 | Archaea | JAHIDZ010000006.1 | transposase | Nanoarchaeota archaeon | |
| 891 | — | KXB05775.1 | Archaea | LHYC01000001.1 | hypothetical protein | candidate division MSBL1 | |
| | | | | | | archaeon SCGC- | |
| | | | | | | AAA382A03 | |
| 892 | — | RKX50679.1 | Bacteria | QNAS01000216.1 | hypothetical protein | Thermotoga sp. | |
| 893 | — | KXB00751.1 | Archaea | LHXU01000004.1 | hypothetical protein | candidate division MSBL1 | |
| | | | | | | archaeon SCGC- | |
| | | | | | | AAA259M10 | |
| 894 | — | MRN41458.1 | Archaea | WJXE01000283.1 | IS200/IS605 family element | Nitrosopumilales archaeon | |
| | | | | | transposase accessory protein | | |
| | | | | | TnpB | | |
| 895 | — | MBI1972652.1 | Archaea | JACOVP010000020.1 | IS200/IS605 family element | Candidatus | |
| | | | | | transposase accessory protein | Woesearchaeota archaeon | |
| | | | | | TnpB | | |
| 896 | — | MBU0532321.1 | Archaea | JAHJCT010000017.1 | transposase | Candidatus Micrarchaeota | |
| | | | | | | archaeon | |
| 897 | — | WP_242695659.1 | Archaea | NZ_CP071598.1 | transposase | Halovivax sp. KZCA124 | |
| 898 | — | QCC53334.1 | Archaea | CP031305.1 | transposase | Natronorubrum bangense | |
| 899 | — | TFE75647.1 | Bacteria | LXNK01000005.1 | hypothetical protein | Methylacidiphilum | |
| | | | | | | fumariolicum | |
| 900 | — | MCJ7456112.1 | Archaea | JALHTB010000084.1 | transposase | Candidatus Bathyarchaeota | |
| | | | | | | archaeon | |
| 901 | — | PWU79421.1 | Archaea | QHBN01000216.1 | hypothetical protein | Candidatus Nitrosopolaris | |
| | | | | | | wilkensis | |
| 902 | — | PUA31090.1 | Archaea | NDWU01000027.1 | hypothetical protein | Aigarchaeota archaeon | |
| | | | | | | NZ13 MG1 | |
| 903 | — | MBI2079602.1 | Archaea | JACPAS010000069.1 | IS200/IS605 family element | Candidatus Micrarchaeota | |
| | | | | | transposase accessory protein | archaeon | |
| | | | | | TnpB | | |
| 904 | — | KXB07033.1 | Archaea | LHYF01000013.1 | hypothetical protein | candidate division MSBL1 | |
| | | | | | | archaeon SCGC- | |
| | | | | | | AAA382C18 | |
| 905 | — | MBS3802764.1 | Archaea | JAGXLH010000150.1 | transposase | Candidatus | |
| | | | | | | Thermoplasmatota | |
| | | | | | | archaeon | |
| 906 | — | PTD93862.1 | Archaea | PZKD01000090.1 | hypothetical protein | archaeon SCG- | |
| | | | | | | AAA382B04 | |
| 907 | — | MCK4669846.1 | Archaea | JAGLWF010000002.1 | transposase | Nanoarchaeota archaeon | |
| 908 | — | TKJ25765.1 | Archaea | NJBJ01000011.1 | hypothetical protein | Hadesarchaea archaeon | |
| | | | | | | B3 Hades | |
| 909 | — | TET02769.1 | Archaea | SOKF01000011.1 | transposase | Hadesarchaea archaeon | |
| 910 | — | WP_048093110.1 | Archaea | NZ_JMIY01000007.1 | zinc ribbon domain-containing protein | Candidatus | |
| | | | | | | Methanoperedens | |
| | | | | | | nitroreducens | |
| 911 | — | WP_254591457.1 | Archaea | NZ_CADDYF010000033.1 | transposase | Methanocella conradii | |
| 912 | — | MBS3782178.1 | Archaea | JAGXKR010000055.1 | transposase | Candidatus | |
| | | | | | | Thermoplasmatota | |
| | | | | | | archaeon | |
| 913 | — | RLI44498.1 | Archaea | QMYO01000136.1 | hypothetical protein | Candidatus Bathyarchaeota | |
| | | | | | | archaeon | |
| 914 | — | RLG38755.1 | Archaea | QMVQ01000020.1 | transposase | Candidatus Alkanophagales | |
| | | | | | | archaeon | |
| 915 | — | NHK32623.1 | Archaea | VIKK01000192.1 | transposase | Asgard group archaeon | |
| 916 | — | MCK4770526.1 | Archaea | JAGLTB010000140.1 | transposase | Candidatus | |
| | | | | | | Heimdallarchaeota | |
| | | | | | | archaeon | |
| 917 | — | UJG44126.1 | Archaea | CP084167.1 | transposase | Candidatus | |
| | | | | | | Heimdallarchaeota | |
| | | | | | | archaeon PR6 | |
| 918 | — | MCE7749571.1 | Archaea | JAAFKI010000181.1 | transposase | Candidatus | |
| | | | | | | Heimdallarchaeota | |
| | | | | | | archaeon | |
| 919 | — | TFG97702.1 | Archaea | SPCB01000125.1 | transposase | Candidatus Thorarchaeota | |
| | | | | | | archaeon | |
| 920 | — | RLI59880.1 | Archaea | QMYU01000007.1 | hypothetical protein | Candidatus Thorarchaeota | |
| | | | | | | archaeon | |
| 921 | — | NHJ15178.1 | Archaea | RDOF01000072.1 | hypothetical protein | Candidatus Thorarchaeota | |
| | | | | | | archaeon | |
| 922 | — | MCE7736078.1 | Archaea | JAAFKL010000286.1 | transposase | Candidatus | |
| | | | | | | Heimdallarchaeota | |
| | | | | | | archaeon | |
| 923 | — | OLS24824.1 | Archaea | MDVR01000046.1 | hypothetical protein | Candidatus | |
| | | | | | | Heimdallarchaeota | |
| | | | | | | archaeon LC_2 | |
| 924 | — | OLS21220.1 | Archaea | MDVR01000107.1 | hypothetical protein | Candidatus | |
| | | | | | | Heimdallarchaeota | |
| | | | | | | archaeon LC_2 | |
| 925 | — | MCE7735660.1 | Archaea | JAAFKL010000259.1 | transposase | Candidatus | |
| | | | | | | Heimdallarchaeota | |
| | | | | | | archaeon | |
| 926 | — | OLS26216.1 | Archaea | MDVR01000035.1 | hypothetical protein | Candidatus | |
| | | | | | | Heimdallarchaeota | |
| | | | | | | archaeon LC_2 | |
| 927 | — | MBD3821454.1 | Bacteria | JACXUB010000062.1 | type V CRISPR-associated | Thiotrichales bacterium | |
| | | | | | protein Cas12c | | |
| 928 | — | WP_072724264.1 | Bacteria | NZ_FQXH01000008.1 | zinc ribbon domain-containing | Tepidibacter thalassicus | |
| | | | | | protein | | |
| 929 | — | MCJ7450774.1 | Archaea | JALIDQ010000026.1 | transposase | Candidatus | |
| | | | | | | Nanohaloarchaeota | |
| | | | | | | archaeon QJJ-9 | |
| 930 | — | WP_011571766.1 | Archaea | NC_008212.1 | RNA-guided endonuclease | Haloquadratum walsbyi | |
| | | | | | TnpB family protein | | |
| 931 | — | WP_256400729.1 | Archaea | NZ_JANHJR010000003.1 | transposase | Haloarchaeobius litoreus | |
| 932 | — | ELY63124.1 | Archaea | AOID01000063.1 | IS1341-type transposase | Natrinema versiforme JCM | |
| | | | | | | 10478 | |
| 933 | — | WP_250585822.1 | Archaea | NZ_JAKRVX010000009.1 | transposase | Natronocalculus | |
| | | | | | | amylovorans | |
| 934 | — | WP_181691659.1 | Archaea | NZ_JACDNQ010000004.1 | zinc ribbon domain-containing | Natronomonas sp. LN261 | |
| | | | | | protein | | |
| 935 | — | WP_246279876.1 | Archaea | NZ_CP058335.1 | transposase | Natronomonas salina | |
| 936 | — | WP_256548193.1 | Archaea | NZ_CP100356.1 | transposase | Saliphagus sp. WLHS1 | |
| 937 | — | WP_232687048.1 | Archaea | NZ_CP089593.1 | transposase | Halobacterium sp. | |
| | | | | | | XZYJT26 | |
| 938 | — | WP_121569778.1 | Archaea | NZ_QXIJ01000005.1 | RNA-guided endonuclease | Halobellus sp. Atlit-38R | |
| | | | | | TnpB family protein | | |
| 939 | — | WP_160135356.1 | Archaea | NZ_JAAAJC010000007.1 | RNA-guided endonuclease | Halococcus salsus | |
| | | | | | TnpB family protein | | |
| 940 | — | WP_049937464.1 | Archaea | NZ_KE386573.1 | RNA-guided endonuclease | Haloplanus natans | |
| | | | | | TnpB family protein | | |
| 941 | — | CCQ33387.1 | Archaea | HF571520.1 | transposase | Halorhabdus tiamatea | |
| | | | | | (IS891/IS1136/IS1341/IS605) | SARL4B | |
| 942 | — | ELY57101.1 | Archaea | AOIB01000025.1 | transposase, IS605 OrfB family | Natronococcus | |
| | | | | | protein | amylolyticus DSM 10524 | |
| 943 | — | NLE05668.1 | Archaea | JAAZBF010000792.1 | IS200/IS605 family element | Crenarchaeota archaeon | |
| | | | | | transposase accessory protein | | |
| | | | | | TnpB | | |
| 944 | — | MBD3172730.1 | Archaea | WJJC01000166.1 | transposase | Candidatus Bathyarchaeota | |
| | | | | | | archaeon | |
| 945 | — | CAG8433469.1 | Eukaryota | CAJVPL010000006.1 | 5302 t:CDS: 2 | Ambispora gerdemannii | |
| 946 | — | MBD3191400.1 | Archaea | WJIK01000072.1 | transposase | Candidatus | |
| | | | | | | Heimdallarchaeota | |
| | | | | | | archaeon | |
| 947 | — | MCL5800921.1 | Archaea | JAMDBK010000053.1 | SPFH domain-containing protein | Candidatus | |
| | | | | | | Thermoplasmatota | |
| | | | | | | archaeon | |
| 948 | — | PKL54161.1 | Archaea | PGYG01000016.1 | hypothetical protein | Candidatus | |
| | | | | | | Methanoperedenaceae | |
| | | | | | | archaeon HGW- | |
| | | | | | | Methanoperedenaceae-1 | |
| 949 | — | ACN99819.1 | Bacteria | CP001229.1 | putative transposase DNA- | Sulfurihydrogenibium | |
| | | | | | binding domain family | azorense Az-Ful | |
| 950 | — | WP_008287791.1 | Bacteria | NZ_ABHJ01000011.1 | RNA-guided endonuclease | Hydrogenivirga sp. 128-5- | |
| | | | | | TnpB family protein | R1-1 | |
| 951 | — | MCG3197126.1 | Bacteria | JAJVIK010000007.1 | hypothetical protein | bacterium | |
| 952 | — | MBM4315052.1 | Bacteria | VGSK01000392.1 | transposase | Deltaproteobacteria | |
| | | | | | | bacterium | |
| 953 | — | EFL52992.1 | Bacteria | AECZ01000001.1 | transposase, IS605 OrfB family | Solidesulfovibrio | |
| | | | | | | fructosivorans JJ] | |
| 954 | — | MBP6124802.1 | Bacteria | JAGNYC010000054.1 | transposase | Phycisphaerae bacterium | |
| 955 | — | OQA00496.1 | Bacteria | MWAO01000370.1 | putative transposase DNA- | Planctomycetes bacterium | |
| | | | | | binding domain protein | ADurb.Bin401 | |
| 956 | — | MBW2132002.1 | Bacteria | JAFDGC010000013.1 | transposase | Deltaproteobacteria | |
| | | | | | | bacterium | |
| 957 | — | OGH07209.1 | Bacteria | MFNH01000020.1 | hypothetical protein | Candidatus Levybacteria | |
| | | | | | | bacterium RBG_16_35_11 | |
| 958 | — | MBK7378306.1 | Bacteria | JADJLK010000001.1 | transposase | Ignavibacteriales bacterium | |
| 959 | — | WP_118211009.1 | Bacteria | NZ_JAQDLO010000022.1 | RNA-guided endonuclease TnpB family protein | Phocaeicola plebeius | |
| 960 | — | MBP5514557.1 | Bacteria | JAGCVH010000066.1 | transposase | Bacteroidaceae bacterium | |
| 961 | — | MCI7585022.1 | Bacteria | JALFYN010000038.1 | transposase | Bacteroidales bacterium | |
| 962 | — | MBS6459277.1 | Bacteria | JAHAAQ010000004.1 | transposase | Alistipes sp. | |
| 963 | — | MBR5470443.1 | Bacteria | JAFYQJ010000017.1 | transposase | Paludibacteraceae | |
| | | | | | | bacterium | |
| 964 | — | SFE48229.1 | Bacteria | FONY01000002.1 | transposase, IS605 OrfB family, | Thermoflexibacter ruber | |
| | | | | | central region | | |
| 965 | — | WP_120361969.1 | Bacteria | NZ_CP029458.1 | RNA-guided endonuclease | Clostridium | |
| | | | | | TnpB family protein | | |
| 966 | — | WP_227821924.1 | Bacteria | NZ_JAGWCX010000023.1 | transposase | Clostridioides sp. ZZV14- | |
| | | | | | | 6345 | |
| 967 | — | WP_235070597.1 | Bacteria | NZ_CP069349.1 | RNA-guided endonuclease | Turicibacter sp. TJ11 | |
| | | | | | TnpB family protein | | |
| 968 | — | MBQ1802323.1 | Bacteria | JAFOPD010000053.1 | transposase | Lachnobacterium sp. | |
| 969 | | PGT99436.1 | Bacteria | NUMG01000027.1 | transposase | Bacillus cereus | |
| 970 | — | WP_124562794.1 | Bacteria | NZ_RIAV01000001.1 | RNA-guided endonuclease | Ectobacillus antri | |
| | | | | | TnpB family protein | | |
| 971 | — | WP_174102795.1 | Bacteria | NZ_JABUAE010000030.1 | RNA-guided endonuclease | Bacillus | |
| | | | | | TnpB family protein | | |
| 972 | — | MBE5919695.1 | Bacteria | SVER01000017.1 | transposase | Pseudobutyrivibrio ruminis | |
| 973 | — | MCR5742295.1 | Bacteria | JAILPS010000005.1 | transposase | Lachnospiraceae bacterium | |
| 974 | — | DAI32097.1 | Viruses | BK030489.1 | endonuclease | Siphoviridae sp. | |
| 975 | — | DAH98170.1 | Viruses | BK024556.1 | endonuclease | Siphoviridae sp. | |
| 976 | — | DAU18264.1 | Viruses | BK050672.1 | endonuclease | Bacteriophage sp. | |
| 977 | — | MBR4315275.1 | Bacteria | JAFXWR010000349.1 | transposase | Lachnospiraceae bacterium | |
| 978 | — | OQC44923.1 | Bacteria | MWEU01000077.1 | putative transposase DNA- | Bacteroidetes bacterium | |
| | | | | | binding domain protein | ADurb.Bin028 | |
| 979 | — | MCC6051320.1 | Archaea | JAJHQP010000424.1 | transposase | Thermofilum sp. | |
| 980 | — | MBA2687841.1 | Bacteria | JACCWC010000152.1 | transposase | Gemmatimonadaceae | |
| | | | | | | bacterium | |
| 981 | — | DAG71476.1 | Viruses | BK016329.1 | endonuclease | Siphoviridae sp. | |
| 982 | — | MBQ3269335.1 | Bacteria | JAFRBZ010000046.1 | transposase | Clostridia bacterium | |
| 983 | — | PCF50098.1 | Bacteria | MWUR01000010.1 | hypothetical protein | Staphylococcus delphini | |
| 984 | — | WP_240836674.1 | Bacteria | NZ_JAEPRF010000001.1 | RNA-guided endonuclease | Macrococcus sp. PK | |
| | | | | | TnpB family protein | | |
| 985 | — | YP_009595198.1 | Viruses | NC_041879.1 | transposase | Bacillus phage Mgbhl | |
| 986 | — | WP_025909310.1 | Bacteria | NZ_JANV01000096.1 | RNA-guided endonuclease | Priestia flexa | |
| | | | | | TnpB family protein | | |
| 987 | — | STO12739.1 | Bacteria | UGGS01000001.1 | transposase, IS605 OrfB family | | |
| 988 | — | RJF32058.1 | Bacteria | QYSE01000009.1 | transposase | Pseudoalteromonas | |
| | | | | | | profundi | |
| 989 | — | WP_257216175.1 | Bacteria | NZ_PEKE01000007.1 | RNA-guided endonuclease | Lysinibacillus sphaericus | |
| | | | | | TnpB family protein | | |
| 990 | — | WP_021296160.1 | Bacteria | NZ_AURB01000124.1 | RNA-guided endonuclease | Alicyclobacillus | |
| | | | | | TnpB family protein | acidoterrestris | |
| 991 | — | OTZ67094.1 | Bacteria | NFEH01000124.1 | transposase | Bacillus thuringiensis | |
| | | | | | | serovar kumamtoensis | |
| 992 | — | HHV98174.1 | Bacteria | DUMB01000004.1 | IS200/IS605 family element | Clostridiaceae bacterium | |
| | | | | | transposase accessory protein | | |
| | | | | | TnpB | | |
| 993 | — | SFV03752.1 | Bacteria | FPBV01000023.1 | transposase, IS605 OrfB family, | Alicyclobacillus | |
| | | | | | central region | macrosporangiidus | |
| 994 | — | MBK5262142.1 | Bacteria | JAENWH010000132.1 | transposase | Peptostreptococcaceae | |
| | | | | | | bacterium | |
| 995 | — | DAM40107.1 | Viruses | BK051867.1 | endonuclease | Siphoviridae sp. | |
| 996 | — | MCE5220300.1 | Bacteria | JAJFUC010000022.1 | RNA-guided endonuclease | Clostridium sp. | |
| | | | | | TnpB family protein | | |
| 997 | — | EDS01208.1 | Bacteria | ABCA03000040.1 | transposase, IS605 OrfB family | | |
| 998 | — | MBQ6270638.1 | Bacteria | JAFRQR010000008.1 | transposase | Clostridiales bacterium | |
| 999 | — | MBQ9950927.1 | Bacteria | JAFSHL010000026.1 | transposase | Clostridia bacterium | |
| 1000 | — | MBS5678475.1 | Bacteria | JAGZAS010000004.1 | transposase | Clostridiales bacterium | |
| 1001 | — | MCG4773868.1 | Bacteria | JAKNFU010000022.1 | RNA-guided endonuclease | Lawsonibacter sp. DFI.5.51 | |
| | | | | | TnpB family protein | | |
| 1002 | — | MBQ7139723.1 | Bacteria | JAFSFE010000308.1 | transposase | Clostridia bacterium | |
| 1003 | — | MCL2053139.1 | Bacteria | WRLG01000002.1 | RNA-guided endonuclease | Oscillospiraceae bacterium | |
| | | | | | TnpB family protein | | |
| 1004 | — | WP_220725051.1 | Bacteria | NA | NA | Clostridium estertheticum | |
| 1005 | — | HHU98068.1 | Bacteria | DUNG01000048.1 | IS200/IS605 family element | Petrimonas sp. | |
| | | | | | transposase accessory protein | | |
| | | | | | TnpB | | |
| 1006 | — | DAM23819.1 | Viruses | BK022234.1 | endonuclease | Siphoviridae sp. | |
| 1007 | — | WP_051539934.1 | Bacteria | NZ_CABLCB010000010.1 | RNA-guided endonuclease | Clostridium ihumii | |
| | | | | | TnpB family protein | | |
| 1008 | — | WP_052219544.1 | Bacteria | NZ_JSWD01000079.1 | RNA-guided endonuclease | Clostridium tetani | |
| | | | | | TnpB family protein | | |
| 1009 | — | WP_156936319.1 | Bacteria | NZ_JHVL01000066.1 | RNA-guided endonuclease | Clostridiisalibacter | |
| | | | | | TnpB family protein | paucivorans | |
| 1010 | — | KNZ68681.1 | Bacteria | LGTE01000024.1 | putative transposase DNA- | Thermincola ferriacetica | |
| | | | | | binding domain protein | | |
| 1011 | — | PWM79439.1 | Bacteria | QAMT01000002.1 | hypothetical protein | Phascolarctobacterium sp. | |
| 1012 | — | WP_054696859.1 | Bacteria | NZ_BBCE01000017.1 | RNA-guided endonuclease | Syntrophomonas | |
| | | | | | TnpB family protein | palmitatica | |
| 1013 | — | MBO6292920.1 | Bacteria | JAGBLH010000236.1 | transposase | Selenomonas sp. | |
| 1014 | — | NPV03862.1 | Bacteria | JABLXY010000001.1 | IS200/IS605 family element | Syntrophaceae bacterium | |
| | | | | | transposase accessory protein | | |
| | | | | | TnpB | | |
| 1015 | — | MCG3131796.1 | Bacteria | JAJVHU010000039.1 | hypothetical protein | Phycisphaerae bacterium | |
| 1016 | — | MCF7811397.1 | Bacteria | JAIPJL010000091.1 | transposase | bacterium | |
| 1017 | — | MBD3388172.1 | Archaea | WJMM01000045.1 | transposase | Candidatus Altiarchaeales | |
| | | | | | | archaeon | |
| 1018 | — | MBI4727196.1 | Bacteria | JACQXR010000108.1 | IS200/IS605 family element | candidate division TA06 | |
| | | | | | transposase accessory protein | bacterium | |
| | | | | | TnpB | | |
| 1019 | — | MBI4100166.1 | Bacteria | JACQLA010000003.1 | transposase | Candidatus | |
| | | | | | | Microgenomates bacterium | |
| 1020 | — | HIH05586.1 | Archaea | DUFM01000066.1 | IS200/IS605 family element | Candidatus | |
| | | | | | transposase accessory protein | Woesearchaeota archaeon | |
| | | | | | TnpB | | |
| 1021 | — | QBM01136.1 | Archaea | MK005733.1 | CRISPR-associated protein | uncultured archaeon | |
| | | | | | Cas14a.2 | | |
| 1022 | — | WP_050814137.1 | Bacteria | NC_016791.1 | zinc ribbon domain-containing | Clostridium sp. BNL1100 | |
| | | | | | protein | | |
| 1023 | — | OKY77086.1 | Archaea | MSDW01000004.1 | IS605 OrfB-like transposable | Candidatus | |
| | | | | | element containing RNAse H- | Methanohalarchaeum | |
| | | | | | like and Zn finger domain | thermophilum | |
| 1024 | — | RRJ34090.1 | Archaea | RRCH01000002.1 | transposase | Halomarina oriensis | |
| 1025 | — | WP_122089455.1 | Archaea | NZ_RDQG01000029.1 | RNA-guided endonuclease | Halalkalicoccus | |
| | | | | | TnpB family protein | subterraneus | |
| 1026 | — | WP_066418821.1 | Archaea | NZ_LOAJ01000002.1 | RNA-guided endonuclease | Halorubrum aethiopicum | |
| | | | | | TnpB family protein | | |
| 1027 | — | WP_008312814.1 | Archaea | NZ_AOLW01000047.1 | RNA-guided endonuclease | Haloarcula amylolytica | |
| | | | | | TnpB family protein | | |
| 1028 | — | WP_256416986.1 | Archaea | NZ_JANHDL010000001.1 | transposase | Halorubrum laminariae | |
| 1029 | — | ELY68900.1 | Archaea | AOID01000019.1 | IS1341-type transposase | Natrinema versiforme JCM | |
| | | | | | | 10478 | |
| 1030 | — | RJS69050.1 | Archaea | PIXW01000216.1 | hypothetical protein | ANME-2 cluster archaeon | |
| 1031 | — | PYU19677.1 | Bacteria | QHYS01000233.1 | hypothetical protein | Acidobacteria bacterium | |
| 1032 | — | NBW06417.1 | Bacteria | RFRH01000001.1 | transposase | Caulobacteraceae bacterium | |
| 1033 | — | MCK9576992.1 | Bacteria | JALOBO010000141.1 | transposase | Clostridia bacterium | |
| 1034 | — | WP_011022652.1 | Archaea | NC_003552.1 | zinc ribbon domain-containing | Methanosarcina acetivorans | |
| | | | | | protein | | |
| 1035 | — | HHN81693.1 | Archaea | DSAJ01000122.1 | transposase | Methanomicrobia archaeon | |
| 1036 | — | NVO67918.1 | Archaea | JABXWR010000001.1 | transposase | Methanofollis tationis | |
| 1037 | — | SEO91601.1 | Archaea | FOCX01000023.1 | transposase, IS605 OrfB family, | Halorientalis persicus | |
| | | | | | central region | | |
| 1038 | — | WP_207531221.1 | Bacteria | NZ_CP062975.1 | RNA-guided endonuclease | Pontibacillus sp. ALD_SL1 | |
| | | | | | TnpB family protein | | |
| 1039 | — | QAV25779.1 | Bacteria | CP026365.1 | hypothetical protein | Neobacillus thermocopriae | |
| 1040 | — | MBO9542158.1 | Bacteria | JAGIBK010000006.1 | transposase | bacterium | |
| 1041 | — | MBM3260693.1 | Bacteria | VGJW01000029.1 | transposase | Candidatus | |
| | | | | | | Sericytochromatia | |
| | | | | | | bacterium | |
| 1042 | — | MBM3267984.1 | Bacteria | VGJY01000060.1 | transposase | Candidatus | |
| | | | | | | Sericytochromatia | |
| | | | | | | bacterium | |
| 1043 | — | MQY66365.1 | Bacteria | WJOT01000106.1 | IS200/IS605 family element | Clostridia bacterium | |
| | | | | | transposase accessory protein | | |
| | | | | | TnpB | | |
| 1044 | — | WP_096231453.1 | Bacteria | NZ_LT906662.1 | RNA-guided endonuclease | Thermoanaerobacterium sp. | |
| | | | | | TnpB family protein | RBIITD | |
| 1045 | — | MBP7892034.1 | Bacteria | JAGNGE010000003.1 | transposase | Firmicutes bacterium | |
| 1046 | — | WP_018249057.1 | Bacteria | NZ_KB900620.1 | RNA-guided endonuclease | Orenia marismortui | |
| | | | | | TnpB family protein | | |
| 1047 | — | EEM92921.1 | Bacteria | ACNK01000108.1 | Transposase | Bacillus thuringiensis IBL | |
| | | | | | | 200 | |
| 1048 | — | OON90241.1 | Bacteria | LNZO01000238.1 | hypothetical protein | Epulopiscium sp. Nele67- | |
| | | | | | | Bin001 | |
| 1049 | — | EAY56340.1 | Bacteria | DS180873.1 | transposase | Leptospirillum rubarum | |
| 1050 | — | RUT14466.1 | Bacteria | RSCK01000001.1 | hypothetical protein | Chroococcidiopsis cubana | |
| | | | | | | SAG 39.79 | |
| 1051 | — | WP_202806353.1 | Bacteria | NZ_KE734720.1 | RNA-guided endonuclease | Planktothrix prolifica | |
| | | | | | TnpB family protein | | |
| 1052 | — | HAZ46125.1 | Bacteria | DNGJ01000277.1 | hypothetical protein | Cyanobacteria bacterium | |
| | | | | | | UBA11371 | |
| 1053 | — | MBE9167417.1 | Bacteria | JADEWQ010000020.1 | transposase | Pleurocapsales | |
| | | | | | | cyanobacterium LEGE | |
| | | | | | | 06147 | |
| 1054 | — | MBC7881968.1 | Bacteria | JACMLN010000103.1 | IS200/IS605 family element | Anaerolineae bacterium | |
| | | | | | transposase accessory protein | | |
| | | | | | TnpB | | |
| 1055 | — | HAM56551.1 | Bacteria | DMMU01000410.1 | transposase | Candidatus Rokubacteria | |
| | | | | | | bacterium | |
| 1056 | — | MBV9852379.1 | Bacteria | JAFAZD010000371.1 | transposase | Armatimonadetes | |
| | | | | | | bacterium | |
| 1057 | — | MCC6446579.1 | Bacteria | JADLDR010000218.1 | transposase | Armatimonadetes | |
| | | | | | | bacterium | |
| 1058 | — | GHO67244.1 | Bacteria | BNJH01000003.1 | transposase | Ktedonobacter sp. SOSP1- | |
| | | | | | | 52 | |
| 1059 | — | MBI4145230.1 | Archaea | JACQNC010000010.1 | IS200/IS605 family element | Candidatus | |
| | | | | | transposase accessory protein | Woesearchaeota archaeon | |
| | | | | | TnpB | | |
| 1060 | — | MBD3207812.1 | Archaea | WJIV01000310.1 | IS200/IS605 family element | Candidatus Bathyarchaeota | |
| | | | | | transposase accessory protein | archaeon | |
| | | | | | TnpB | | |
| 1061 | — | OGB96875.1 | Bacteria | METK01000019.1 | hypothetical protein | candidate division TM6 | |
| | | | | | | bacterium | |
| | | | | | | RIFCSPHIGHO2_12_FULL_36_22 | |
| 1062 | — | MBK3332904.1 | Bacteria | JAACYA010000002.1 | IS200/IS605 family element | Persephonella atlantica | |
| | | | | | transposase accessory protein | | |
| | | | | | TnpB | | |
| 1063 | — | GFP32164.1 | Bacteria | BLSA01000039.1 | hypothetical protein | Candidatus Hakubanella | |
| | | | | | | thermoalkaliphilus | |
| 1064 | — | OLS24691.1 | Archaea | MDVR01000047.1 | hypothetical protein | Candidatus | |
| | | | | | | Heimdallarchaeota | |
| | | | | | | archaeon LC_2 | |
| 1065 | — | OLS19337.1 | Archaea | MDVR01000150.1 | hypothetical protein | Candidatus | |
| | | | | | | Heimdallarchaeota | |
| | | | | | | archaeon LC_2 | |
| 1066 | — | MBS3062164.1 | Archaea | JAGVWC010000012.1 | transposase | Candidatus Diapherotrites | |
| | | | | | | archaeon | |
| 1067 | — | HDP97496.1 | Archaea | DSAX01000145.1 | transposase | Euryarchaeota archaeon | |
| 1068 | — | MBU0684853.1 | Archaea | JAHIZT010000047.1 | transposase | Candidatus | |
| | | | | | | Thermoplasmatota | |
| | | | | | | archaeon | |
| 1069 | — | MBI4170985.1 | Archaea | JACQNX010000072.1 | IS200/IS605 family element | Candidatus | |
| | | | | | transposase accessory protein | Aenigmarchaeota archaeon | |
| | | | | | TnpB | | |
| 1070 | — | MBS3153508.1 | Archaea | JAGVZJ010000033.1 | transposase | Candidatus | |
| | | | | | | Woesearchaeota archaeon | |
| 1071 | — | MBI4451053.1 | Archaea | JACQSV010000056.1 | IS200/IS605 family element | Candidatus | |
| | | | | | transposase accessory protein | Woesearchaeota archaeon | |
| | | | | | TnpB | | |
| 1072 | — | MBI0583514.1 | Archaea | JAEILR010000007.1 | transposase | Methanomassiliicoccus sp. | |
| 1073 | — | WP_141398739.1 | Archaea | NZ_NTMG01000006.1 | RNA-guided endonuclease | Candidatus | |
| | | | | | TnpB family protein | Methanoperedens sp. BLZ2 | |
| 1074 | — | MCL2712864.1 | Archaea | WQXR01000113.1 | transposase | Methanomassiliicoccaceae | |
| | | | | | | archaeon | |
| 1075 | — | MBO8468476.1 | Bacteria | JADIMF010000023.1 | transposase | Spirochaetes bacterium | |
| 1076 | — | WP_202571246.1 | Bacteria | NZ_JAERWJ010000011.1 | RNA-guided endonuclease | Bifidobacterium longum | |
| | | | | | TnpB family protein | | |
| 1077 | — | DAF78919.1 | Viruses | BK017243.1 | endonuclease | Myoviridae sp. | |
| 1078 | — | MBU0999531.1 | Bacteria | JAHIVA010000078.1 | transposase | Patescibacteria group | |
| | | | | | | bacterium | |
| 1079 | — | MBW4643077.1 | Bacteria | JAHHHF010000064.1 | transposase | Goleter apudmare HA4340- | |
| | | | | | | LM2 | |
| 1080 | — | HIH30808.1 | Archaea | DUFS01000064.1 | IS200/IS605 family element | Candidatus Micrarchaeota | |
| | | | | | transposase accessory protein | archaeon | |
| | | | | | TnpB | | |
| 1081 | — | PIZ46863.1 | Bacteria | PFNO01000201.1 | transposase | Candidatus Woesebacteria | |
| | | | | | | bacterium | |
| | | | | | | CG_4_10_14_0_2 um_filter_ | |
| | | | | | | 39_14 | |
| 1082 | — | TKJ42706.1 | Bacteria | NJBP01000067.1 | transposase | Candidatus Aerophobetes | |
| | | | | | | bacterium Ae_b3b | |
| 1083 | — | RLC72654.1 | Bacteria | QMNY01000052.1 | transposase | Chloroflexi bacterium | |
| 1084 | — | KXB06296.1 | Archaea | LHYG01000007.1 | hypothetical protein | candidate division MSBL1 | |
| | | | | | | archaeon SCGC- | |
| | | | | | | AAA382F02 | |
| 1085 | — | MAH03159.1 | Archaea | NZDF01000001.1 | hypothetical protein | Candidatus Pacearchaeota | |
| | | | | | | archaeon | |
| 1086 | — | MBI3412784.1 | Archaea | JACPZZ010000010.1 | IS200/IS605 family element | Candidatus | |
| | | | | | transposase accessory protein | Aenigmarchaeota archaeon | |
| | | | | | TnpB | | |
| 1087 | — | MBU4283786.1 | Archaea | JAHILB010000047.1 | transposase | Nanoarchaeota archaeon | |
| 1088 | — | MBS3107864.1 | Archaea | JAGVXY010000017.1 | transposase | Candidatus | |
| | | | | | | Woesearchaeota archaeon | |
| 1089 | — | MBI4158961.1 | Archaea | JACQNJ010000013.1 | IS200/IS605 family element | Candidatus | |
| | | | | | transposase accessory protein | Woesearchaeota archaeon | |
| | | | | | TnpB | | |
| 1090 | — | MBU0532266.1 | Archaea | JAHJCT010000017.1 | transposase | Candidatus Micrarchaeota | |
| | | | | | | archaeon | |
| 1091 | — | MQY66255.1 | Bacteria | WJOT01000099.1 | IS200/IS605 family element | Clostridia bacterium | |
| | | | | | transposase accessory protein | | |
| | | | | | TnpB | | |
| 1092 | — | MBO0725918.1 | Bacteria | JAFMSE010000332.1 | transposase | Blastocatellia bacterium | |
| 1093 | — | BBM69619.1 | Bacteria | AP019796.1 | transposase | Rhodothermus marinus | |
| 1094 | | MBP8660861.1 | Bacteria | JAGPLS010000034.1 | transposase | Mesotoga sp. | |
| 1095 | — | HED03672.1 | Bacteria | DRJF01000070.1 | hypothetical protein | Candidatus Fraserbacteria | |
| | | | | | | bacterium | |
| 1096 | — | RLG23837.1 | Archaea | QMVJ01000168.1 | transposase | Methanosarcinales | |
| | | | | | | archaeon | |
| 1097 | — | OQA82236.1 | Bacteria | MWCD01000150.1 | putative transposase DNA- | bacterium ADurb.Bin236 | |
| | | | | | binding domain protein | | |
| 1098 | — | NCC58022.1 | Bacteria | RZZJ01000396.1 | transposase | Synergistales bacterium | |
| 1099 | — | MCC6446308.1 | Bacteria | JADLDR010000202.1 | transposase | Armatimonadetes | |
| | | | | | | bacterium | |
| 1100 | — | RZL76945.1 | Bacteria | SEEV01000283.1 | transposase | Rhodococcus sp. | |
| 1101 | — | NWN87044.1 | Bacteria | JABXHI010000001.1 | IS200/IS605 family element | Micrococcaceae bacterium | |
| | | | | | transposase accessory protein | | |
| | | | | | TnpB | | |
| 1102 | — | WP_067126210.1 | Bacteria | NZ_BBYJ01000004.1 | zinc ribbon domain-containing | Microtetraspora | |
| | | | | | protein | malaysiensis | |
| 1103 | — | RMD65965.1 | Archaea | RFLC01000213.1 | transposase | Candidatus Pacearchaeota | |
| | | | | | | archaeon | |
| 1104 | — | MBK03546.1 | Bacteria | PBIH01000008.1 | transposase | Deltaproteobacteria | |
| | | | | | | bacterium | |
| 1105 | — | BCM91236.1 | Bacteria | AP024152.1 | hypothetical protein | Abditibacteriota bacterium | |
| 1106 | — | MBK7995179.1 | Bacteria | JADJPF010000016.1 | transposase | Blastocatellia bacterium | |
| 1107 | — | QEC73380.1 | Bacteria | CP042434.1 | IS200/IS605 family element | Arachidicoccus | |
| | | | | | transposase accessory protein | ginsenosidivorans | |
| | | | | | TnpB | | |
| 1108 | — | MBA2493436.1 | Bacteria | JACCYR010000069.1 | IS200/IS605 family element | Acidobacteria bacterium | |
| | | | | | transposase accessory protein | | |
| | | | | | TnpB | | |
| 1109 | — | WP_011330892.1 | Bacteria | NC_007484.1 | RNA-guided endonuclease | Nitrosococcus oceani | |
| | | | | | TnpB family protein | | |
| 1110 | — | MBU2559224.1 | Bacteria | JAHJTC010000026.1 | transposase | Bacteroidetes bacterium | |
| 1111 | — | WP_019541305.1 | Bacteria | NZ_KB905712.1 | RNA-guided endonuclease | Proteiniphilum acetatigenes | |
| | | | | | TnpB family protein | | |
| 1112 | — | DAM17120.1 | Viruses | BK022099.1 | endonuclease | Podoviridae sp. | |
| 1113 | — | NBT57255.1 | Bacteria | RFWL01000005.1 | transposase | bacterium | |
| 1114 | — | PIV00643.1 | Bacteria | PEVC01000047.1 | transposase | Candidatus Shapirobacteria | |
| | | | | | | bacterium | |
| | | | | | | CG03 land 8_20_14_0_80_ | |
| | | | | | | 39_12 | |
| 1115 | — | WP_014448693.1 | Bacteria | NC_017094.1 | RNA-guided endonuclease | Leptospirillum ferrooxidans | |
| | | | | | TnpB family protein | | |
| 1116 | — | OLC31426.1 | Bacteria | MNEU01000027.1 | hypothetical protein | Armatimonadetes | |
| | | | | | | bacterium | |
| | | | | | | 13_1_40CM_64_14 | |
| 1117 | — | WP_176976172.1 | Bacteria | NZ_JABZEO010000005.1 | RNA-guided endonuclease | Allochromatium | |
| | | | | | TnpB family protein | humboldtianum | |
| 1118 | — | WP_246291296.1 | Bacteria | NZ_VSRL01000030.1 | transposase | Lentzea indica | |
| 1119 | — | MBV8076329.1 | Bacteria | JAFAHE010000439.1 | transposase | Planctomycetaceae | |
| | | | | | | bacterium | |
| 1120 | — | MCI0464110.1 | Bacteria | JAKEHG010001587.1 | transposase | Gemmataceae bacterium | |
| 1121 | — | WP_211294284.1 | Bacteria | NZ_MUYM01000127.1 | zinc ribbon domain-containing | Lentzea kentuckyensis | |
| | | | | | protein | | |
| 1122 | — | SDT43654.1 | Bacteria | LT629764.1 | transposase, IS605 OrfB family, | Paenibacillaceae bacterium | |
| | | | | | central region | GAS479 | |
| 1123 | — | SAI88665.1 | Archaea | LT549891.1 | transposase | Methanoculleus bourgensis | |
| 1124 | — | KPV53058.1 | Bacteria | LJCR01000354.1 | hypothetical protein | Kouleothrix aurantiaca | |
| 1125 | — | HAM56576.1 | Bacteria | DMMU01000416.1 | transposase | Candidatus Rokubacteria | |
| | | | | | | bacterium | |
| 1126 | — | MBC6470610.1 | Bacteria | JABVEC010000044.1 | IS200/IS605 family element | Actinomadura alba | |
| | | | | | transposase accessory protein | | |
| | | | | | TnpB | | |
| 1127 | — | MCA2220160.1 | Bacteria | JAIWNB010000001.1 | transposase | Nonomuraea aurantiaca | |
| 1128 | — | RKY59498.1 | Bacteria | QNCX01000196.1 | transposase | Candidatus Latescibacteria | |
| | | | | | | bacterium | |
| 1129 | — | MBX7219994.1 | Bacteria | JAIBAN010000015.1 | transposase | Blastocatellia bacterium | |
| 1130 | — | GJD81763.1 | Bacteria | BPQM01000160.1 | IS200/IS605 family transposase | Methylobacterium gregans | |
| | | | | | ISSoc1 | | |
| 1131 | — | WP_026103187.1 | Bacteria | NZ_KB235914.1 | RNA-guided endonuclease | Pseudanabaena sp. PCC | |
| | | | | | TnpB family protein | 6802 | |
| 1132 | — | MUG96917.1 | Bacteria | WJFC01000089.1 | IS200/IS605 family element | Scytonema sp. UIC 10036 | |
| | | | | | transposase accessory protein | | |
| | | | | | TnpB | | |
| 1133 | — | EAZ89665.1 | Bacteria | AAXW01000039.1 | ISSoc1, transposase | Crocosphaera chwakensis | |
| | | | | | | CCY0110 | |
| 1134 | — | WP_166974177.1 | Bacteria | NZ_CP076718.1 | RNA-guided endonuclease | Rhodocaloribacter litoris | |
| | | | | | TnpB family protein | | |
| 1135 | — | MCI0460841.1 | Bacteria | JAKEHG010000980.1 | transposase | Gemmataceae bacterium | |
| 1136 | — | MCL0091670.1 | Bacteria | JALPYE010000002.1 | RNA-guided endonuclease | Dehalococcoidales | |
| | | | | | TnpB family protein | bacterium | |
| 1137 | — | MCI0489675.1 | Bacteria | JAKEHD010000576.1 | transposase | Blastocatellia bacterium | |
| 1138 | — | MBS0622748.1 | Bacteria | JAFEGQ010000205.1 | transposase | Verrucomicrobia bacterium | |
| 1139 | — | WP_235836723.1 | Bacteria | NA | NA | Duodenibacillus | |
| | | | | | | massiliensis | |
| 1140 | — | MBX7065841.1 | Bacteria | JAIBBX010000001.1 | IS200/IS605 family accessory | Parachlamydiales | |
| | | | | | protein TnpB-related protein | bacterium | |
| 1141 | — | WP_215872828.1 | Bacteria | NZ_JAAXYQ010000135.1 | RNA-guided endonuclease | unclassified | |
| | | | | | TnpB family protein | Acidithiobacillus | |
| 1142 | — | MCB1076120.1 | Bacteria | JAGROM010000257.1 | transposase | Simkania sp. | |
| 1143 | — | MBI4530049.1 | Bacteria | JACQVK010000033.1 | IS200/IS605 family element | Candidatus Latescibacteria | |
| | | | | | transposase accessory protein | bacterium | |
| | | | | | TnpB | | |
| 1144 | — | MBU4240746.1 | Bacteria | JAHIJZ010000165.1 | transposase | Actinomycetia bacterium | |
| 1145 | — | NDD55479.1 | Bacteria | RGUK01000530.1 | transposase | bacterium | |
| 1146 | — | MBD3195332.1 | Archaea | WJIT01000139.1 | IS200/IS605 family element | Candidatus Lokiarchaeota | |
| | | | | | transposase accessory protein | archaeon | |
| | | | | | TnpB | | |
| 1147 | — | MCD6209541.1 | Archaea | JAGGRR010000023.1 | transposase | Methanophagales archaeon | |
| 1148 | — | QID33039.1 | Bacteria | CP048795.1 | IS200/IS605 family element | Hydrogenobacter sp. T-8 | |
| | | | | | transposase accessory protein | | |
| | | | | | TnpB | | |
| 1149 | — | CAA7601342.1 | Bacteria | LR746496.1 | Transposase IS605, OrfB, C- | Acididesulfobacillus | |
| | | | | | terminal | acetoxydans | |
| 1150 | — | WP_189065975.1 | Bacteria | NZ_BMQM01000025.1 | RNA-guided endonuclease | Deinococcus seoulensis | |
| | | | | | TnpB family protein | | |
| 1151 | — | MBK5429675.1 | Bacteria | JAEKEY010000006.1 | transposase | Bacillus sp. TH30 | |
| 1152 | — | MCI1913303.1 | Bacteria | JALCOQ010000035.1 | transposase | Schleiferilactobacillus | |
| | | | | | | harbinensis | |
| 1153 | — | WP_215630817.1 | Bacteria | NZ_WQPU01000142.1 | RNA-guided endonuclease | Eubacteriales | |
| | | | | | TnpB family protein | | |
| 1154 | — | WP_227218946.1 | Bacteria | NZ_JAJCMK010000034.1 | transposase | Blautia wexlerae | |
| 1155 | — | DAV82018.1 | Viruses | BK029126.1 | endonuclease | Siphoviridae sp. | |
| 1156 | — | MBR3376537.1 | Bacteria | JAFWNE010000019.1 | transposase | Mogibacterium sp. | |
| 1157 | — | MBQ0071379.1 | Bacteria | JAGHTT010000399.1 | transposase | Spirochaetales bacterium | |
| 1158 | — | WP_232783071.1 | Bacteria | NZ_CP021558.1 | transposase | Bifidobacterium | |
| 1159 | — | WP_064620912.1 | Bacteria | NZ_LXHE01000026.1 | RNA-guided endonuclease | Moraxella catarrhalis | |
| | | | | | TnpB family protein | | |
| 1160 | — | SCZ81811.1 | Bacteria | FMWL01000024.1 | transposase, IS605 OrfB family, | Acidaminobacter | |
| | | | | | central region | hydrogenoformans DSM | |
| | | | | | | 2784 | |
| 1161 | — | WP_187354083.1 | Bacteria | NZ_RHPL01000085.1 | RNA-guided endonuclease | Brevibacillus laterosporus | |
| | | | | | TnpB family protein | | |
| 1162 | — | KAA8663777.1 | Bacteria | VXJK01000188.1 | IS200/IS605 family element | Clostridium sp. HV4-5- | |
| | | | | | transposase accessory protein | A1G | |
| | | | | | TnpB | | |
| 1163 | — | WP_241715733.1 | Bacteria | NZ_JALBUF010000010.1 | RNA-guided endonuclease | Acidibacillus sp. SOAB | |
| | | | | | TnpB family protein | | |
| 1164 | — | MCD6214170.1 | Bacteria | JAGGRT010000243.1 | transposase | Candidatus Desulfofervidus | |
| | | | | | | sp. | |
| 1165 | — | MBT9148547.1 | Bacteria | QLUG01000557.1 | hypothetical protein | Syntrophomonadaceae | |
| | | | | | | bacterium | |
| 1166 | — | XP_044552369.1 | Eukaryota | NW 025407832.1 | uncharacterized protein | Naegleria lovaniensis | |
| 1167 | — | CAG8578432.1 | Eukaryota | CAJVQB010002533.1 | 23022 t:CDS: 2 | Gigaspora margarita | |
| 1168 | — | HAA33454.1 | Bacteria | DLUV01000824.1 | hypothetical protein | Cyanobacteria bacterium | |
| | | | | | | UBA8553 | |
| 1169 | — | MCQ2299928.1 | Bacteria | JAKSMR010000020.1 | transposase | Bacteroidales bacterium | |
| 1170 | — | MCQ2210122.1 | Bacteria | JAKSLB010000011.1 | transposase | Paludibacteraceae | |
| | | | | | | bacterium | |
| 1171 | — | MBR4792491.1 | Bacteria | JAFZLX010000009.1 | transposase | Bacteroidaceae bacterium | |
| 1172 | — | CCZ13276.1 | Bacteria | CAZL010000441.1 | transposase | Prevotella sp. CAG:1092 | |
| 1173 | — | MBR6076923.1 | Bacteria | JAFXWO010000058.1 | transposase | Paludibacteraceae | |
| | | | | | | bacterium | |
| 1174 | — | MBR2306068.1 | Bacteria | JAFVQG010000002.1 | transposase | Fibrobacter sp. | |
| 1175 | — | MCK9435192.1 | Bacteria | JALNZP010000154.1 | transposase | Candidatus Cloacimonetes | |
| | | | | | | bacterium | |
| 1176 | — | MCK9435423.1 | Bacteria | JALNZP010000200.1 | transposase | Candidatus Cloacimonetes | |
| | | | | | | bacterium | |
| 1177 | — | DAQ55476.1 | Viruses | BK057981.1 | endonuclease | Myoviridae sp. | |
| 1178 | — | RTK99967.1 | Bacteria | RXKA01000120.1 | hypothetical protein | Proteobacteria bacterium | |
| 1179 | — | RLI50518.1 | Archaea | QMYQ01000091.1 | hypothetical protein | Candidatus Bathyarchaeota | |
| | | | | | | archaeon | |
| 1180 | — | HIC76664.1 | Bacteria | DTVY01000165.1 | hypothetical protein | Candidatus Dadabacteria | |
| | | | | | | bacterium | |
| 1181 | — | MAH50968.1 | Archaea | NZER01000449.1 | hypothetical protein | Candidatus Pacearchaeota | |
| | | | | | | archaeon | |
| 1182 | — | MBI1657372.1 | Archaea | JAEFDA010000021.1 | transposase | Thaumarchaeota archaeon | |
| 1183 | — | KAF9348689.1 | Eukaryota | JAAAUZ010000973.1 | glycosyl transferase | Mortierella sp. AD094 | |
| 1184 | — | UJG39608.1 | Archaea | CP084166.1 | transposase | Candidatus | |
| | | | | | | Heimdallarchaeota | |
| | | | | | | archaeon PM71 | |
| 1185 | — | MCJ7662619.1 | Bacteria | JALHVP010000003.1 | transposase | Desulfobacterales | |
| | | | | | | bacterium | |
| 1186 | — | KXB03442.1 | Archaea | LHYA01000025.1 | hypothetical protein | candidate division MSBL1 | |
| | | | | | | archaeon SCGC- | |
| | | | | | | AAA261G05 | |
| 1187 | — | HEB37438.1 | Archaea | DRHM01000090.1 | transposase | Thermoplasmatales | |
| | | | | | | archaeon | |
| 1188 | — | MCK4327746.1 | Archaea | JAGMCR010000011.1 | transposase | Candidatus Diapherotrites | |
| | | | | | | archaeon | |
| 1189 | — | MBM5805117.1 | Archaea | VGLU01000004.1 | IS200/IS605 family element | Candidatus | |
| | | | | | transposase accessory protein | Verstraetearchaeota | |
| | | | | | TnpB | archaeon | |
| 1190 | — | RLJ00637.1 | Archaea | QMZS01000013.1 | hypothetical protein | Candidatus | |
| | | | | | | Aenigmarchaeota archaeon | |
| 1191 | — | MBI2530163.1 | Archaea | JACPJC010000005.1 | IS200/IS605 family element | Candidatus Diapherotrites | |
| | | | | | transposase accessory protein | archaeon | |
| | | | | | TnpB | | |
| 1192 | — | WP_057768897.1 | Bacteria | NZ_JQAT01000002.1 | zinc ribbon domain-containing | Lactobacillus selangorensis | |
| | | | | | protein | | |
| 1193 | — | WP_036202177.1 | Bacteria | NZ_JRPS01000008.1 | zinc ribbon domain-containing | Megasphaera elsdenii | |
| | | | | | protein | | |
| 1194 | — | WP_157949637.1 | Bacteria | NZ_CP029462.1 | zinc ribbon domain-containing | Megasphaera stantonii | |
| | | | | | protein | | |
| 1195 | — | ORE22427.1 | Eukaryota | KV921267.1 | hypothetical protein | Rhizopus microsporus | |
| 1196 | — | WP_103360738.1 | Bacteria | NZ_PPRP01000011.1 | zinc ribbon domain-containing | Mammaliicoccus sciuri | |
| | | | | | protein | | |
| 1197 | — | MCE5132264.1 | Bacteria | JAHCNL010000035.1 | transposase | Staphylococcus | |
| | | | | | | saprophyticus | |
| 1198 | — | UTP75576.1 | Bacteria | CP101317.1 | transposase | Staphylococcus epidermidis | |
| 1199 | — | OEK58820.1 | Bacteria | LNPX01000005.1 | hypothetical protein | Staphylococcus equorum | |
| 1200 | — | WP_168992925.1 | Bacteria | NZ_JABBMI010000055.1 | zinc ribbon domain-containing | Staphylococcus capitis | |
| | | | | | protein | | |
| 1201 | — | WP_158259464.1 | Bacteria | NZ_PZHP01000168.1 | zinc ribbon domain-containing | Staphylococcus | |
| | | | | | protein | saprophyticus | |
| 1202 | — | WP_069827604.1 | Bacteria | NZ_LNMY01000015.1 | zinc ribbon domain-containing | Staphylococcus equorum | |
| | | | | | protein | | |
| 1203 | — | WP_125550900.1 | Bacteria | NZ_RHOE01000091.1 | zinc ribbon domain-containing | Loigolactobacillus | |
| | | | | | protein | zhaoyuanensis | |
| 1204 | — | WP_169336373.1 | Archaea | NC_021169.1 | zinc ribbon domain-containing | Archaeoglobus | |
| | | | | | protein | sulfaticallidus | |
| 1205 | — | PSQ40942.1 | Archaea | PXSE01000106.1 | transposase | Halobacteriales archaeon | |
| | | | | | | QS_9_68_42 | |
| 1206 | — | ERG96307.1 | Archaea | KE356561.1 | transposase, IS605 OrfB family, | Haloquadratum walsbyi | |
| | | | | | central region | J07HQW2 | |
| 1207 | — | WP_230893596.1 | Archaea | NZ_JAJJZH010000013.1 | transposase | Halobacterium sp. KA-6 | |
| 1208 | — | WP_006184739.1 | Archaea | NZ_AOII01000037.1 | zinc ribbon domain-containing | Natrinema pallidum | |
| | | | | | protein | | |
| 1209 | — | OYR58638.1 | Archaea | NHPJ01000027.1 | hypothetical protein | Halorubrum halodurans | |
| 1210 | — | QLG49102.1 | Archaea | CP058601.1 | transposase | Natrinema halophilum | |
| 1211 | — | WP_167551952.1 | Archaea | NZ_LIST01000017.1 | zinc ribbon domain-containing | Halorubrum tropicale | |
| | | | | | protein | | |
| 1212 | — | WP_135823209.1 | Archaea | NZ_SJER01000011.1 | zinc ribbon domain-containing | Halostella litorea | |
| | | | | | protein | | |
| 1213 | — | ELZ06322.1 | Archaea | AOIN01000008.1 | transposase, IS605 OrfB family | Natrialba chahannaoensis | |
| | | | | | protein | JCM 10990 | |
| 1214 | — | WP_177213410.1 | Archaea | NZ_FOOQ01000010.1 | zinc ribbon domain-containing | Halopelagius inordinatus | |
| | | | | | protein | | |
| 1215 | — | TMA56987.1 | Bacteria | VBLE01000311.1 | transposase | Deltaproteobacteria | |
| | | | | | | bacterium | |
| 1216 | — | DAD79971.1 | Viruses | BK014876.1 | endonuclease | Siphoviridae sp. ctHeV6 | |
| 1217 | — | KDD75177.1 | Eukaryota | AYPS01000826.1 | subunit beta of glucosidase II- | Helicosporidium sp. ATCC | |
| | | | | | like protein | 50920 | |
| 1218 | — | MBI1658677.1 | Archaea | JAEFDA010000110.1 | transposase | Thaumarchaeota archaeon | |
| 1219 | — | RMG35907.1 | Archaea | RFHV01000381.1 | hypothetical protein | Euryarchaeota archaeon | |
| 1220 | — | MBI1657893.1 | Archaea | JAEFDA010000061.1 | transposase | Thaumarchaeota archaeon | |
| 1221 | — | MYH03519.1 | Archaea | VYCS01000008.1 | transposase | Cenarchaeum sp. | |
| | | | | | | SB0675_bin_21 | |
| 1222 | — | GBC84750.1 | Bacteria | BEHN01000008.1 | hypothetical protein | bacterium HR11 | |
| 1223 | — | QWK12012.1 | Bacteria | CP076326.1 | transposase | Thermoflexus hugenholtzii | |
| 1224 | — | MCJ7464075.1 | Archaea | JALHSX010000167.1 | RNA-guided endonuclease | Thermoplasmata archaeon | |
| | | | | | TnpB family protein | | |
| 1225 | — | TMA05634.1 | Archaea | VBLR01000088.1 | IS200/IS605 family element | Euryarchaeota archaeon | |
| | | | | | transposase accessory protein | | |
| | | | | | TnpB | | |
| 1226 | — | MCI4349232.1 | Archaea | JAKIWU010000043.1 | transposase | Thermoplasmata archaeon | |
| 1227 | — | RLG14745.1 | Archaea | QMUZ01000076.1 | hypothetical protein | Candidatus Pacearchaeota | |
| | | | | | | archaeon | |
| 1228 | — | TDA33605.1 | Archaea | QNVF01000077.1 | hypothetical protein | Candidatus Nezhaarchaeota | |
| | | | | | | archaeon WYZ-LMO8 | |
| 1229 | — | MCC6055380.1 | Archaea | JAJHRY010000019.1 | IS200/IS605 family accessory | Desulfurococcaceae | |
| | | | | | protein TnpB-related protein | archaeon | |
| 1230 | — | MCD6340888.1 | Archaea | JAGHCX010000115.1 | IS200/IS605 family accessory | Desulfurococcales archaeon | |
| | | | | | protein TnpB-related protein | | |
| 1231 | — | NPA70549.1 | Archaea | JAADDN010000148.1 | IS200/IS605 family element | Crenarchaeota archaeon | |
| | | | | | transposase accessory protein | | |
| | | | | | TnpB | | |
| 1232 | — | PVU72975.1 | Archaea | QEFL01000001.1 | transposase | Vulcanisaeta sp. SCGC | |
| | | | | | | AB-777_J10 | |
| 1233 | — | RLF14381.1 | Archaea | QMSJ01000188.1 | hypothetical protein | Thermoprotei archaeon | |
| 1234 | — | PCN50428.1 | Archaea | NJEN01000031.1 | hypothetical protein | Candidatus | |
| | | | | | | Geothermarchaeota | |
| | | | | | | archaeon ex4572_27 | |
| 1235 | — | ADB57573.1 | Archaea | CP001857.1 | transposase, IS605 OrfB family | Archaeoglobus profundus | |
| | | | | | | DSM_5631 | |
| 1236 | — | MBP1450093.1 | Archaea | JAFKPH010000416.1 | transposase | Thermoproteus sp. | |
| 1237 | — | WP_160164850.1 | Archaea | NZ_JFZT01000014.1 | zinc ribbon domain-containing | Candidatus Acidianus | |
| | | | | | protein | copahuensis | |
| 1238 | — | HID04949.1 | Archaea | DTXD01000283.1 | transposase | Aigarchaeota archaeon | |
| 1239 | — | MCC6027714.1 | Archaea | JAJHQV010000021.1 | RNA-guided endonuclease | Archaeoglobus sp. | |
| | | | | | TnpB family protein | | |
| 1240 | — | ABO07861.1 | Archaea | CP000561.1 | transposase, IS605 OrfB family | Pyrobaculum calidifontis | |
| | | | | | | JCM 11548 | |
| 1241 | — | QOJ78931.1 | Archaea | CP062310.1 | IS200/IS605 family element | Infirmifilum lucidum | |
| | | | | | transposase accessory protein | | |
| | | | | | TnpB | | |
| 1242 | — | WP_054837598.1 | Archaea | NZ_BBBA01000117.1 | RNA-guided endonuclease | Metallosphaera hakonensis | |
| | | | | | TnpB family protein | | |
| 1243 | — | MCD6157631.1 | Archaea | JAGGSP010000106.1 | IS200/IS605 family accessory | Euryarchaeota archaeon | |
| | | | | | protein TnpB-related protein | | |
| 1244 | — | Q58161.1 | Archaea | N/A | TnpB-like protein MJ0751 | Methanocaldococcus | |
| | | | | | | jannaschii DSM 2661 | |
| 1245 | — | WP_013142512.1 | Archaea | NC_014205.1 | RNA-guided endonuclease | Staphylothermus hellenicus | |
| | | | | | TnpB family protein | | |
| 1246 | — | RLF13334.1 | Archaea | QMSJ01000282.1 | transposase | Thermoprotei archaeon | |
| 1247 | — | RLF35353.1 | Archaea | QMSX01000199.1 | hypothetical protein | Thermoplasmata archaeon | |
| 1248 | — | PUA31472.1 | Archaea | NDWU01000017.1 | hypothetical protein | Aigarchaeota archaeon | |
| | | | | | | NZ13_MG1 | |
| 1249 | — | RLE90902.1 | Archaea | QMRV01000146.1 | transposase | Thermoprotei archaeon | |
| 1250 | — | RLG08605.1 | Archaea | QMUX01000188.1 | transposase | Thaumarchaeota archaeon | |
| 1251 | — | PCN51282.1 | Archaea | NJEN01000001.1 | hypothetical protein | Candidatus | |
| | | | | | | Geothermarchaeota | |
| | | | | | | archaeon ex4572_27 | |
| 1252 | — | MCD6513495.1 | Archaea | JAGGXT010000032.1 | transposase | Candidatus Odinarchaeota | |
| | | | | | | archaeon | |
| 1253 | — | RWX74061.1 | Archaea | RXGA01000001.1 | hypothetical protein | Candidatus | |
| | | | | | | Methanosuratincola | |
| | | | | | | subterraneus | |
| 1254 | — | ADI31365.1 | Archaea | CP002051.1 | transposase, IS605 OrfB family | Staphylothermus hellenicus | |
| | | | | | | DSM 12710 | |
| 1255 | — | WP_048098544.1 | Archaea | NZ_JFZT01000014.1 | zinc ribbon domain-containing | Candidatus Acidianus | |
| | | | | | protein | copahuensis | |
| 1256 | — | PVU74827.1 | Archaea | QEFN01000043.1 | transposase | Sulfolobus sp. SCGC AB- | |
| | | | | | | 777_G06 | |
| 1257 | — | WP_012964614.1 | Archaea | NC_013849.1 | zinc ribbon domain-containing | Ferroglobus placidus | |
| | | | | | protein | | |
| 1258 | — | TDA33291.1 | Archaea | QNVD01000031.1 | transposase | Hadesarchaea archaeon | |
| 1259 | — | MBS7612264.1 | Archaea | JAGTQM010000027.1 | transposase | Candidatus Bathyarchaeota | |
| | | | | | | archaeon | |
| 1260 | — | AFK21823.1 | Archaea | CP003534.1 | putative transposase, IS605 OrfB | Pyrococcus sp. ST04 | |
| | | | | | family | | |
| 1261 | — | MCL7393751.1 | Archaea | JAKCEV010000016.1 | transposase | Thaumarchaeota archaeon | |
| 1262 | — | MBC7090384.1 | Archaea | JACIWG010000003.1 | IS200/IS605 family element | Nitrososphaeria archaeon | |
| | | | | | transposase accessory protein | | |
| | | | | | TnpB | | |
| 1263 | — | WP_192818879.1 | Archaea | NZ_CP062310.1 | RNA-guided endonuclease | Infirmifilum lucidum | |
| | | | | | TnpB family protein | | |
| 1264 | — | MBS7617916.1 | Archaea | JAGTQP010000025.1 | transposase | Candidatus Bathyarchaeota | |
| | | | | | | archaeon | |
| 1265 | — | MCD6196284.1 | Archaea | JAGGVR010000104.1 | transposase | Staphylothermus sp. | |
| 1266 | — | MCD6369690.1 | Archaea | JAGHBO010000113.1 | transposase | Thermoproteales archaeon | |
| 1267 | — | MCR6692833.1 | Archaea | JANGFQ010000175.1 | transposase | archaeon YNP-LCB-003- | |
| | | | | | | 016 | |
| 1268 | — | MCD6209485.1 | Archaea | JAGGRR010000020.1 | transposase | Methanophagales archaeon | |
| 1269 | — | NVM30505.1 | Archaea | JABXJT010000057.1 | IS200/IS605 family element | Candidatus Helarchaeota | |
| | | | | | transposase accessory protein | archaeon | |
| | | | | | TnpB | | |
| 1270 | — | TDA30716.1 | Archaea | QNVD01000244.1 | hypothetical protein | Hadesarchaea archaeon | |
| 1271 | — | KCZ71655.1 | Archaea | JMIY01000005.1 | hypothetical protein | Candidatus | |
| | | | | | | Methanoperedens | |
| | | | | | | nitroreducens | |
| 1272 | — | MCI4319108.1 | Archaea | JAKIWE010000001.1 | transposase | Thermoplasmata archaeon | |
| 1273 | — | WP_055041061.1 | Archaea | NZ_LKBH01000241.1 | zinc ribbon domain-containing | Acidiplasma cupricumulans | |
| | | | | | protein | | |
| 1274 | — | MCL4359016.1 | Archaea | JAMCTL010000053.1 | transposase | Candidatus | |
| | | | | | | Thermoplasmatota | |
| | | | | | | archaeon | |
| 1275 | — | EQB68356.1 | Archaea | ATDU01000314.1 | hypothetical protein | Ferroplasma sp. Type II | |
| 1276 | — | TLX98109.1 | Archaea | VBPQ01000013.1 | IS200/IS605 family element | Thaumarchaeota archaeon | |
| | | | | | transposase accessory protein | | |
| | | | | | TnpB | | |
| 1277 | — | MBS7618486.1 | Archaea | JAGTQP010000056.1 | IS200/IS605 family accessory | Candidatus Bathyarchaeota | |
| | | | | | protein TnpB-related protein | archaeon | |
| 1278 | — | TMQ01164.1 | Archaea | VBPT01000012.1 | IS200/IS605 family element | Thaumarchaeota archaeon | |
| | | | | | transposase accessory protein | | |
| | | | | | TnpB | | |
| 1279 | — | MBX8637231.1 | Archaea | JAHEAE010000003.1 | transposase | Thermoplasmata archaeon | |
| 1280 | — | MBM2851593.1 | Archaea | JAENJF010000002.1 | family element transposase | Candidatus Nitrosotenuis | |
| | | | | | accessory protein TnpB | sp. | |
| 1281 | — | MCH7967058.1 | Archaea | JADFLN010000062.1 | IS200/IS605 family accessory | Thaumarchaeota archaeon | |
| | | | | | protein TnpB-related protein | | |
| 1282 | — | TBR12386.1 | Archaea | SCVO01000001.1 | transposase | Candidatus Nitrosotenuis | |
| | | | | | | sp. | |
| 1283 | — | MCL5874827.1 | Archaea | JAMDCO010000070.1 | transposase | Candidatus | |
| | | | | | | Thermoplasmatota | |
| | | | | | | archaeon | |
| 1284 | — | BAB60355.1 | Archaea | BA000011.4 | hypothetical protein | Thermoplasma volcanium | |
| | | | | | | GSS1 | |
| 1285 | — | OHE55121.1 | Archaea | MIDG01000053.1 | hypothetical protein | Thaumarchaeota archaeon | |
| | | | | | | RBG_16_49_8 | |
| 1286 | — | TLY14720.1 | Archaea | VBPE01000033.1 | IS200/IS605 family element | Thaumarchaeota archaeon | |
| | | | | | transposase accessory protein | | |
| | | | | | TnpB | | |
| 1287 | — | MCE2614831.1 | Archaea | JAJTIH010000106.1 | RNA-guided endonuclease | Nitrosopumilus sp. (ex | |
| | | | | | TnpB family protein | Thoosa mismalolli) | |
| 1288 | — | MBM2853059.1 | Archaea | JAENJF010000150.1 | putative transposase, OrfB | Candidatus Nitrosotenuis | |
| | | | | | family | sp. | |
| 1289 | — | TLX95606.1 | Archaea | VBPQ01000093.1 | IS200/IS605 family element | Thaumarchaeota archaeon | |
| | | | | | transposase accessory protein | | |
| | | | | | TnpB | | |
| 1290 | — | MCL4436356.1 | Archaea | JAMCPI010000012.1 | transposase | Thaumarchaeota archaeon | |
| 1291 | — | MCL7394308.1 | Archaea | JAKCEV010000047.1 | RNA-guided endonuclease | Thaumarchaeota archaeon | |
| | | | | | TnpB family protein | | |
| 1292 | — | WP_245610476.1 | Archaea | NZ_LLYW01000051.1 | transposase | Thermococcus | |
| | | | | | | celericrescens | |
| 1293 | — | HDO63898.1 | Archaea | DQWM01000230.1 | radical SAM protein | Methanomicrobia archaeon | |
| 1294 | — | YP_007348294.1 | Viruses | NC_020077.1 | transposase | Sulfolobus virus STSV2 | |
| 1295 | — | RLF24328.1 | Archaea | QMSO01000049.1 | transposase | Thermoprotei archaeon | |
| 1296 | — | WP_013129639.1 | Archaea | NC_014160.1 | RNA-guided endonuclease | Thermosphaera aggregans | |
| | | | | | TnpB family protein | | |
| 1297 | — | MCE4623279.1 | Archaea | WAJZ01000023.1 | transposase | Caldisphaeraceae archaeon | |
| 1298 | — | EHP69270.1 | Archaea | JH597768.1 | transposase, IS605 OrfB family, | Metallosphaera | |
| | | | | | central region | yellowstonensis MK1 | |
| 1299 | — | WP_062423178.1 | Archaea | NZ_LPSM01000002.1 | IS200/IS605 family accessory | Sulfolobus acidocaldarius | |
| | | | | | protein TnpB-related protein | | |
| 1300 | — | MCD6158225.1 | Archaea | JAGGSS010000019.1 | transposase | Euryarchaeota archaeon | |
| 1301 | — | WP_007044119.1 | Archaea | NZ_AGJL01000013.1 | zinc ribbon domain-containing | Methanotorris formicicus | |
| | | | | | protein | | |
| 1302 | — | WP_014287538.1 | Archaea | NC_016645.1 | zinc ribbon domain-containing | Pyrobaculum ferrireducens | |
| | | | | | protein | | |
| 1303 | — | KUO83156.1 | Archaea | LOCF01000005.1 | hypothetical protein | Vulcanisaeta sp. OSP_8 | |
| 1304 | — | WP_088250512.1 | Bacteria | NZ_NHMK01000039.1 | zinc ribbon domain-containing | Deinococcus indicus | |
| | | | | | protein | | |
| 1305 | — | WP_217611158.1 | Bacteria | NZ_JAGXJO010000011.1 | zinc ribbon domain-containing | Deinococcus sp. GbtcB9 | |
| | | | | | protein | | |
| 1306 | — | MCD0155814.1 | Bacteria | JACYYG010000003.1 | transposase | Deinococcus sp. 6GRE01 | |
| 1307 | — | WP_135230833.1 | Bacteria | NZ_SMMH01000090.1 | zinc ribbon domain-containing | Deinococcus fonticola | |
| | | | | | protein | | |
| 1308 | — | WP_022803286.1 | Bacteria | NZ_ATTJ01000005.1 | zinc ribbon domain-containing | Deinococcus ficus | |
| | | | | | protein | | |
| 1309 | — | MBB5235534.1 | Bacteria | JACHFN010000013.1 | hypothetical protein | Deinococcus budaensis | |
| 1310 | — | WP_239052060.1 | Bacteria | NZ_CP092195.1 | transposase | Deinococcus sp. | |
| | | | | | | KNUC1210 | |
| 1311 | — | RJF75664.1 | Bacteria | QYUJ01000004.1 | transposase | Deinococcus cavernae | |
| 1312 | — | AZI45233.1 | Bacteria | CP034187.1 | hypothetical protein | Deinococcus | |
| | | | | | | psychrotolerans | |
| 1313 | — | WP_119765171.1 | Bacteria | NZ_QYUJ01000014.1 | transposase | Deinococcus cavernae | |
| 1314 | — | MCP2015930.1 | Bacteria | JALJZW010000011.1 | hypothetical protein | Deinococcus sp. HSC- | |
| | | | | | | 46F16 | |
| 1315 | — | TSA79973.1 | Bacteria | VKDB01000034.1 | transposase | Deinococcus detaillensis | |
| 1316 | — | WP_104989985.1 | Bacteria | NZ_CP026516.1 | zinc ribbon domain-containing | Deinococcus sp. NW-56 | |
| | | | | | protein | | |
| 1317 | — | GGL93131.1 | Bacteria | BMOL01000025.1 | hypothetical protein | Deinococcus aerolatus | |
| 1318 | — | RXJ11164.1 | Bacteria | SDEC01000035.1 | transposase | Deinococcus metallilatus | |
| 1319 | — | WP_139401725.1 | Bacteria | NZ_JACHEW010000014.1 | zinc ribbon domain-containing | Deinococcus radiopugnans | |
| | | | | | protein | | |
| 1320 | — | WP_188969375.1 | Bacteria | NZ_BMOL01000002.1 | zinc ribbon domain-containing | Deinococcus aerolatus | |
| | | | | | protein | | |
| 1321 | — | MBB6017439.1 | Bacteria | JACHEW010000014.1 | hypothetical protein | Deinococcus radiopugnans | |
| | | | | | | ATCC 19172 | |
| 1322 | — | MCD0176999.1 | Bacteria | JACYYH010000325.1 | transposase | Deinococcus sp. 14RED07 | |
| 1323 | — | WP_189062758.1 | Bacteria | NZ_BMQG01000015.1 | zinc ribbon domain-containing | Deinococcus arenae | |
| | | | | | protein | | |
| 1324 | — | WP_025566590.1 | Bacteria | NZ_APCS01000009.1 | zinc ribbon domain-containing | Deinococcus | |
| | | | | | protein | wulumuqiensis | |
| 1325 | — | PTA66321.1 | Bacteria | PYSV01000043.1 | hypothetical protein | Deinococcus arcticus | |
| 1326 | — | WP_104992421.1 | Bacteria | NZ_CP026518.1 | zinc ribbon domain-containing | Deinococcus sp. NW-56 | |
| | | | | | protein | | |
| 1327 | — | RJF75603.1 | Bacteria | QYUJ01000004.1 | hypothetical protein | Deinococcus cavernae | |
| 1328 | — | WP_135230379.1 | Bacteria | NZ_SMMH01000038.1 | zinc ribbon domain-containing | Deinococcus fonticola | |
| | | | | | protein | | |
| 1329 | — | UFA51996.1 | Bacteria | CP086384.1 | zinc ribbon domain-containing | Deinococcus radiophilus | |
| | | | | | protein | | |
| 1330 | — | WP_156825140.1 | Bacteria | NZ_KB899920.1 | zinc ribbon domain-containing | Elioraea tepidiphila | |
| | | | | | protein | | |
| 1331 | — | MCE2499205.1 | Archaea | JAGWAX010000159.1 | transposase | Nitrosopumilaceae | |
| | | | | | | archaeon | |
| 1332 | — | KAG5181601.1 | Eukaryota | JAFCMP010000312.1 | hypothetical protein | Tribonema minus | |
| 1333 | — | MBI2519939.1 | Bacteria | JACPIU010000011.1 | transposase | Bdellovibrio sp. | |
| 1334 | — | MBT3637382.1 | Bacteria | JABGWD010000288.1 | hypothetical protein | Opitutae bacterium | |
| 1335 | — | MBI4568069.1 | Bacteria | JACQVU010000211.1 | hypothetical protein | Planctomycetes bacterium | |
| 1336 | — | OGP07438.1 | Bacteria | MGPG01000094.1 | hypothetical protein | Deltaproteobacteria | |
| | | | | | | bacterium GWA2_43_19 | |
| 1337 | — | MBI2841910.1 | Bacteria | JACPPP010000021.1 | IS200/IS605 family element | Armatimonadetes | |
| | | | | | transposase accessory protein | bacterium | |
| | | | | | TnpB | | |
| 1338 | — | MBD3408395.1 | Archaea | WJMJ01000152.1 | transposase | Candidatus Lokiarchaeota | |
| | | | | | | archaeon | |
| 1339 | — | MBD3260917.1 | Archaea | WJJK01000131.1 | transposase | Candidatus Altiarchaeales | |
| | | | | | | archaeon | |
| 1340 | — | MBA3530508.1 | Bacteria | JACCSL010000047.1 | IS200/IS605 family element | Ardenticatenales bacterium | |
| | | | | | transposase accessory protein | | |
| | | | | | TnpB | | |
| 1341 | — | MBM3741031.1 | Bacteria | VFZX01000685.1 | transposase | Acidobacteria bacterium | |
| 1342 | — | WP_167620232.1 | Bacteria | NZ_SDEB01000039.1 | zinc ribbon domain-containing | Paracoccus ravus | |
| | | | | | protein | | |
| 1343 | — | MCA3289121.1 | Bacteria | JADCGB010000002.1 | transposase | Roseomonas sp. | |
| 1344 | — | MBW7836120.1 | Bacteria | JACFMS010000007.1 | IS200/IS605 family element | Sphingomonadales | |
| | | | | | transposase accessory protein | bacterium | |
| | | | | | TnpB | | |
| 1345 | — | MBI3933767.1 | Bacteria | JACQGH010000100.1 | transposase | Acidobacteria bacterium | |
| 1346 | — | MBE7157077.1 | Bacteria | JADCRW010000017.1 | transposase | Rhodospirillales bacterium | |
| 1347 | — | MBI07726.1 | Bacteria | PBDG01000069.1 | hypothetical protein | Rhodospirillaceae | |
| | | | | | | bacterium | |
| 1348 | — | MBM4073888.1 | Bacteria | VGYC01000456.1 | IS200/IS605 family element | Planctomycetes bacterium | |
| | | | | | transposase accessory protein | | |
| | | | | | TnpB | | |
| 1349 | — | OUU45538.1 | Bacteria | NHDF01000145.1 | hypothetical protein | Candidatus | |
| | | | | | | Puniceispirillum sp. | |
| | | | | | | TMED52 | |
| 1350 | — | OBU16193.1 | Bacteria | LZFA01000048.1 | hypothetical protein | Photobacterium aquimaris | |
| 1351 | — | ODA28195.1 | Bacteria | LYBM01000097.1 | hypothetical protein | Enterovibrio pacificus | |
| 1352 | — | WP_159084245.1 | Bacteria | NZ_CP026604.1 | zinc ribbon domain-containing | Saccharobesus litoralis | |
| | | | | | protein | | |
| 1353 | — | RPG45653.1 | Bacteria | NHGJ02000028.1 | hypothetical protein | Gammaproteobacteria | |
| | | | | | | bacterium TMED134 | |
| 1354 | — | WP_118829552.1 | Bacteria | NZ_CP030362.1 | zinc ribbon domain-containing | Salinibacter ruber | |
| | | | | | protein | | |
| 1355 | — | KAF9187662.1 | Eukaryota | JAAAUJ010000132.1 | hypothetical protein | Haplosporangium sp. Z 767 | |
| 1356 | — | WP_090332712.1 | Bacteria | NZ_FOGH01000018.1 | Holliday junction resolvase | Nitrosomonas sp. Nm51 | |
| | | | | | RuvX | | |
| 1357 | — | MBL4773140.1 | Bacteria | JAESRN010000138.1 | Holliday junction resolvase | Alcanivoracaceae | |
| | | | | | RuvX | bacterium | |
| 1358 | — | PXX52290.1 | Bacteria | QJKF01000033.1 | putative transposase-like DNA- | Nocardia tenerifensis | |
| | | | | | binding protein | | |
| 1359 | — | WP_115325777.1 | Bacteria | NZ_JACHMA010000001.1 | zinc ribbon domain-containing | Mobiluncus mulieris | |
| | | | | | protein | | |
| 1360 | — | MCG5105700.1 | Bacteria | JAKNRZ010000002.1 | zinc ribbon domain-containing | Candidatus | |
| | | | | | protein | Saccharibacteria bacterium | |
| 1361 | — | RAP51160.1 | Archaea | MUZX01000155.1 | hypothetical protein | Methanosphaera sp. | |
| | | | | | | rholeuAM270 | |
| 1362 | — | RLG00188.1 | Archaea | QMUQ01000087.1 | hypothetical protein | Thaumarchaeota archaeon | |
| 1363 | | WP_033518243.1 | Bacteria | NZ_JDUL01000141.1 | zinc ribbon domain-containing | Bifidobacterium cuniculi | |
| | | | | | protein | | |
| 1364 | — | WP_140587636.1 | Bacteria | NZ_VFRR01000006.1 | IS200/IS605 family accessory | Maribrevibacterium | |
| | | | | | protein TnpB-related protein | harenarium | |
| 1365 | — | NJL70927.1 | Bacteria | JAAUTC010000047.1 | hypothetical protein | Candidatus | |
| | | | | | | Competibacteraceae | |
| | | | | | | bacterium | |
| 1366 | — | MBU6196850.1 | Bacteria | JAGWWP010000015.1 | transposase | Cyanobacteria bacterium | |
| | | | | | | REEB446 | |
| 1367 | — | TFF91623.1 | Archaea | SDNG01000341.1 | hypothetical protein | Candidatus Thorarchaeota | |
| | | | | | | archaeon | |
| 1368 | — | OLS20516.1 | Archaea | MEHG01000227.1 | hypothetical protein | Candidatus Thorarchaeota | |
| | | | | | | archaeon AB_25 | |
| 1369 | — | TET08205.1 | Archaea | SOKL01000278.1 | hypothetical protein | Candidatus Thorarchaeota | |
| | | | | | | archaeon | |
| 1370 | — | DAV82003.1 | Viruses | BK029126.1 | transposase | Siphoviridae sp. | |
| 1371 | — | OOR82327.1 | Bacteria | MUXT01000012.1 | hypothetical protein | Moraxella canis | |
| 1372 | — | DAF42598.1 | Viruses | BK032497.1 | transposase | Siphoviridae sp. ctHip2 | |
| 1373 | — | RKV87147.1 | Bacteria | RBKM01002017.1 | transposase | Streptococcus sp. | |
| 1374 | — | NVL93493.1 | Bacteria | JABXJZ010000430.1 | IS200/IS605 family element | Desulfobacterales | |
| | | | | | transposase accessory protein | bacterium | |
| | | | | | TnpB | | |
| 1375 | — | NVL93625.1 | Bacteria | JABXJZ010000504.1 | IS200/IS605 family element | Desulfobacterales | |
| | | | | | transposase accessory protein | bacterium | |
| | | | | | TnpB | | |
| 1376 | — | NVL92119.1 | Bacteria | JABXJZ010000064.1 | IS200/IS605 family element | Desulfobacterales | |
| | | | | | transposase accessory protein | bacterium | |
| | | | | | TnpB | | |
| 1377 | — | MBN1329170.1 | Archaea | JAFGMH010000039.1 | transposase | Candidatus | |
| | | | | | | Heimdallarchaeota | |
| | | | | | | archaeon | |
| 1378 | — | MCE7744092.1 | Archaea | JAAFKK010000025.1 | transposase | Candidatus | |
| | | | | | | Heimdallarchaeota | |
| | | | | | | archaeon | |
| 1379 | — | TET27315.1 | Archaea | SOJV01000240.1 | hypothetical protein | Candidatus | |
| | | | | | | Heimdallarchaeota | |
| | | | | | | archaeon | |
| 1380 | — | NPA69700.1 | Archaea | JAADDN010000066.1 | transposase | Crenarchaeota archaeon | |
| 1381 | — | MCL6449428.1 | Bacteria | JAIMBK010000095.1 | transposase | Armatimonadetes | |
| | | | | | | bacterium | |
| 1382 | — | EIM64872.1 | Bacteria | CM001488.1 | transposase, IS605 OrfB family, | Desulfobacter postgatei | |
| | | | | | central region | 2ac9 | |
| 1383 | — | MBM3237879.1 | Bacteria | VGLC01000052.1 | transposase | Candidatus Poribacteria | |
| | | | | | | bacterium | |
| 1384 | — | BBM86978.1 | Bacteria | AP019860.1 | transposase | Candidatus Uabimicrobium | |
| | | | | | | amorphum | |
| 1385 | — | WP_242527374.1 | Bacteria | NZ_CP035758.1 | zinc ribbon domain-containing | Ktedonosporobacter | |
| | | | | | protein | rubrisoli | |
| 1386 | — | QBD82533.1 | Bacteria | CP035758.1 | transposase | Ktedonosporobacter | |
| | | | | | | rubrisoli | |
| 1387 | — | WP_207712645.1 | Bacteria | NZ_JAAOEF010000001.1 | zinc ribbon domain-containing | Desulfofundulus sp. | |
| | | | | | protein | TPOSR | |
| 1388 | — | HID27021.1 | Archaea | DTXF01000237.1 | hypothetical protein | Methanosarcinales | |
| | | | | | | archaeon | |
| 1389 | — | ESS10917.1 | Archaea | KI543233.1 | transposase, IS605 OrfB family, | uncultured archaeon | |
| | | | | | central region | A07HR60 | |
| 1390 | — | PSQ40948.1 | Archaea | PXSE01000106.1 | transposase | Halobacteriales archaeon | |
| | | | | | | QS_9_68_42 | |
| 1391 | — | PTD93340.1 | Archaea | PZKD01000126.1 | transposase | archaeon SCG- | |
| | | | | | | AAA382B04 | |
| 1392 | — | MBI4228180.1 | Bacteria | JACQUU010000030.1 | transposase | Deltaproteobacteria | |
| | | | | | | bacterium | |
| 1393 | — | MCD6439449.1 | Bacteria | JAGHAV010000182.1 | transposase | Halomonas sp. | |
| 1394 | — | WP_028950928.1 | Bacteria | NZ_JHUV01000011.1 | zinc ribbon domain-containing | Sulfurihydrogenibium | |
| | | | | | protein | subterraneum | |
| 1395 | — | ACN99711.1 | Bacteria | CP001229.1 | putative transposase DNA- | Sulfurihydrogenibium | |
| | | | | | binding domain family | azorense Az-Ful | |
| 1396 | — | PSO04765.1 | Archaea | NEXO01000050.1 | hypothetical protein | Candidatus Marsarchaeota | |
| | | | | | | G2 archaeon | |
| | | | | | | ECH_B_SAG-G16 | |
| 1397 | — | WP_126451101.1 | Archaea | NZ_AP018553.1 | zinc ribbon domain-containing | Sulfodiicoccus acidiphilus | |
| | | | | | protein | | |
| 1398 | — | BCU67531.1 | Archaea | AP024596.1 | transposase | Sulfolobales archaeon HS-7 | |
| 1399 | — | EWG07437.1 | Archaea | ASRH01000004.1 | IS200/IS605 family OrfB-like | Candidatus Aramenus | |
| | | | | | protein | sulfurataquae | |
| 1400 | — | MCQ4335933.1 | Archaea | JANGSJ010000046.1 | zinc ribbon domain-containing | Sulfolobales archaeon | |
| | | | | | protein | | |
| 1401 | — | ADG06072.1 | Bacteria | CP002017.1 | transposase, IS605 OrfB family | Kyrpidia tusciae DSM 2912 | |
| 1402 | — | MBE3593479.1 | Bacteria | JADBKS010000003.1 | IS200/IS605 family element | Candidatus Carbobacillus | |
| | | | | | transposase accessory protein | altaicus | |
| | | | | | TnpB | | |
| 1403 | — | MBO5353635.1 | Bacteria | JAGALT010000111.1 | transposase | Lachnospiraceae bacterium | |
| 1404 | — | MCI9051305.1 | Bacteria | JAAWKG010000027.1 | transposase | Lachnospiraceae bacterium | |
| 1405 | — | PWY60115.1 | Bacteria | QJHD01000008.1 | transposase | Blautia sp. BCRC 81119 | |
| 1406 | — | WP_065543478.1 | Bacteria | NZ_CP015405.2 | zinc ribbon domain-containing | Blautia pseudococcoides | |
| | | | | | protein | | |
| 1407 | — | MBD8968113.1 | Bacteria | RKGJ01000105.1 | transposase | Ruminococcus sp. SR1/5 | |
| 1408 | — | HIS26336.1 | Bacteria | DVIN01000032.1 | transposase | Candidatus Pullilachnospira | |
| | | | | | | intestinigallinarum | |
| 1409 | — | HIY03118.1 | Bacteria | DXEG01000061.1 | transposase | Candidatus Blautia | |
| | | | | | | faecipullorum | |
| 1410 | — | HAP20962.1 | Bacteria | DMSW01000112.1 | transposase | Lachnospiraceae bacterium | |
| 1411 | — | WP_006873895.1 | Bacteria | NZ_CP094682.1 | RNA-guided endonuclease | Anaerotruncus colihominis | |
| | | | | | TnpB family protein | | |
| 1412 | — | MCL6559284.1 | Bacteria | JAIMAJ010000368.1 | IS200/IS605 family accessory | Firmicutes bacterium | |
| | | | | | protein TnpB-related protein | | |
| 1413 | — | WP_084661796.1 | Bacteria | NZ_FWWY01000001.1 | zinc ribbon domain-containing | Sulfobacillus | |
| | | | | | protein | thermosulfidooxidans | |
| 1414 | — | MCL6594878.1 | Bacteria | JAILZS010000003.1 | transposase | Firmicutes bacterium | |
| 1415 | — | CAB1129480.1 | Bacteria | LR778114.1 | protein of unknown function | Firmicutes bacterium R50 | |
| 1416 | — | MCL8207485.1 | Bacteria | JAIMBI010000006.1 | transposase | Actinomycetia bacterium | |
| 1417 | — | PSR33104.1 | Bacteria | PXYW01000027.1 | hypothetical protein | Sulfobacillus benefaciens | |
| 1418 | | MBM4402667.1 | Bacteria | VGPK01000173.1 | transposase | Candidatus Cloacimonetes | |
| | | | | | | bacterium | |
| 1419 | — | WP_243137300.1 | Bacteria | NZ_WHYR01000012.1 | transposase | Desulfofundulus | |
| | | | | | | thermobenzoicus | |
| 1420 | — | RUM59908.1 | Bacteria | QNZF01000065.1 | hypothetical protein | Persephonella sp. | |
| 1421 | — | WP_146663349.1 | Bacteria | NZ_CP019791.1 | IS200/IS605 family accessory | Anaerohalosphaera lusitana | |
| | | | | | protein TnpB-related protein | | |
| 1422 | — | MBI4834054.1 | Bacteria | JACQZI010000008.1 | transposase | Planctomycetes bacterium | |
| 1423 | — | MBM4039380.1 | Bacteria | VGYV01000169.1 | IS200/IS605 family element | Planctomycetes bacterium | |
| | | | | | transposase accessory protein | | |
| | | | | | TnpB | | |
| 1424 | — | MBW4512969.1 | Bacteria | JAHHIC010000099.1 | IS200/IS605 family accessory | Scytonematopsis contorta | |
| | | | | | protein TnpB-related protein | HA4267-MV1 | |
| 1425 | — | NEO01605.1 | Bacteria | JAAHHV010001785.1 | IS200/IS605 family element | Moorena sp. SIO317 | |
| | | | | | transposase accessory protein | | |
| | | | | | TnpB | | |
| 1426 | — | HAJ64610.1 | Bacteria | DMJW01000638.1 | transposase | Cyanobacteria bacterium | |
| | | | | | | UBA8543 | |
| 1427 | — | WP_045409841.1 | Bacteria | NZ_BBKT01000015.1 | RNA-guided endonuclease | Thermoanaerobacterium | |
| | | | | | TnpB family protein | saccharolyticum | |
| 1428 | — | WP_193655411.1 | Bacteria | NZ_VOVB01000001.1 | RNA-guided endonuclease | Bacillus cereus | |
| | | | | | TnpB family protein | | |
| 1429 | — | MBQ6520266.1 | Bacteria | JAFRHA010000198.1 | transposase | Anaerolineaceae bacterium | |
| 1430 | — | MBD9037164.1 | Bacteria | RKFA01000020.1 | transposase | | |
| 1431 | — | HIV98566.1 | Bacteria | DXHU01000006.1 | hypothetical protein | Candidatus | |
| | | | | | | Ornithospirochaeta avicola | |
| 1432 | — | TFG00322.1 | Archaea | SDNL01000019.1 | hypothetical protein | Candidatus Lokiarchaeota | |
| | | | | | | archaeon | |
| 1433 | — | TFF89657.1 | Archaea | SDNE01000285.1 | hypothetical protein | Candidatus Lokiarchaeota | |
| | | | | | | archaeon | |
| 1434 | — | MBD3215057.1 | Archaea | WJIN01000335.1 | transposase | Candidatus Lokiarchaeota | |
| | | | | | | archaeon | |
| 1435 | — | MBY9006033.1 | Archaea | JAGXOA010000092.1 | transposase | Candidatus Lokiarchaeota | |
| | | | | | | archaeon | |
| 1436 | — | MBY8981303.1 | Archaea | JAGXNX010000001.1 | transposase | Candidatus Lokiarchaeota | |
| | | | | | | archaeon | |
| 1437 | — | TXT62704.1 | Archaea | SHMU01000087.1 | hypothetical protein | Candidatus Lokiarchaeota | |
| | | | | | | archaeon | |
| 1438 | — | MBD3211381.1 | Archaea | WJIN01000036.1 | transposase | Candidatus Lokiarchaeota | |
| | | | | | | archaeon | |
| 1439 | — | MBD3213066.1 | Archaea | WJIN01000165.1 | transposase | Candidatus Lokiarchaeota | |
| | | | | | | archaeon | |
| 1440 | — | MCE7734803.1 | Archaea | JAAFKL010000166.1 | transposase | Candidatus | |
| | | | | | | Heimdallarchaeota | |
| | | | | | | archaeon | |
| 1441 | — | MCK4878626.1 | Archaea | JAGLTP010000647.1 | transposase | Candidatus | |
| | | | | | | Heimdallarchaeota | |
| | | | | | | archaeon | |
| 1442 | — | OLS30012.1 | Archaea | MEHH01000175.1 | hypothetical protein | Candidatus | |
| | | | | | | Heimdallarchaeota | |
| | | | | | | archaeon AB 125 | |
| 1443 | — | NVM29250.1 | Archaea | JABXJT010000025.1 | transposase | Candidatus Helarchaeota | |
| | | | | | | archaeon | |
| 1444 | — | TFF85393.1 | Archaea | SDMZ01000055.1 | hypothetical protein | Candidatus Lokiarchaeota | |
| | | | | | | archaeon | |
| 1445 | — | MCG3219672.1 | Archaea | JADCTN010000624.1 | transposase | Candidatus | |
| | | | | | | Heimdallarchaeota | |
| | | | | | | archaeon | |
| 1446 | — | MCJ7632848.1 | Archaea | JALHUX010000432.1 | transposase | Candidatus Bathyarchaeota | |
| | | | | | | archaeon | |
| 1447 | — | MBW2672811.1 | Bacteria | JAFCZZ010000035.1 | transposase | Deltaproteobacteria | |
| | | | | | | bacterium | |
| 1448 | — | RLI77137.1 | Archaea | QMZB01000314.1 | hypothetical protein | Archaeoglobales archaeon | |
| 1449 | — | WP_245685464.1 | Bacteria | NZ_JNWJ01000027.1 | zinc ribbon domain-containing | Streptomyces yerevanensis | |
| | | | | | protein | | |
| 1450 | — | SCG40190.1 | Bacteria | LT607754.1 | Putative transposase DNA- | Micromonospora inositola | |
| | | | | | binding domain-containing | | |
| | | | | | protein | | |
| 1451 | — | GGZ76502.1 | Bacteria | BMVM01000010.1 | hypothetical protein | Streptomyces bluensis | |
| 1452 | — | GGN72848.1 | Bacteria | BMPX01000013.1 | hypothetical protein | Actinoplanes lobatus | |
| 1453 | — | WP_136364321.1 | Bacteria | NZ_SSNW01000003.1 | zinc ribbon domain-containing | Deinococcus sp. Arct2-2 | |
| | | | | | protein | | |
| 1454 | — | WP_237025299.1 | Bacteria | NZ_MF600313.1 | transposase | unclassified | |
| | | | | | | Mycolicibacterium | |
| 1455 | — | MBP2372295.1 | Bacteria | JAGIOE010000001.1 | hypothetical protein | Paeniglutamicibacter | |
| | | | | | | psychrophenolicus | |
| 1456 | — | SEC53794.1 | Bacteria | FNSV01000005.1 | Putative transposase DNA- | Rhodococcus koreensis | |
| | | | | | binding domain-containing | | |
| | | | | | protein | | |
| 1457 | — | WP_243679641.1 | Archaea | NZ_BBBK01000001.1 | transposase | Vulcanisaeta souniana | |
| 1458 | — | WP_162008558.1 | Archaea | NZ_BCLI01000001.1 | zinc ribbon domain-containing | Vulcanisaeta thermophila | |
| | | | | | protein | | |
| 1459 | — | GBC85483.1 | Bacteria | BEHN01000018.1 | hypothetical protein | bacterium HR11 | |
| 1460 | — | CAG8449672.1 | Eukaryota | CAJVPZ010000022.1 | 11234 t:CDS:10 | Racocetra fulgida | |
| 1461 | — | CAG8553001.1 | Eukaryota | CAJVPW010005305.1 | 9599 t:CDS: 2 | Cetraspora pellucida | |
| 1462 | — | RMY22497.1 | Eukaryota | QWIL01000183.1 | hypothetical protein | Hortaea werneckii | |
| 1463 | — | PYT66984.1 | Bacteria | QHYJ01000275.1 | hypothetical protein | Acidobacteria bacterium | |
| 1464 | — | WP_096466258.1 | Bacteria | NZ_AP017312.1 | HAMP domain-containing | Aneurinibacillus soli | |
| | | | | | protein | | |
| 1465 | — | KAI3658238.1 | Eukaryota | JALGPX010000080.1 | hypothetical protein | Amoeboaphelidium | |
| | | | | | | occidentale | |
| 1466 | — | KAI3657820.1 | Eukaryota | JALGPX010000095.1 | hypothetical protein | Amoeboaphelidium | |
| | | | | | | occidentale | |
| 1467 | — | 7ODF_A | Viruses | N/A | | Phage #D | |
| 1468 | — | 7LYS_A | Viruses | N/A | | Biggievirus Mos11 | |
| 1469 | — | RLN90303.1 | Eukaryota | MBAC02003613.1 | hypothetical protein | Nothophytophthora sp. | |
| | | | | | | Chile5 | |
| 1470 | — | WP_122902168.1 | Bacteria | NZ_JABAGU010000002.1 | transposase | Acinetobacter johnsonii | |
| 1471 | — | WP_211622565.1 | Bacteria | NZ_CP070897.1 | zinc ribbon domain-containing | Leptolyngbya sp. 7M | |
| | | | | | protein | | |
| 1472 | — | MCD0159805.1 | Bacteria | JACYYD010000001.1 | transposase | Deinococcus sp. 6YEL10 | |
| 1473 | — | XP_043466569.1 | Eukaryota | NW 025110922.1 | uncharacterized protein | Leptopilina heterotoma | |
| | | | | | LOC122501286 | | |
| 1474 | — | WP_236700678.1 | Bacteria | NZ_LAJC01000080.1 | transposase | Allosalinactinospora | |
| | | | | | | lopnorensis | |
| 1475 | — | MBT9252148.1 | Bacteria | JAHHQH010000003.1 | transposase | Brockia lithotrophica | |
| 1476 | — | WP_007921967.1 | Bacteria | NZ_ADVG01000005.1 | zinc ribbon domain-containing | Ktedonobacter racemifer | |
| | | | | | protein | | |
| 1477 | — | NJN67949.1 | Bacteria | JAAUSY010000146.1 | transposase | Chloroflexaceae bacterium | |
| 1478 | — | MBF0228730.1 | Bacteria | JADGBE010000008.1 | transposase | Desul famplus sp. | |
| 1479 | — | NWH06987.1 | Bacteria | JACADJ010000178.1 | transposase | Desulfobacter latus | |
| 1480 | — | MBI4752343.1 | Bacteria | JACQXX010000148.1 | transposase | Acidobacteria bacterium | |
| 1481 | — | MCK6623547.1 | Bacteria | JAKLJP010000001.1 | transposase | Anaerolineae bacterium | |
| 1482 | — | CAB5514647.1 | Bacteria | CAHLAR010000005.1 | hypothetical protein | Achromobacter anxifer | |
| 1483 | — | WP_187630878.1 | Bacteria | NZ_VZQP01000059.1 | RNA-guided endonuclease | Paraburkholderia sp. | |
| | | | | | TnpB family protein | UCT31 | |
| 1484 | — | SFD30209.1 | Bacteria | FOLD01000021.1 | putative transposase | Massilia yuzhufengensis | |
| 1485 | — | SNZ14667.1 | Bacteria | OBEN01000006.1 | putative transposase | Hydrogenobacter | |
| | | | | | | hydrogenophilus | |
| 1486 | — | WP_028951166.1 | Bacteria | NZ_JHUV01000014.1 | RNA-guided endonuclease | Sulfurihydrogenibium | |
| | | | | | TnpB family protein | subterraneum | |
| 1487 | — | MBC7513792.1 | Bacteria | JACMQB010000071.1 | transposase | Herminiimonas sp. | |
| 1488 | — | EGQ61266.1 | Bacteria | AEFB01000319.2 | transposon transposase | Acidithiobacillus sp. GGI- | |
| | | | | | | 221 | |
| 1489 | — | OYV48687.1 | Bacteria | NCAQ01000192.1 | hypothetical protein | Acidocella sp. 20-58-15 | |
| 1490 | — | WP_134727282.1 | Bacteria | NZ_SDEA01000022.1 | zinc ribbon domain-containing | Paracoccus luteus | |
| | | | | | protein | | |
| 1491 | — | MBK1725516.1 | Bacteria | NRSH01000002.1 | hypothetical protein | Halorhodospira neutriphila | |
| 1492 | — | WP_209193695.1 | Bacteria | NZ_JAGHMG010000039.1 | zinc ribbon domain-containing | Rhizobium sp. 16-488-2a | |
| | | | | | protein | | |
| 1493 | — | TLX16612.1 | Bacteria | VCHT01000001.1 | transposase | Rhizobium sp. MHM7A | |
| 1494 | — | QSR84102.1 | Bacteria | CP066203.1 | transposase | Methylacidimicrobium sp. | |
| | | | | | | B4 | |
| 1495 | — | MBF5093617.1 | Bacteria | VUOI01000002.1 | transposase | Azospirillum sp. INR13 | |
| 1496 | — | EPX83450.1 | Bacteria | APVH01000015.1 | Transposase | Salipiger mucosus DSM | |
| | | | | | (probable)Transposase OrfB | 16094 | |
| 1497 | — | TFH65217.1 | Bacteria | SPBC01000377.1 | transposase | Gemmatimonadales | |
| | | | | | | bacterium | |
| 1498 | — | ATX79037.1 | Bacteria | CP018799.1 | putative transposase | Mariprofundus aestuarium | |
| 1499 | — | RUM57404.1 | Bacteria | QNZC01000068.1 | transposase | Persephonella sp. | |
| 1500 | — | HIC78230.1 | Bacteria | DTWL01000356.1 | hypothetical protein | Sulfurovum sp. | |
| 1501 | — | HBI23899.1 | Bacteria | DNTV01000204.1 | transposase | Nitrospiraceae bacterium | |
| 1502 | — | MBU4174996.1 | Bacteria | JAHIJE010000117.1 | transposase | Actinomycetia bacterium | |
| 1503 | — | MBL3752915.1 | Bacteria | JADEYL010000046.1 | transposase | Mycobacteroides abscessus | |
| | | | | | | subsp. massiliense | |
| 1504 | — | RYQ18620.1 | Bacteria | RYUM01000014.1 | transposase IS605 OrfB | Bifidobacterium | |
| | | | | | | pseudolongum subsp. | |
| | | | | | | globosum | |
| 1505 | — | WP_209909238.1 | Bacteria | NZ_JAGIOE010000001.1 | zinc ribbon domain-containing | Paeniglutamicibacter | |
| | | | | | protein | psychrophenolicus | |
| 1506 | — | TKV35325.1 | Bacteria | NKHI01000002.1 | hypothetical protein | Mycobacteroides abscessus | |
| | | | | | | subsp. bolletii | |
| 1507 | — | AUI51796.1 | Bacteria | CP018863.1 | hypothetical protein | Arthrobacter | |
| | | | | | | crystallopoietes | |
| 1508 | — | TFB59927.1 | Bacteria | SOFA01000009.1 | hypothetical protein | Cryobacterium sp. Sr3 | |
| 1509 | — | WP_157514011.1 | Bacteria | NZ_BAFX01000063.1 | zinc ribbon domain-containing | Nocardia concava | |
| | | | | | protein | | |
| 1510 | — | AFA75019.1 | Bacteria | CP003119.1 | putative transposase | Gordonia | |
| | | | | | | polyisoprenivorans VH2 | |
| 1511 | — | WP_035391367.1 | Bacteria | NZ_JXUW01000011.1 | zinc ribbon domain-containing | Ferrimicrobium | |
| | | | | | protein | acidiphilum | |
| 1512 | — | MCG2795153.1 | Bacteria | JAKLPO010000152.1 | zinc ribbon domain-containing | Actinomycetia bacterium | |
| | | | | | protein | | |
| 1513 | — | RTH35634.1 | Bacteria | PELZ01000253.1 | transposase | Thermus scotoductus | |
| 1514 | — | MBX0311069.1 | Bacteria | JAEMPW010000269.1 | transposase | Sulfurihydrogenibium sp. | |
| 1515 | — | EFN92524.1 | Bacteria | AEGV01000040.1 | transposase, IS605 OrfB family | Mobiluncus mulieris | |
| | | | | | | FB024-16 | |
| 1516 | — | NBR67370.1 | Bacteria | RFYW01000108.1 | hypothetical protein | Actinomycetia bacterium | |
| 1517 | — | MBD3261432.1 | Archaea | WJJK01000200.1 | transposase | Candidatus Altiarchaeales | |
| | | | | | | archaeon | |
| 1518 | — | WP_134642919.1 | Bacteria | NZ_QSLN01000001.1 | RNA-guided endonuclease | Ammonifex thiophilus | |
| | | | | | TnpB family protein | | |
| 1519 | — | NNU78592.1 | Bacteria | JABEYB010000027.1 | transposase | Clostridium estertheticum | |
| 1520 | — | WP_096231488.1 | Bacteria | NZ_LT906662.1 | RNA-guided endonuclease | Thermoanaerobacterium sp. | |
| | | | | | TnpB family protein | RBIITD | |
| 1521 | — | MBP3907722.1 | Bacteria | JAGAVT010000085.1 | transposase | Turicibacter sp. | |
| 1522 | — | WP_055200371.1 | Bacteria | NZ_CYZN01000011.1 | zinc ribbon domain-containing | Blautia wexlerae | |
| | | | | | protein | | |
| 1523 | — | MCB7508304.1 | Bacteria | JAJCGR010000024.1 | transposase | Blautia sp. MSK20_18 | |
| 1524 | — | CUM99524.1 | Bacteria | CYXT01000014.1 | Putative transposase DNA- | Anaerostipes hadrus | |
| | | | | | binding domain | | |
| 1525 | — | MBO5521708.1 | Bacteria | JAGAIG010000461.1 | transposase | Eubacterium sp. | |
| 1526 | — | MBQ8997475.1 | Bacteria | JAFUBD010000032.1 | transposase | Clostridium sp. | |
| 1527 | — | WP_207531074.1 | Bacteria | NZ_CP062975.1 | RNA-guided endonuclease | Pontibacillus sp. ALD_SL1 | |
| | | | | | TnpB family protein | | |
| 1528 | — | RYL94548.1 | Bacteria | SEMC01000001.1 | transposase | Sporolactobacillus sp. | |
| | | | | | | THM19-2 | |
| 1529 | — | WP_256705598.1 | Bacteria | NZ_CP101913.1 | zinc ribbon domain-containing | Oceanobacillus | |
| | | | | | protein | oncorhynchi | |
| 1530 | — | KPV63273.1 | Archaea | LIHJ01000055.1 | putative transposase DNA- | Candidatus Bathyarchaeota | |
| | | | | | binding domain protein | archaeon BA1 | |
| 1531 | — | RLI61830.1 | Archaea | QMYV01000239.1 | hypothetical protein | Candidatus Thorarchaeota | |
| | | | | | | archaeon | |
| 1532 | — | MCL4325250.1 | Archaea | JAMCUS010000003.1 | zinc ribbon domain-containing | Candidatus | |
| | | | | | protein | Thermoplasmatota | |
| | | | | | | archaeon | |
| 1533 | — | MCI0714592.1 | Bacteria | JAKEEQ010000554.1 | zinc ribbon domain-containing | Chloroflexi bacterium | |
| | | | | | protein | | |
| 1534 | — | MCL0083959.1 | Bacteria | JALPYC010000001.1 | zinc ribbon domain-containing | Dehalococcoidia bacterium | |
| | | | | | protein | | |
| 1535 | — | HHC23960.1 | Bacteria | DRQU01000075.1 | hypothetical protein | Desulfobacterales | |
| | | | | | | bacterium | |
| 1536 | — | MBU1173229.1 | Bacteria | JAHIRD010000230.1 | transposase | Proteobacteria bacterium | |
| 1537 | — | KJU86117.1 | Bacteria | LACI01000735.1 | protein containing Transposase, | Candidatus | |
| | | | | | IS605 OrfB | Magnetobacterium | |
| | | | | | | bavaricum | |
| 1538 | — | RLI97315.1 | Archaea | QMZO01000124.1 | hypothetical protein | Candidatus | |
| | | | | | | Aenigmarchaeota archaeon | |
| 1539 | — | KFZ25551.1 | Bacteria | JRFF01000072.1 | putative transposase DNA- | Candidatus Izimaplasma | |
| | | | | | binding domain protein | bacterium HR2 | |
| 1540 | — | NCC70892.1 | Bacteria | RZZB01000202.1 | hypothetical protein | bacterium | |
| 1541 | — | DAO62756.1 | Viruses | BK037802.1 | endonuclease | Ackermannviridae sp. | |
| 1542 | — | MBP3608485.1 | Bacteria | JAGBBT010000110.1 | transposase | Treponema sp. | |
| 1543 | — | PIP24354.1 | Bacteria | PCRQ01000027.1 | hypothetical protein | Candidatus Nealsonbacteria | |
| | | | | | | bacterium | |
| | | | | | | CG23_combo_of_CG06- | |
| | | | | | | 09_8_20_14 all 37_18 | |
| 1544 | — | NCB85672.1 | Bacteria | SAAL01000173.1 | hypothetical protein | Bacteroidia bacterium | |
| 1545 | — | MBW2671839.1 | Bacteria | JAFCZZ010000001.1 | transposase | Deltaproteobacteria | |
| | | | | | | bacterium | |
| 1546 | — | MBI3950285.1 | Bacteria | JACQGF010000158.1 | transposase | Acidobacteria bacterium | |
| 1547 | — | RKY82414.1 | Bacteria | QNDG01000026.1 | hypothetical protein | candidate division KSB1 | |
| | | | | | | bacterium | |
| 1548 | — | MBD3261709.1 | Archaea | WJJK01000240.1 | IS200/IS605 family element | Candidatus Altiarchaeales | |
| | | | | | transposase accessory protein | archaeon | |
| | | | | | TnpB | | |
| 1549 | — | HBY20089.1 | Bacteria | DOSNO1000085.1 | hypothetical protein | Clostridiales bacterium | |
| 1550 | — | WP_207689043.1 | Bacteria | NZ_CP061799.1 | zinc ribbon domain-containing | Desulfonema limicola | |
| | | | | | protein | | |
| 1551 | — | MBD3260591.1 | Archaea | WJJK01000083.1 | transposase | Candidatus Altiarchaeales | |
| | | | | | | archaeon | |
| 1552 | — | MCK9416625.1 | Bacteria | JALNZL010000087.1 | transposase | Candidatus Dojkabacteria | |
| | | | | | | bacterium | |
| 1553 | — | NBK22806.1 | Bacteria | SABJ01000301.1 | hypothetical protein | Spirochaetia bacterium | |
| 1554 | — | NJO59150.1 | Bacteria | JAAURC010000035.1 | transposase | Richelia sp. RM2_1_2 | |
| 1555 | — | MCK9434617.1 | Bacteria | JALNZP010000074.1 | transposase | Candidatus Cloacimonetes | |
| | | | | | | bacterium | |
| 1556 | — | NBP56844.1 | Bacteria | RGCK01000177.1 | hypothetical protein | bacterium | |
| 1557 | — | NBT36133.1 | Bacteria | RFVY01000215.1 | hypothetical protein | Betaproteobacteria | |
| | | | | | | bacterium | |
| 1558 | — | NLF41659.1 | Bacteria | JAAYZG010000212.1 | transposase | Bacteroidales bacterium | |
| 1559 | — | NCP97719.1 | Archaea | JAACRV010000003.1 | transposase | archaeon | |
| 1560 | — | MBV8226147.1 | Bacteria | JAFAIU010000672.1 | transposase | Verrucomicrobia bacterium | |
| 1561 | — | MCI0562784.1 | Archaea | JALAHR010001958.1 | transposase | Nitrososphaera sp. | |
| 1562 | — | MBU1113489.1 | Bacteria | JAHISO010000239.1 | transposase | Candidatus Omnitrophica | |
| | | | | | | bacterium | |
| 1563 | — | MBU4562321.1 | Bacteria | JAHIPZ010000134.1 | transposase | bacterium | |
| 1564 | — | MCG2818861.1 | Bacteria | JAKLSA010000096.1 | transposase | Actinomycetia bacterium | |
| 1565 | — | WP_173834294.1 | Bacteria | NZ_CP048795.1 | zinc ribbon domain-containing | Hydrogenobacter sp. T-8 | |
| | | | | | protein | | |
| 1566 | — | WP_221173817.1 | Bacteria | NZ_JAIFYA010000005.1 | zinc ribbon domain-containing | Thermosulfurimonas sp. | |
| | | | | | protein | F29 | |
| 1567 | — | MCD6124135.1 | Bacteria | JAGGRZ010000049.1 | transposase | bacterium | |
| 1568 | — | BDH16382.1 | Viruses | LC701594.1 | hypothetical protein | Bacteriophage sp. | |
| 1569 | — | MBO5095631.1 | Bacteria | JAGAQR010000022.1 | transposase | Bacilli bacterium | |
| 1570 | — | DAS56006.1 | Viruses | BK041845.1 | Putative transposase | Myoviridae sp. | |
| 1571 | — | MBP5723836.1 | Bacteria | JAGCRD010000194.1 | transposase | Bacteroidales bacterium | |
| 1572 | — | MCQ2123336.1 | Bacteria | JAKSIB010000005.1 | transposase | Fibrobacter sp. | |
| 1573 | — | MCK9442844.1 | Archaea | JALNZQ010000314.1 | zinc ribbon domain-containing | Methanothrix sp. | |
| | | | | | protein | | |
| 1574 | — | HBP43518.1 | Bacteria | DOFM01000054.1 | hypothetical protein | Clostridiales bacterium | |
| 1575 | — | PMP89239.1 | Bacteria | PNIZ01000199.1 | hypothetical protein | Desulfurella sp. | |
| 1576 | — | HAY06898.1 | Bacteria | DNFL01000234.1 | hypothetical protein | Hyphomonas sp. | |
| 1577 | — | MBU2769301.1 | Bacteria | JAAOMR010000693.1 | transposase | Acidithiobacillus | |
| | | | | | | ferrivorans | |
| 1578 | — | EGQ8952443.1 | Bacteria | AAXMTY010000023.1 | transposase | Vibrio parahaemolyticus | |
| 1579 | — | WP_206385457.1 | Bacteria | NZ_JAEQBF010000051.1 | zinc ribbon domain-containing | Acidithiobacillus sp. | |
| | | | | | protein | MC6.1 | |
| 1580 | — | WP_163279439.1 | Bacteria | NZ_SWRG01000008.1 | RNA-guided endonuclease | Clostridium sporogenes | |
| | | | | | TnpB family protein | | |
| 1581 | — | WP_058738224.1 | Archaea | NZ_CP011266.1 | zinc ribbon domain-containing | Methanobrevibacter | |
| | | | | | protein | millerae | |
| 1582 | — | WP_190273504.1 | Bacteria | NZ_ANPE02000061.1 | zinc ribbon domain-containing | Arthrobacter | |
| | | | | | protein | crystallopoietes | |
| 1583 | — | AGB24822.1 | Bacteria | CP003078.1 | transposase | Mycobacterium sp. JS623 | |
| 1584 | — | OQY50005.1 | Bacteria | NBMI01000183.1 | hypothetical protein | Beggiatoa sp. 4572_84 | |
| 1585 | — | WP_200155309.1 | Bacteria | NZ_NRRQ01000064.1 | IS200/IS605 family accessory | Chromatium okenii | |
| | | | | | protein TnpB-related protein | | |
| 1586 | — | MBC8288575.1 | Bacteria | JACNKA010000186.1 | transposase | Nitrospinae bacterium | |
| 1587 | — | RYZ90147.1 | Bacteria | SEDT01000087.1 | transposase | Proteobacteria bacterium | |
| 1588 | — | WP_005436678.1 | Bacteria | NZ_JH815520.1 | transposase | Sutterella wadsworthensis | |
| 1589 | — | MBK1649610.1 | Bacteria | NRRS01000053.1 | transposase | Rhabdochromatium | |
| | | | | | | marinum | |
| 1590 | — | WP_232257767.1 | Bacteria | NZ_JACTBM010000007.1 | transposase | Helicobacter pylori | |
| 1591 | — | MBW4588721.1 | Bacteria | JAHHGQ010000029.1 | transposase | Aetokthonos hydrillicola | |
| | | | | | | CCALA 1050 | |
| 1592 | — | MBW4668472.1 | Bacteria | JAHHGZ010000013.1 | transposase | Cyanomargarita calcarea | |
| | | | | | | GSE-NOS-MK-12-04C | |
| 1593 | — | WP_096691224.1 | Bacteria | NZ_AP018255.1 | RNA-guided endonuclease | unclassified Calothrix | |
| | | | | | TnpB family protein | | |
| 1594 | — | OTE96257.1 | Bacteria | MBQZ01000040.1 | hypothetical protein | Crenothrix sp. D3 | |
| 1595 | — | NES82797.1 | Bacteria | JAAHGJ010000346.1 | transposase | Moorena sp. SIO2B7 | |
| 1596 | — | WP_096687914.1 | Bacteria | NZ_AP018255.1 | transposase | unclassified Calothrix | |
| 1597 | — | NEQ14999.1 | Bacteria | JAAHHK010000636.1 | transposase | Moorena sp. SIO3E2 | |
| 1598 | — | OGW57176.1 | Bacteria | MHEQ01000112.1 | hypothetical protein | Nitrospirae bacterium | |
| | | | | | | RIFCSPHIGHO2_02_FULL_ | |
| | | | | | | 42_12 | |
| 1599 | — | MBS1484346.1 | Bacteria | JABMBO010000546.1 | transposase | Clostridium sp. | |
| 1600 | — | MBT8905287.1 | Bacteria | MRPS01000003.1 | transposase | Lactobacillus delbrueckii | |
| | | | | | | subsp. bulgaricus | |
| 1601 | — | CDR84426.1 | Bacteria | CCDT01000001.1 | Transposase related protein | Lactobacillus delbrueckii | |
| | | | | | | subsp. lactis | |
| 1602 | — | WP_236153666.1 | Bacteria | NZ_BNII01000041.1 | RNA-guided endonuclease | Lactobacillus delbrueckii | |
| | | | | | TnpB family protein | | |
| 1603 | — | PAK96685.1 | Bacteria | NCWZ01000058.1 | transposase | Lactobacillus | |
| | | | | | | kefiranofaciens | |
| 1604 | — | RGW81525.1 | Bacteria | QSAX01000060.1 | transposase | Lactobacillus amylovorus | |
| 1605 | — | MBR1443699.1 | Bacteria | JAFUUG010000347.1 | transposase | Firmicutes bacterium | |
| 1606 | — | MBE6091604.1 | Bacteria | SVBY01000002.1 | hypothetical protein | Selenomonas ruminantium | |
| 1607 | — | MCI9591799.1 | Bacteria | JAAWSS010000056.1 | transposase | Lachnospiraceae bacterium | |
| 1608 | — | MBQ7478109.1 | Bacteria | JAFSWY010000135.1 | transposase | Selenomonadaceae | |
| | | | | | | bacterium | |
| 1609 | — | MCI9401882.1 | Bacteria | JAAWPS010000151.1 | transposase | Lachnospiraceae bacterium | |
| 1610 | — | MCR5674745.1 | Bacteria | JAILOV010000020.1 | transposase | Lachnospiraceae bacterium | |
| 1611 | — | MCI9422858.1 | Bacteria | JAAWQI010000074.1 | transposase | Dorea sp. | |
| 1612 | — | MCI8945897.1 | Bacteria | JAAWIU010000002.1 | transposase | Lachnospiraceae bacterium | |
| 1613 | — | MCL2690388.1 | Bacteria | WRCH01000141.1 | transposase | Chitinispirillia bacterium | |
| 1614 | — | OJE32415.1 | Bacteria | MACF01000147.1 | hypothetical protein | Bacillus mobilis | |
| 1615 | — | WP_242844950.1 | Bacteria | NZ_LFVU01000024.1 | RNA-guided endonuclease | Clostridium | |
| | | | | | TnpB family protein | cylindrosporum | |
| 1616 | — | RIV16466.1 | Bacteria | QXHL01000163.1 | hypothetical protein | Alicyclobacillaceae | |
| | | | | | | bacterium I2511 | |
| 1617 | — | WP_052564972.1 | Bacteria | NZ_JXUW01000001.1 | zinc ribbon domain-containing | Ferrimicrobium | |
| | | | | | protein | acidiphilum | |
| 1618 | — | AEW05165.1 | Bacteria | CP003179.1 | transposase, IS605 OrfB family | Sulfobacillus acidophilus | |
| | | | | | | DSM 10332 | |
| 1619 | — | MBU0705539.1 | Bacteria | JAHIZM010000761.1 | transposase | Chloroflexi bacterium | |
| 1620 | — | MBO0722216.1 | Bacteria | JAFMRT010000608.1 | transposase | Blastocatellia bacterium | |
| 1621 | — | MBI4752024.1 | Bacteria | JACQXX010000132.1 | transposase | Acidobacteria bacterium | |
| 1622 | — | MBS1807490.1 | Bacteria | JAFDVL010000012.1 | transposase | Acidobacteria bacterium | |
| 1623 | — | AEG16727.1 | Bacteria | CP002770.1 | transposase IS605 OrfB | Desulfofundulus | |
| | | | | | | kuznetsovii DSM 6115 | |
| 1624 | — | CAB3390625.1 | Bacteria | LR792683.1 | transposase (fragment) | Kyrpidia spormannii | |
| 1625 | — | TXH56967.1 | Bacteria | SSEU01000158.1 | hypothetical protein | Bacteroidia bacterium | |
| 1626 | — | OGN53959.1 | Bacteria | MGLQ01000091.1 | hypothetical protein | Chlamydiae bacterium | |
| | | | | | | GWF2_49_8 | |
| 1627 | — | MBF0224070.1 | Bacteria | JADGBH010000002.1 | transposase | Desulfobacterales | |
| | | | | | | bacterium | |
| 1628 | — | KAF9583319.1 | Eukaryota | JAABOA010000737.1 | hypothetical protein | Lunasporangiospora | |
| | | | | | | selenospora | |
| 1629 | — | WP_217983958.1 | Bacteria | NZ_CAJTBZ010000014.1 | zinc ribbon domain-containing | Turicimonas muris | |
| | | | | | protein | | |
| 1630 | — | EGG52352.1 | Bacteria | AFBP01000070.1 | transposase, IS605 OrfB family | Parasutterella | |
| | | | | | | excrementihominis YIT | |
| | | | | | | 11859 | |
| 1631 | — | WP_120177249.1 | Bacteria | NZ_AP018786.1 | zinc ribbon domain-containing | Sutterella | |
| | | | | | protein | megalosphaeroides | |
| 1632 | — | EHY30309.1 | Bacteria | AFBQ01000356.1 | transposase, IS605 OrfB family | Sutterella parvirubra YIT | |
| | | | | | | 11816 | |
| 1633 | — | KAB7656835.1 | Bacteria | WEHX01000066.1 | transposase | Sutterella seckii | |
| 1634 | — | MBS6623116.1 | Bacteria | JAGZYH010000070.1 | transposase | Faecalibacterium | |
| | | | | | | prausnitzii | |
| 1635 | — | MBP3437724.1 | Bacteria | JAGBFJ010000001.1 | transposase | Sutterella sp. | |
| 1636 | — | MCI5850546.1 | Bacteria | JALEKV010000073.1 | transposase | Sutterellaceae bacterium | |
| 1637 | — | MBM6704991.1 | Bacteria | JACJJC010000044.1 | transposase | Sutterella massiliensis | |
| 1638 | — | DAF42624.1 | Viruses | BK032497.1 | endonuclease | Siphoviridae sp. ctHip2 | |
| 1639 | — | NOQ38425.1 | Archaea | WTCA01000082.1 | IS200/IS605 family element | archaeon | |
| | | | | | transposase accessory protein | | |
| | | | | | TnpB | | |
| 1640 | — | MBO0886977.1 | Bacteria | JAFMQO010000224.1 | transposase | Acidimicrobiales bacterium | |
| 1641 | — | TMM15277.1 | Bacteria | VAWP01000081.1 | transposase | Actinobacteria bacterium | |
| 1642 | — | WP_124819578.1 | Bacteria | NZ_QDGB01000237.1 | RNA-guided endonuclease | Micromonospora ureilytica | |
| | | | | | TnpB family protein | | |
| 1643 | — | EES53258.1 | Bacteria | GG693867.1 | transposase, IS605 OrfB | Leptospirillum | |
| | | | | | | ferrodiazotrophum | |
| 1644 | — | WP_199298333.1 | Bacteria | NZ_JACJPF010000116.1 | zinc ribbon domain-containing | Trichocoleus sp. FACHB- | |
| | | | | | protein | 40 | |
| 1645 | — | MBD1995206.1 | Bacteria | JACJPC010000014.1 | transposase | Leptolyngbya sp. FACHB- | |
| | | | | | | 541 | |
| 1646 | — | HIB49114.1 | Bacteria | DTTW01000015.1 | hypothetical protein | Flavobacteriaceae | |
| | | | | | | bacterium | |
| 1647 | — | MBS1807619.1 | Bacteria | JAFDVL010000012.1 | transposase | Acidobacteria bacterium | |
| 1648 | — | PSR22028.1 | Bacteria | PXYV01000023.1 | hypothetical protein | Sulfobacillus acidophilus | |
| 1649 | — | MBI4850752.1 | Bacteria | JACQZQ010000012.1 | IS200/IS605 family element | Acidobacteria bacterium | |
| | | | | | transposase accessory protein | | |
| | | | | | TnpB | | |
| 1650 | — | WP_182216209.1 | Bacteria | NZ_JACGVM010000021.1 | RNA-guided endonuclease | unclassified Colwellia | |
| | | | | | TnpB family protein | | |
| 1651 | — | TMD31684.1 | Bacteria | VBIG01000288.1 | transposase | Chloroflexi bacterium | |
| 1652 | — | WP_234854636.1 | Bacteria | NZ_CP090836.1 | transposase | Paracoccus sp. S8-55 | |
| 1653 | — | PZN09779.1 | Bacteria | QGUQ01000214.1 | transposase | Firmicutes bacterium | |
| 1654 | — | OPX94044.1 | Bacteria | MVQL01000027.1 | putative transposase | Pelotomaculum sp. | |
| | | | | | | PtaB.Bin104 | |
| 1655 | — | ACV62680.1 | Bacteria | CP001720.1 | transposase, IS605 OrfB family | Desulfofarcimen | |
| | | | | | | acetoxidans DSM 771 | |
| 1656 | — | WP_213140004.1 | Bacteria | NZ_JAGYPE020000019.1 | RNA-guided endonuclease | Bacillus sp. FJAT-50051 | |
| | | | | | TnpB family protein | | |
| 1657 | — | NJN17495.1 | Bacteria | JAAUQO010000090.1 | transposase | Oscillochloris sp. | |
| 1658 | — | PKO19157.1 | Bacteria | PHBZ01000001.1 | hypothetical protein | Chloroflexi bacterium | |
| | | | | | | HGW-Chloroflexi-10 | |
| 1659 | — | MBA3531738.1 | Bacteria | JACCSL010000326.1 | IS200/IS605 family element | Ardenticatenales bacterium | |
| | | | | | transposase accessory protein | | |
| | | | | | TnpB | | |
| 1660 | — | WP_220594522.1 | Bacteria | NZ_JAIEWN010000006.1 | RNA-guided endonuclease | Oscillochloris sp. ZM17-4 | |
| | | | | | TnpB family protein | | |
| 1661 | — | MBN1978793.1 | Bacteria | JAFGED010000324.1 | transposase | Anaerolineae bacterium | |
| 1662 | — | MBN2305289.1 | Bacteria | JAFGTJ010000381.1 | transposase | Anaerolineae bacterium | |
| 1663 | — | MCB9640396.1 | Bacteria | JACKEK010000034.1 | IS200/IS605 family element | Myxococcales bacterium | |
| | | | | | transposase accessory protein | | |
| | | | | | TnpB | | |
| 1664 | — | MBV8558358.1 | Bacteria | JAFAMF010001237.1 | IS200/IS605 family transposase | Planctomycetaceae | |
| | | | | | | bacterium | |
| 1665 | — | MBV8606642.1 | Bacteria | JAFAMU010000228.1 | transposase | Singulisphaera sp. | |
| 1666 | — | MBZ0288278.1 | Bacteria | JAIOHR010001028.1 | transposase | Anaerolineae bacterium | |
| 1667 | — | WP_143661893.1 | Bacteria | NZ_MUND01000151.1 | zinc ribbon domain-containing | Streptomyces glaucescens | |
| | | | | | protein | | |
| 1668 | — | CAG4926556.1 | Bacteria | CAJHCI020000008.1 | unnamed protein product | Acidithrix sp. C25 | |
| 1669 | — | WP_109058013.1 | Bacteria | NZ_QFFM01000033.1 | RNA-guided endonuclease | Bifidobacterium | |
| | | | | | TnpB family protein | callitrichidarum | |
| 1670 | — | MCL8011903.1 | Bacteria | JAMJVZ010000006.1 | transposase | Streptomyces sp. AS02 | |
| 1671 | — | WP_122903563.1 | Bacteria | NZ_RHHS01000013.1 | RNA-guided endonuclease | Brevibacillus gelatini | |
| | | | | | TnpB family protein | | |
| 1672 | — | YP_009223860.1 | Viruses | NC_029073.1 | transposase | Geobacillus virus E3 | |
| 1673 | — | WP_243282803.1 | Bacteria | NZ_JADPAA010000010.1 | transposase | Clostridium sp. | |
| | | | | | | 1001283B150210_160208_ | |
| | | | | | | E6 | |
| 1674 | — | MBR4904641.1 | Bacteria | JAFZIQ010000158.1 | transposase | Selenomonadaceae | |
| | | | | | | bacterium | |
| 1675 | — | MBO5630023.1 | Bacteria | JAGAGC010000742.1 | transposase | Aeriscardovia sp. | |
| 1676 | — | MBN6187143.1 | Bacteria | JAFJNS010000001.1 | transposase | Aneurinibacillus sp. | |
| | | | | | | BA2021 | |
| 1677 | — | WP_220559137.1 | Bacteria | NZ_CP080764.1 | zinc ribbon domain-containing | Aneurinibacillus | |
| | | | | | protein | thermoaerophilus | |
| 1678 | — | ATA60299.1 | Bacteria | CP016552.1 | Glucose-6-phosphate isomerase | Geobacillus | |
| | | | | | | stearothermophilus | |
| 1679 | — | WP_101579234.1 | Bacteria | NZ_PGVA01000070.1 | RNA-guided endonuclease | Bacillus canaveralius | |
| | | | | | TnpB family protein | | |
| 1680 | — | MCD6318422.1 | Bacteria | JAGHCO010000163.1 | transposase | Candidatus Aerophobetes | |
| | | | | | | bacterium | |
| 1681 | — | MBC8461674.1 | Bacteria | JACNHB010001321.1 | transposase | Deltaproteobacteria | |
| | | | | | | bacterium | |
| 1682 | — | RKX49285.1 | Bacteria | QNAS01000290.1 | transposase | Thermotoga sp. | |
| 1683 | — | WP_232841535.1 | Bacteria | NC_015949.1 | transposase | Caldicellulosiruptor | |
| | | | | | | acetigenus | |
| 1684 | — | RKU16510.1 | Bacteria | PYIY01000097.1 | transposase | Candidatus Poribacteria | |
| | | | | | | bacterium | |
| 1685 | — | MCE2394328.1 | Bacteria | JAGWBT010000036.1 | transposase | Candidatus Poribacteria | |
| | | | | | | bacterium | |
| 1686 | — | MCL0090477.1 | Bacteria | JALPYR010000003.1 | transposase | Dehalococcoidia bacterium | |
| 1687 | — | NLT18163.1 | Bacteria | JAAYBM010000038.1 | IS200/IS605 family element | Clostridiales bacterium | |
| | | | | | transposase accessory protein | | |
| | | | | | TnpB | | |
| 1688 | — | QBM02815.1 | Archaea | MK005757.1 | CRISPR-associated protein | uncultured archaeon | |
| | | | | | Cas14u.4 | | |
| 1689 | — | WP_211344217.1 | Bacteria | NZ_VDMO01000031.1 | RNA-guided endonuclease | Deinococcus radiopugnans | |
| | | | | | TnpB family protein | | |
| 1690 | — | WP_156039241.1 | Bacteria | NZ_JNIV01000028.1 | RNA-guided endonuclease | Deinococcus marmoris | |
| | | | | | TnpB family protein | | |
| 1691 | — | PIG94330.1 | Bacteria | LIYN02000067.1 | hypothetical protein | Deinococcus sp. UR1 | |
| 1692 | — | RMH37590.1 | Bacteria | RFGF01000015.1 | transposase | Nitrospirae bacterium | |
| 1693 | — | WP_071454634.1 | Bacteria | NZ_CP017675.1 | RNA-guided endonuclease | Gloeomargarita lithophora | |
| | | | | | TnpB family protein | | |
| 1694 | — | WP_251963207.1 | Bacteria | NZ_CALTRY010000046.1 | transposase | Salinibacter ruber | |
| 1695 | — | WP_183958574.1 | Bacteria | NZ_CALTRY010000004.1 | RNA-guided endonuclease | Salinibacter ruber | |
| | | | | | TnpB family protein | | |
| 1696 | — | WP_103030019.1 | Bacteria | NZ_NCQZ01000036.1 | RNA-guided endonuclease | Salinibacter altiplanensis | |
| | | | | | TnpB family protein | | |
| 1697 | — | NPA14300.1 | Bacteria | JAADES010000030.1 | IS200/IS605 family element | Aquificae bacterium | |
| | | | | | transposase accessory protein | | |
| | | | | | TnpB | | |
| 1698 | — | KWX07456.1 | Bacteria | JYFD01000144.1 | transposase | Hydrogenibacillus | |
| | | | | | | schlegelii | |
| 1699 | — | WP_015739532.1 | Bacteria | NC_013385.1 | RNA-guided endonuclease | Ammonifex degensii | |
| | | | | | TnpB family protein | | |
| 1700 | — | RUM32323.1 | Bacteria | QNXR01000009.1 | hypothetical protein | Aquifex sp. | |
| 1701 | — | WP_013638781.1 | Bacteria | NC_015185.1 | RNA-guided endonuclease | Desulfurobacterium | |
| | | | | | TnpB family protein | thermolithotrophum | |
| 1702 | — | MBE0467803.1 | Bacteria | JACUUW010000304.1 | transposase | Candidatus Desulforudis | |
| | | | | | | sp. | |
| 1703 | — | KXG75316.1 | Bacteria | LOED01000028.1 | hypothetical protein | Fervidicola ferrireducens | |
| 1704 | — | AMM40882.1 | Bacteria | CP013015.1 | transposase, IS605 OrfB family | Candidatus Desulfofervidus | |
| | | | | | protein | auxilii | |
| 1705 | — | OGT89420.1 | Bacteria | MGZB01000032.1 | hypothetical protein | Gammaproteobacteria | |
| | | | | | | bacterium | |
| | | | | | | RIFOXYD12_FULL_61_ | |
| | | | | | | 37 | |
| 1706 | — | AFU57969.1 | Archaea | CP002408.1 | putative transposase | Candidatus Nitrososphaera | |
| | | | | | | gargensis Ga9.2 | |
| 1707 | — | MCL5068932.1 | Archaea | JAMCVQ010000456.1 | transposase | Thaumarchaeota archaeon | |
| 1708 | — | MBM5805037.1 | Archaea | VGLU01000004.1 | IS200/IS605 family element | Candidatus | |
| | | | | | transposase accessory protein | Verstraetearchaeota | |
| | | | | | TnpB | archaeon | |
| 1709 | — | WP_011018975.1 | Archaea | NC_003551.1 | RNA-guided endonuclease | Methanopyrus kandleri | |
| | | | | | TnpB family protein | | |
| 1710 | — | MCD6164338.1 | Archaea | JAGGSW010000073.1 | transposase | Candidatus Odinarchaeota | |
| | | | | | | archaeon | |
| 1711 | — | RZN63168.1 | Archaea | RYFX01000007.1 | transposase | Methanonatronarchaeia | |
| | | | | | | archaeon | |
| 1712 | — | MCD6484947.1 | Archaea | JAGGZM010000253.1 | transposase | Candidatus Odinarchaeota | |
| | | | | | | archaeon | |
| 1713 | — | AGK61926.1 | Archaea | CP005290.1 | transposase, IS605 OrfB family, | Archaeoglobus | |
| | | | | | central region | sulfaticallidus PM70-1 | |
| 1714 | — | WP_094581487.1 | Archaea | NZ_NHOX01000028.1 | RNA-guided endonuclease | Halorubrum sp. Ib24 | |
| | | | | | TnpB family protein | | |
| 1715 | — | WP_247418968.1 | Archaea | NZ_JALLGW010000002.1 | transposase | Halomarina salina | |
| 1716 | — | PSP95102.1 | Archaea | PXRO01000017.1 | transposase | Halobacteriales archaeon | |
| | | | | | | QS 4 62 28 | |
| 1717 | — | WP_254841487.1 | Archaea | NZ_CP101155.1 | transposase | Haloarculaceae | |
| 1718 | — | WP_229110647.1 | Archaea | NZ_CP064788.1 | transposase | Halapricum desulfuricans | |
| 1719 | — | MCD6503022.1 | Archaea | JAGGXY010000047.1 | transposase | Euryarchaeota archaeon | |
| 1720 | — | EZQ11263.1 | Archaea | JFZT01000016.1 | transposase | Candidatus Acidianus | |
| | | | | | | copahuensis | |
| 1721 | — | WP_156007847.1 | Archaea | NZ_CP045483.1 | RNA-guided endonuclease | Stygiolobus azoricus | |
| | | | | | TnpB family protein | | |
| 1722 | — | WP_192819283.1 | Archaea | NZ_CP062310.1 | RNA-guided endonuclease | Infirmifilum lucidum | |
| | | | | | TnpB family protein | | |
| 1723 | — | HIH73352.1 | Archaea | DUII01000144.1 | IS200/IS605 family element | Thermococcaceae archaeon | |
| | | | | | transposase accessory protein | | |
| | | | | | TnpB | | |
| 1724 | — | AKG39172.1 | Archaea | CP009961.1 | hypothetical protein | Infirmifilum uzonense | |
| 1725 | — | HDD34164.1 | Archaea | DRAL01000233.1 | hypothetical protein | Thermofilaceae archaeon | |
| 1726 | — | WP_238377775.1 | Archaea | NZ_LCTF01000006.1 | zinc ribbon domain-containing | Caldivirga sp. MU80 | |
| | | | | | protein | | |
| 1727 | — | CAG38157.1 | Archaea | AJ748321.1 | hypothetical protein | Sulfolobus islandicus | |
| 1728 | — | KUO88351.1 | Archaea | LOCC01000062.1 | transposase | Caldivirga sp. CIS 19 | |
| 1729 | — | MCC6005487.1 | Archaea | JAJHRM010000256.1 | transposase | Thermofilum sp. | |
| 1730 | — | MCC6004523.1 | Archaea | JAJHRM010000098.1 | transposase | Thermofilum sp. | |
| 1731 | — | MCC6066005.1 | Archaea | JAJHRU010000318.1 | transposase | Thermofilum sp. | |
| 1732 | — | MCC6026641.1 | Bacteria | JAJHRA010000172.1 | RNA-guided endonuclease | Caldimicrobium sp. | |
| | | | | | TnpB family protein | | |
| 1733 | — | WP_094246128.1 | Bacteria | NZ_CP017703.1 | RNA-guided endonuclease | Aeribacillus | |
| | | | | | TnpB family protein | | |
| 1734 | — | ADL12035.1 | Bacteria | CP002105.1 | transposase, IS605 OrfB family | Acetohalobium arabaticum | |
| | | | | | | DSM 5501 | |
| 1735 | — | MBR4542093.1 | Bacteria | JAFXSJ010000201.1 | transposase | Lachnospiraceae bacterium | |
| 1736 | — | MCR4911435.1 | Bacteria | JAILBR010000035.1 | transposase | Bacilli bacterium | |
| 1737 | — | MCQ2087611.1 | Bacteria | JAKSHZ010000015.1 | transposase | Bacilli bacterium | |
| 1738 | — | RUM58537.1 | Bacteria | QNZC01000026.1 | transposase | Persephonella sp. | |
| 1739 | — | HDN74152.1 | Archaea | DQZY01000240.1 | hypothetical protein | Archaeoglobus sp. | |
| 1740 | — | MCI4409115.1 | Archaea | JAEMPR010000145.1 | transposase | Thermofilum sp. | |
| 1741 | | WP_163328213.1 | Bacteria | NZ_WSXR01000006.1 | IS200/IS605 family accessory | Desulfurobacterium | |
| | | | | | protein TnpB-related protein | thermolithotrophum | |
| 1742 | — | MBD6956205.1 | Archaea | WBYX01000037.1 | IS200/IS605 family element | Thermoplasmatales | |
| | | | | | transposase accessory protein | archaeon | |
| | | | | | TnpB | | |
| 1743 | — | WP_163234167.1 | Bacteria | NZ_CP048617.1 | RNA-guided endonuclease | Caloranaerobacter azorensis | |
| | | | | | TnpB family protein | | |
| 1744 | — | WP_013277750.1 | Bacteria | NC_014378.1 | IS200/IS605 family accessory | Acetohalobium arabaticum | |
| | | | | | protein TnpB-related protein | | |
| 1745 | — | MBQ3423313.1 | Bacteria | JAFRCY010001197.1 | transposase | Romboutsia sp. | |
| 1746 | — | WP_210499675.1 | Bacteria | NZ_JAFNBH010000070.1 | transposase | Vibrio crassostreae | |
| 1747 | — | HHH53097.1 | Bacteria | DRSA01000397.1 | transposase | Bacteroidetes bacterium | |
| 1748 | — | MBP7837043.1 | Bacteria | JAGNHW010000085.1 | transposase | Candidatus Fonsibacter sp. | |
| 1749 | — | PKP59784.1 | Archaea | PHDY01000062.1 | transposase | Candidatus Altiarchaeales | |
| | | | | | | archaeon HGW- | |
| | | | | | | Altiarchaeales-1 | |
| 1750 | — | OSS42850.1 | Bacteria | MDSU01000003.1 | Mobile element protein | Desulfurella amilsii | |
| 1751 | — | MCP4764614.1 | Archaea | JAAERH010001137.1 | IS200/IS605 family element | archaeon | |
| | | | | | transposase accessory protein | | |
| | | | | | TnpB | | |
| 1752 | — | TET29565.1 | Archaea | SOJV01000125.1 | transposase | Candidatus | |
| | | | | | | Heimdallarchaeota | |
| | | | | | | archaeon | |
| 1753 | — | MBR52232.1 | Bacteria | PBVO01000005.1 | hypothetical protein | Candidatus Poribacteria | |
| | | | | | | bacterium | |
| 1754 | — | MCK5523588.1 | Bacteria | JAGLHR010000470.1 | transposase | Thiomargarita sp. | |
| 1755 | — | DAO62736.1 | Viruses | BK037802.1 | endonuclease | Ackermannviridae sp. | |
| 1756 | — | DAQ48412.1 | Viruses | BK057844.1 | transposase | Podoviridae sp. | |
| 1757 | — | KKQ99158.1 | Bacteria | LBWB01000027.1 | hypothetical protein | Candidatus Woesebacteria | |
| | | | | | | bacterium | |
| | | | | | | GW2011_GWB1_39_12 | |
| 1758 | — | KKR00576.1 | Bacteria | LBWB01000011.1 | Transposase, IS605 OrfB family | Candidatus Woesebacteria | |
| | | | | | | bacterium | |
| | | | | | | GW2011_GWB1_39_12 | |
| 1759 | — | WP_181734292.1 | Bacteria | NZ_VDFE01000998.1 | RNA-guided endonuclease | Cylindrospermopsis | |
| | | | | | TnpB family protein | raciborskii | |
| 1760 | — | WP_015193503.1 | Bacteria | NC_019748.1 | RNA-guided endonuclease | Stanieria cyanosphaera | |
| | | | | | TnpB family protein | | |
| 1761 | — | WP_168540409.1 | Bacteria | NZ_VILD01000014.1 | RNA-guided endonuclease | Anabaena sp. UHCC 0253 | |
| | | | | | TnpB family protein | | |
| 1762 | — | MCC5616237.1 | Bacteria | JAIVFV010000060.1 | transposase | Nostoc sp. CHAB 5836 | |
| 1763 | — | DAT13562.1 | Viruses | BK043022.1 | endonuclease | Herelleviridae sp. | |
| 1764 | — | MBR0080766.1 | Bacteria | JAFSKE010000120.1 | transposase | Synergistaceae bacterium | |
| 1765 | — | GJM57158.1 | Bacteria | BQKD01000001.1 | transposase | Erysipelotrichaceae | |
| | | | | | | bacterium OPF54 | |
| 1766 | — | WP_078255993.1 | Bacteria | NZ_MUXT01000006.1 | RNA-guided endonuclease | Moraxella canis | |
| | | | | | TnpB family protein | | |
| 1767 | — | DAS89406.1 | Viruses | BK042526.1 | endonuclease | Bacteriophage sp. | |
| 1768 | — | DAQ67775.1 | Viruses | BK058232.1 | endonuclease | Ackermannviridae sp. | |
| 1769 | — | DAS44797.1 | Viruses | BK034882.1 | endonuclease | Myoviridae sp. | |
| 1770 | — | MBO5827387.1 | Bacteria | JAGBVI010000001.1 | transposase | Paludibacteraceae | |
| | | | | | | bacterium | |
| 1771 | — | MCF8002569.1 | Bacteria | JAIPEX010000151.1 | transposase | Halanaerobiales bacterium | |
| 1772 | — | WP_040471257.1 | Bacteria | NZ_AQFT02000004.1 | RNA-guided endonuclease | Eubacterium plexicaudatum | |
| | | | | | TnpB family protein | | |
| 1773 | — | WP_164787048.1 | Bacteria | NZ_JAALMI010000003.1 | RNA-guided endonuclease | Clostridium perfringens | |
| | | | | | TnpB family protein | | |
| 1774 | — | MBR2909336.1 | Bacteria | JAFVWN010000035.1 | transposase | Clostridia bacterium | |
| 1775 | — | WP_012576221.1 | Bacteria | NC_011567.1 | RNA-guided endonuclease | Anoxybacillus flavithermus | |
| | | | | | TnpB family protein | | |
| 1776 | — | MCL2014860.1 | Bacteria | WRKK01000073.1 | transposase | Defluviitaleaceae bacterium | |
| 1777 | — | WP_103868551.1 | Bacteria | NZ_FNUR01000003.1 | RNA-guided endonuclease | Butyrivibrio sp. Su6 | |
| | | | | | TnpB family protein | | |
| 1778 | — | MBR3165562.1 | Bacteria | JAFWIG010000277.1 | transposase | Lachnospiraceae bacterium | |
| 1779 | — | WP_238135051.1 | Bacteria | NA | NA | | |
| 1780 | — | WP_172800881.1 | Bacteria | NZ_KV440951.1 | RNA-guided endonuclease | Neobacillus novalis | |
| | | | | | TnpB family protein | | |
| 1781 | — | WP_127759918.1 | Bacteria | NZ_CP026095.1 | RNA-guided endonuclease | Peribacillus asahii | |
| | | | | | TnpB family protein | | |
| 1782 | — | MBO5435074.1 | Bacteria | JAGAJW010000167.1 | transposase | bacterium | |
| 1783 | — | PWJ71250.1 | Bacteria | QGFZ01000001.1 | putative transposase | Ruminococcaceae | |
| | | | | | | bacterium R-25 | |
| 1784 | — | MVU82232.1 | Bacteria | WRPP01000008.1 | IS200/IS605 family element | Nocardia terrae | |
| | | | | | transposase accessory protein | | |
| | | | | | TnpB | | |
| 1785 | — | QDJ97570.1 | Viruses | MN091625.1 | hypothetical protein | Staphylococcus phage | |
| | | | | | | PALS 1 | |
| 1786 | — | WP_052543000.1 | Bacteria | NZ_CDLD01000018.1 | RNA-guided endonuclease | Lactobacillus | |
| | | | | | TnpB family protein | | |
| 1787 | — | PEG97387.1 | Bacteria | PCZA01000003.1 | transposase | Lactobacillus sp. | |
| | | | | | | UMNPBX9 | |
| 1788 | — | DAK27921.1 | Viruses | BK035860.1 | endonuclease | Siphoviridae sp. | |
| 1789 | — | RDK02588.1 | Bacteria | QKWJ01000136.1 | hypothetical protein | Cupriavidus lacunae | |
| 1790 | — | MBN1216961.1 | Archaea | JAFGOA010000217.1 | transposase | Candidatus Lokiarchaeota | |
| | | | | | | archaeon | |
| 1791 | — | NVM01137.1 | Archaea | JABXJV010000056.1 | IS200/IS605 family element | Candidatus Helarchaeota | |
| | | | | | transposase accessory protein | archaeon | |
| | | | | | TnpB | | |
| 1792 | — | MBN1217058.1 | Archaea | JAFGOA010000223.1 | transposase | Candidatus Lokiarchaeota | |
| | | | | | | archaeon | |
| 1793 | — | RJS71441.1 | Archaea | PIXU01000175.1 | transposase | Methanophagales archaeon | |
| 1794 | — | KQB36493.1 | Archaea | LKBH01000026.1 | transposase | Acidiplasma cupricumulans | |
| 1795 | — | MCC7568106.1 | Archaea | JAHKLV010000018.1 | transposase | Candidatus | |
| | | | | | | Methanofastidiosa archaeon | |
| 1796 | — | MCK4771115.1 | Archaea | JAGLTB010000221.1 | transposase | Candidatus | |
| | | | | | | Heimdallarchaeota | |
| | | | | | | archaeon | |
| 1797 | — | MCE7746782.1 | Archaea | JAAFKI010000002.1 | IS200/IS605 family element | Candidatus | |
| | | | | | transposase accessory protein | Heimdallarchaeota | |
| | | | | | TnpB | archaeon | |
| 1798 | — | QYH11233.1 | Bacteria | CP059375.1 | IS200/IS605 family element | Campylobacter jejuni | |
| | | | | | transposase accessory protein | | |
| | | | | | TnpB | | |
| 1799 | — | MCP4351793.1 | Bacteria | JAAEOO010001969.1 | IS200/IS605 family element | Desulfobacterales | |
| | | | | | transposase accessory protein | bacterium | |
| | | | | | TnpB | | |
| 1800 | — | MBP8762312.1 | Bacteria | JAGPJE010000001.1 | transposase | Acetoanaerobium sp. | |
| 1801 | — | MBP3608513.1 | Bacteria | JAGBBT010000110.1 | transposase | Treponema sp. | |
| 1802 | — | MBM4224604.1 | Bacteria | VGUD01000377.1 | IS200/IS605 family element | Gammaproteobacteria | |
| | | | | | transposase accessory protein | bacterium | |
| | | | | | TnpB | | |
| 1803 | — | DAG15207.1 | Viruses | BK017539.1 | endonuclease | Siphoviridae sp. | |
| 1804 | — | WP_228115044.1 | Bacteria | NZ_VZCZ01000057.1 | RNA-guided endonuclease | Prevotella copri | |
| | | | | | TnpB family protein | | |
| 1805 | — | WP_161625433.1 | Bacteria | NZ_AFNU02000005.1 | RNA-guided endonuclease | Haloplasma contractile | |
| | | | | | TnpB family protein | | |
| 1806 | — | MCR4553863.1 | Bacteria | JAIKXT010000048.1 | transposase | Succinivibrionaceae | |
| | | | | | | bacterium | |
| 1807 | — | AKO78074.1 | Bacteria | CP007655.1 | hypothetical protein | Vibrio cholerae | |
| 1808 | — | ANU66112.2 | Bacteria | CP015403.2 | hypothetical protein | Burkholderiales bacterium | |
| | | | | | | YL45 | |
| 1809 | — | QQQ96110.1 | Bacteria | CP065313.1 | transposase | Turicimonas muris | |
| 1810 | — | QSR36003.1 | Bacteria | CP022297.1 | transposase | Marinobacterium | |
| | | | | | | georgiense | |
| 1811 | — | NEO93522.1 | Bacteria | JAAHHQ010000671.1 | IS200/IS605 family element | Moorena sp. SIO3G5 | |
| | | | | | transposase accessory protein | | |
| | | | | | TnpB | | |
| 1812 | — | WP_247139870.1 | Archaea | NZ_CP095400.1 | transposase | Methanonatronarchaeum | |
| | | | | | | sp. AMET6-2 | |
| 1813 | — | AFC98908.1 | Archaea | CP003243.1 | transposase, IS605 OrfB family, | Methanocella conradii | |
| | | | | | central region | HZ254 | |
| 1814 | — | HIX83338.1 | Bacteria | DXER01000024.1 | transposase | Candidatus Megamonas | |
| | | | | | | gallistercoris | |
| 1815 | — | WP_015756458.1 | Bacteria | NC_013216.1 | RNA-guided endonuclease | Desulfofarcimen | |
| | | | | | TnpB family protein | acetoxidans | |
| 1816 | — | AUD66028.1 | Bacteria | CP017950.1 | hypothetical protein | Tenericutes bacterium MZ- | |
| | | | | | | XQ | |
| 1817 | — | WP_229771508.1 | Bacteria | NZ_VUMQ01000003.1 | transposase | Fusobacterium sp. FSA- | |
| | | | | | | 380-WT-2B | |
| 1818 | — | WP_127083351.1 | Bacteria | NZ_RSCL01000013.1 | RNA-guided endonuclease | Dulcicalothrix desertica | |
| | | | | | TnpB family protein | | |
| 1819 | — | NEO90536.1 | Bacteria | JAAHHQ010000148.1 | IS200/IS605 family element | Moorena sp. SIO3G5 | |
| | | | | | transposase accessory protein | | |
| | | | | | TnpB | | |
| 1820 | — | NER30623.1 | Bacteria | JAAHFQ010000603.1 | IS200/IS605 family element | Symploca sp. SIO1C4 | |
| | | | | | transposase accessory protein | | |
| | | | | | TnpB | | |
| 1821 | — | MBR0471841.1 | Archaea | JAFRKG010000066.1 | transposase | Methanosphaera sp. | |
| 1822 | — | WP_119016007.1 | Bacteria | NZ_QXEV01000006.1 | RNA-guided endonuclease | Anaeroplasma | |
| | | | | | TnpB family protein | bactoclasticum | |
| 1823 | — | HBG55947.1 | Bacteria | DNRZ01000079.1 | hypothetical protein | Oscillospiraceae bacterium | |
| 1824 | — | WP_204665280.1 | Bacteria | NZ_JAFBDT010000033.1 | RNA-guided endonuclease | Fusibacter tunisiensis | |
| | | | | | TnpB family protein | | |
| 1825 | — | EDN66982.1 | Bacteria | ABBZ01001672.1 | Transposase, IS605 OrfB | Beggiatoa sp. PS | |
| 1826 | — | WP_207687733.1 | Bacteria | NZ_CP061799.1 | RNA-guided endonuclease | Desulfonema limicola | |
| | | | | | TnpB family protein | | |
| 1827 | — | NRA68822.1 | Bacteria | JABSRP010000073.1 | IS200/IS605 family element | Pseudobacteriovorax sp. | |
| | | | | | transposase accessory protein | | |
| | | | | | TnpB | | |
| 1828 | — | MCK4259284.1 | Bacteria | JAGMES010000065.1 | transposase | Halanaerobiales bacterium | |
| 1829 | — | AGK62080.1 | Archaea | CP005290.1 | transposase, IS605 OrfB family, | Archaeoglobus | |
| | | | | | central region | sulfaticallidus PM70-1 | |
| 1830 | — | HIE58791.1 | Bacteria | DTZN01000087.1 | transposase | Hydrogenothermaceae | |
| | | | | | | bacterium | |
| 1831 | — | MBQ8379418.1 | Bacteria | JAFTNP010000008.1 | transposase | Clostridia bacterium | |
| 1832 | — | MBS3812164.1 | Bacteria | JAGXLU010000085.1 | transposase | Halanaerobiales bacterium | |
| 1833 | — | WP_026074469.1 | Bacteria | NZ_CABMGL010000063. | transposase | Brevibacillus massiliensis | |
| | | | | — | | | |
| 1834 | — | ADC68712.1 | Archaea | CP001901.1 | transposase, IS605 OrfB family | Methanocaldococcus sp. | |
| | | | | | | FS406-22 | |
| 1835 | — | HEW91077.1 | Bacteria | DQYP01000031.1 | transposase | Thermotogaceae bacterium | |
| 1836 | — | MCE7734347.1 | Archaea | JAAFKL010000116.1 | IS200/IS605 family element | Candidatus | |
| | | | | | transposase accessory protein | Heimdallarchaeota | |
| | | | | | TnpB | archaeon | |
| 1837 | — | MBU2639897.1 | Archaea | JAHJRB010000079.1 | transposase | Nanoarchaeota archaeon | |
| 1838 | — | MBI4399590.1 | Archaea | JACQQB010000077.1 | IS200/IS605 family element | Candidatus Micrarchaeota | |
| | | | | | transposase accessory protein | archaeon | |
| | | | | | TnpB | | |
| 1839 | — | EET90217.1 | Archaea | GG697240.1 | transposase, IS605 OrfB family | Candidatus Micrarchaeum | |
| | | | | | | acidiphilum ARMAN-2 | |
| 1840 | — | WP_084213537.1 | Bacteria | NZ_KI783301.1 | RNA-guided endonuclease | Thermicanus aegyptius | |
| | | | | | TnpB family protein | | |
| 1841 | — | MCG2794853.1 | Bacteria | JAKLPO010000100.1 | transposase | Actinomycetia bacterium | |
| 1842 | — | MBK8188978.1 | Bacteria | JADJRF010000001.1 | transposase | Vampirovibrionales | |
| | | | | | | bacterium | |
| 1843 | — | HEC34629.1 | Bacteria | DRIJ01000358.1 | transposase | Chloroflexi bacterium | |
| 1844 | — | KXB00482.1 | Archaea | LHXW01000003.1 | hypothetical protein | candidate division MSBL1 | |
| | | | | | | archaeon SCGC- | |
| | | | | | | AAA261C02 | |
| 1845 | — | WP_256545676.1 | Archaea | NZ_CP101825.1 | transposase | Halobellus ramosii | |
| 1846 | — | ELY79733.1 | Archaea | AOII01000038.1 | transposase | Natrinema pallidum DSM | |
| | | | | | | 3751 | |
| 1847 | — | RYJ08712.1 | Archaea | RZHH01000003.1 | transposase | Halogeometricum | |
| | | | | | | borinquense | |
| 1848 | — | WP_241432683.1 | Archaea | NZ_AOLS01000127.1 | transposase | Haloarcula californiae | |
| 1849 | — | WP_049889106.1 | Archaea | NZ_AOHZ01000017.1 | transposase | Natronolimnohabitans | |
| | | | | | | innermongolicus | |
| 1850 | — | MCH8291571.1 | Bacteria | JADFGN010000091.1 | transposase | Candidatus Poribacteria | |
| | | | | | | bacterium | |
| 1851 | — | MXZ08144.1 | Bacteria | VXSR01000012.1 | IS200/IS605 family element | Gemmatimonadetes | |
| | | | | | transposase accessory protein | bacterium | |
| | | | | | TnpB | | |
| 1852 | — | WP_172958085.1 | Bacteria | NZ_PEMH01000348.1 | RNA-guided endonuclease | Thermus scotoductus | |
| | | | | | TnpB family protein | | |
| 1853 | — | RTH23997.1 | Bacteria | PELW01000268.1 | transposase | Thermus scotoductus | |
| 1854 | — | RLG34559.1 | Archaea | QMVO01000025.1 | hypothetical protein | Methanosarcinales | |
| | | | | | | archaeon | |
| 1855 | — | KPQ41358.1 | Archaea | LKCM01000368.1 | transposase | Candidatus | |
| | | | | | | Methanoperedens sp. BLZ1 | |
| 1856 | — | MCG2826778.1 | Archaea | JAKLSE010000535.1 | transposase | Thermoplasmatales | |
| | | | | | | archaeon | |
| 1857 | — | NCU27156.1 | Bacteria | SACB01000583.1 | transposase | Candidatus Nomurabacteria | |
| | | | | | | bacterium | |
| 1858 | — | MBS3988055.1 | Bacteria | JAGXRW010000190.1 | transposase | Erysipelothrix sp. | |
| 1859 | — | NLA78387.1 | Bacteria | JAAZGU010000076.1 | IS200/IS605 family element | Erysipelothrix sp. | |
| | | | | | transposase accessory protein | | |
| | | | | | TnpB | | |
| 1860 | — | PKM65080.1 | Bacteria | PGZW01000115.1 | hypothetical protein | Firmicutes bacterium | |
| | | | | | | HGW-Firmicutes-19 | |
| 1861 | — | WP_006060920.1 | Bacteria | NZ_GG657562.1 | RNA-guided endonuclease | Holdemania filiformis | |
| | | | | | TnpB family protein | | |
| 1862 | — | RGB48815.1 | Bacteria | QVFG01000030.1 | transposase | Absiella sp. AM22-9 | |
| 1863 | — | MCR0205254.1 | Bacteria | JAKTMI010000009.1 | RNA-guided endonuclease | | |
| | | | | | TnpB family protein | | |
| 1864 | — | MCI8271179.1 | Bacteria | JAAVXP010000012.1 | IS200/IS605 family element | Erysipelotrichaceae | |
| | | | | | transposase accessory protein | bacterium | |
| | | | | | TnpB | | |
| 1865 | — | WP_132224829.1 | Bacteria | NZ_JANKBG010000010.1 | RNA-guided endonuclease | Longicatena caecimuris | |
| | | | | | TnpB family protein | | |
| 1866 | — | OKH21730.1 | Bacteria | MRCB01000018.1 | DEAD/DEAH box helicase | Hydrococcus rivularis | |
| | | | | | | NIES-593 | |
| 1867 | — | MCG3151521.1 | Bacteria | JAJVIF010000001.1 | hypothetical protein | bacterium | |
| 1868 | — | MBI4560256.1 | Bacteria | JACQVH010000296.1 | transposase | Candidatus | |
| | | | | | | Hydrogenedentes bacterium | |
| 1869 | — | HED53515.1 | Bacteria | DRKT01000110.1 | hypothetical protein | Phycisphaerales bacterium | |
| 1870 | — | MCE7971885.1 | Bacteria | QWIG01000014.1 | hypothetical protein | Leptolyngbya sp. PL-A2 | |
| 1871 | — | MBN1809377.1 | Bacteria | JAFGGJ010000065.1 | transposase | Planctomycetes bacterium | |
| 1872 | — | MBI3581305.1 | Bacteria | JACQBU010000052.1 | transposase | Nitrospinae bacterium | |
| 1873 | — | 6XMF A | Bacteria | N/A | | Lachnospiraceae bacterium | |
| | | | | | | ND2006 | |
| 1874 | — | MYH03881.1 | Archaea | VYCS01000017.1 | IS200/IS605 family element | Cenarchaeum sp. | |
| | | | | | transposase accessory protein | SB0675_bin_21 | |
| | | | | | TnpB | | |
| 1875 | — | MXX20744.1 | Archaea | VXVG01000092.1 | transposase | Cenarchaeum sp. | |
| | | | | | | SB0667_bin_13 | |
| 1876 | — | MYB30744.1 | Archaea | VXQI01000141.1 | transposase | Cenarchaeum sp. | |
| | | | | | | SB0663_bin_5 | |
| 1877 | — | MYB29457.1 | Archaea | VXQI01000003.1 | IS200/IS605 family element | Cenarchaeum sp. | |
| | | | | | transposase accessory protein | SB0663_bin_5 | |
| | | | | | TnpB | | |
| 1878 | — | WP_160418682.1 | Bacteria | NZ_WTKP01000005.1 | zinc ribbon domain-containing | Halomonas zhuhanensis | |
| | | | | | protein | | |
| 1879 | — | OOR85426.1 | Bacteria | MUXT01000001.1 | hypothetical protein | Moraxella canis | |
| 1880 | — | MCK9369992.1 | Bacteria | JALNYV010000009.1 | transposase | Candidatus Dojkabacteria | |
| | | | | | | bacterium | |
| 1881 | — | OYT29918.1 | Archaea | NJDJ01000010.1 | hypothetical protein | Thermofilum sp. | |
| | | | | | | ex4484_82 | |
| 1882 | — | NHV05812.1 | Archaea | JAAOZO010000023.1 | transposase | Thaumarchaeota archaeon | |
| 1883 | — | EME83742.1 | Eukaryota | KB446557.1 | hypothetical protein | Pseudocercospora fijiensis | |
| | | | | | | CIRAD86 | |
| 1884 | — | KAI3633648.1 | Eukaryota | JALDTO010000213.1 | hypothetical protein | Amoeboaphelidium | |
| | | | | | | protococcarum | |
| 1885 | — | WP_078543108.1 | Bacteria | NZ_KV917374.1 | hypothetical protein | Litchfieldia alkalitelluris | |
| 1886 | — | KEI16570.1 | Bacteria | JENW01000055.1 | transposase | Clostridium novyi B str. | |
| | | | | | | ATCC 27606 | |
| 1887 | — | MBZ9686738.1 | Bacteria | JAAMNH020000001.1 | transposase | Clostridium estertheticum | |
| 1888 | — | WP_249028943.1 | Bacteria | NZ_CP088239.1 | transposase | Tannockella kyphosi | |
| 1889 | — | MBR4295549.1 | Bacteria | JAFYLR010000021.1 | transposase | Clostridia bacterium | |
| 1890 | — | MCI7006726.1 | Bacteria | JALFJO010000024.1 | transposase | Clostridium sp. | |
| 1891 | — | WP_256243794.1 | Bacteria | NZ_JAETXM010000063.1 | hypothetical protein | Bacillus sp. V3B | |
| 1892 | — | MBQ3422344.1 | Bacteria | JAFRCY010000841.1 | transposase | Romboutsia sp. | |
| 1893 | — | WP_145930271.1 | Bacteria | NZ_VEMC01000050.1 | transposase | Siminovitchia fortis | |
| 1894 | — | WP_055258817.1 | Bacteria | NZ_CYXT01000014.1 | hypothetical protein | Anaerostipes hadrus | |
| 1895 | — | MCH4266229.1 | Bacteria | JAKVIX010000035.1 | transposase | Solobacterium sp. | |
| 1896 | — | GJM56436.1 | Bacteria | BQKD01000001.1 | hypothetical protein | Erysipelotrichaceae | |
| | | | | | | bacterium OPF54 | |
| 1897 | — | EEC90969.1 | Bacteria | ABYT01000030.1 | hypothetical protein | Holdemanella biformis | |
| | | | | | | DSM 3989 | |
| 1898 | — | MBQ8052689.1 | Bacteria | JAFUFL010000013.1 | hypothetical protein | Lachnospiraceae bacterium | |
| 1899 | — | MCD7839457.1 | Bacteria | JAJQGE010000093.1 | hypothetical protein | Erysipelotrichaceae | |
| | | | | | | bacterium | |
| 1900 | — | WP_055258845.1 | Bacteria | NZ_CYXT01000014.1 | hypothetical protein | Anaerostipes hadrus | |
| 1901 | — | RHO64566.1 | Bacteria | QUDH01000017.1 | hypothetical protein | Clostridium sp. AF50-3 | |
| 1902 | — | MCI6695881.1 | Bacteria | JALETW010000004.1 | transposase | Solobacterium sp. | |
| 1903 | — | WP_087243489.1 | Bacteria | NZ_NFLD01000005.1 | hypothetical protein | Massilimicrobiota sp. | |
| | | | | | | An142 | |
| 1904 | — | MCH4887106.1 | Bacteria | VANV01000004.1 | transposase | Acidaminobacter sp. JC074 | |
| 1905 | — | WP_243153720.1 | Bacteria | NZ_WWVI01000034.1 | hypothetical protein | Blautia wexlerae | |
| 1906 | — | MBO4483195.1 | Bacteria | JAFZZP010000094.1 | hypothetical protein | Prevotella sp. | |
| 1907 | — | DAV36676.1 | Viruses | BK028308.1 | endonuclease | Siphoviridae sp. | |
| 1908 | — | WP_074008780.1 | Bacteria | NZ_LT635857.1 | hypothetical protein | Duodenibacillus | |
| | | | | | | massiliensis | |
| 1909 | — | MBC5853022.1 | Bacteria | JACRUP010000023.1 | hypothetical protein | Vibrio metschnikovii | |
| 1910 | — | HIB48403.1 | Bacteria | DTTW01000009.1 | hypothetical protein | Flavobacteriaceae | |
| | | | | | | bacterium | |
| 1911 | — | MBA3503143.1 | Bacteria | JACCSB010001268.1 | hypothetical protein | Deltaproteobacteria | |
| | | | | | | bacterium | |
| 1912 | — | WP_255471796.1 | Bacteria | NZ_JAPDPG010000005.1 | transposase | Micromonospora sp. MP36 | |
| 1913 | — | MCL1800278.1 | Bacteria | WRIT01000042.1 | transposase | Promicromonosporaceae | |
| | | | | | | bacterium | |
| 1914 | — | WP_065168440.1 | Bacteria | NZ_LZEZ01000032.1 | zinc ribbon domain-containing | Photobacterium aquimaris | |
| | | | | | protein | | |
| 1915 | — | WP_147094856.1 | Bacteria | NZ_BCUR01000001.1 | hypothetical protein | Vibrio superstes | |
| 1916 | — | TMG45298.1 | Bacteria | VBDX01000146.1 | transposase | Chloroflexi bacterium | |
| 1917 | — | QZA32605.1 | Bacteria | CP080953.1 | transposase | Hydrogenibacillus sp. N12 | |
| 1918 | — | NJP34368.1 | Bacteria | JAATEO010000024.1 | transposase | Micromonospora sp. HSS6- | |
| | | | | | | 12 | |
| 1919 | — | WP_225332566.1 | Bacteria | NZ_JACSGY010000073.1 | zinc ribbon domain-containing | Mycobacterium avium | |
| | | | | | protein | | |
| 1920 | — | MCL4445320.1 | Bacteria | JAMCPR010000004.1 | transposase | Actinobacteria bacterium | |
| 1921 | — | WP_077357598.1 | Bacteria | NZ_FUHR01000006.1 | zinc ribbon domain-containing | Virgibacillus | |
| | | | | | protein | halodenitrificans | |
| 1922 | — | GHO73940.1 | Bacteria | BNJI01000001.1 | hypothetical protein | Ktedonobacter sp. SOSP1- | |
| | | | | | | 85 | |
| 1923 | — | MBD3560936.1 | Bacteria | JACJUP010000498.1 | transposase | Planktothrix sp. FACHB- | |
| | | | | | | 1355 | |
| 1924 | — | MCJ8282996.1 | Bacteria | JALJPP010002175.1 | transposase | Rivularia sp. | |
| | | | | | | ALOHA DT 140 | |
| 1925 | — | MBT6120215.1 | Bacteria | JABIQV010000030.1 | transposase | bacterium | |
| 1926 | — | MBC8449618.1 | Bacteria | JACNHM010000478.1 | transposase | Chloroflexi bacterium | |
| 1927 | — | NQY42217.1 | Bacteria | JABSQI010000034.1 | transposase | Legionellales bacterium | |
| 1928 | — | PNX45778.1 | Archaea | MUGB01000411.1 | hypothetical protein | Thermoplasmata archaeon | |
| | | | | | | M8B2D | |
| 1929 | — | WP_241162084.1 | Bacteria | NZ_JAEQBF010000002.1 | transposase | Acidithiobacillus sp. | |
| | | | | | | MC6.1 | |
| 1930 | — | MBI4751003.1 | Bacteria | JACQXX010000104.1 | transposase | Acidobacteria bacterium | |
| 1931 | — | RYZ90985.1 | Bacteria | SEDT01000021.1 | hypothetical protein | Proteobacteria bacterium | |
| 1932 | — | WP_141735829.1 | Bacteria | NZ_BDFO01000001.1 | hypothetical protein | Oligoflexus tunisiensis | |
| 1933 | — | MBP2030830.1 | Archaea | JAGGLK010000003.1 | exosome complex component | Methanohalophilus | |
| | | | | | CSL4 | levihalophilus | |
| 1934 | — | AFH43088.1 | Archaea | CP003423.1 | exosome complex RNA-binding | Fervidicoccus fontis | |
| | | | | | protein Csl4 | Kam940 | |
| 1935 | — | KAI3631871.1 | Eukaryota | JALDTO010000246.1 | hypothetical protein | Amoeboaphelidium | |
| | | | | | | protococcarum | |
| 1936 | — | KAI3633483.1 | Eukaryota | JALDTO010000213.1 | hypothetical protein | Amoeboaphelidium | |
| | | | | | | protococcarum | |
| 1937 | — | PKQ16747.1 | Bacteria | PHET01000004.1 | hypothetical protein | Actinobacteria bacterium | |
| | | | | | | HGW-Actinobacteria-7 | |
| 1938 | — | XP_042045243.1 | Eukaryota | NC_056033.1 | uncharacterized protein | Salvia splendens | |
| | | | | | LOC121791305 | | |
| 1939 | — | RLE78354.1 | Archaea | QMRP01000258.1 | hypothetical protein | Thermoprotei archaeon | |
| 1940 | — | MCC6059973.1 | Archaea | JAJHRR010000002.1 | zinc ribbon domain-containing | Desulfurococcaceae | |
| | | | | | protein | archaeon | |
| 1941 | — | WP_013603425.1 | Archaea | NC_015151.1 | zinc ribbon domain-containing | Vulcanisaeta moutnovskia | |
| | | | | | protein | | |
| 1942 | — | WP_081227679.1 | Archaea | NZ_LCWN02000060.1 | zinc ribbon domain-containing | Vulcanisaeta sp. EB80 | |
| | | | | | protein | | |
| 1943 | — | MCC6021378.1 | Archaea | JAJHRB010000096.1 | transposase | Thermoproteaceae archaeon | |
| 1944 | — | ABL88496.1 | Archaea | CP000504.1 | transposase, IS605 OrfB family | Pyrobaculum islandicum | |
| | | | | | | DSM 4184 | |
| 1945 | — | PLJ78656.1 | Archaea | NDWX01000001.1 | hypothetical protein | Thermofilum sp. NZ13 | |
| 1946 | — | NPA70891.1 | Archaea | JAADDN010000173.1 | transposase | Crenarchaeota archaeon | |
| 1947 | — | PLJ76965.1 | Archaea | NDWX01000016.1 | hypothetical protein | Thermofilum sp. NZ13 | |
| 1948 | — | WP_191118519.1 | Archaea | NZ_CP009961.1 | zinc ribbon domain-containing | Infirmifilum uzonense | |
| | | | | | protein | | |
| 1949 | — | MCC6051507.1 | Archaea | JAJHQP010000481.1 | transposase | Thermofilum sp. | |
| 1950 | — | MCC6049416.1 | Archaea | JAJHQP010000028.1 | transposase | Thermofilum sp. | |
| 1951 | — | MCF3653840.1 | Archaea | JAJPCT020000025.1 | transposase | Aigarchaeota archaeon | |
| 1952 | — | HIU63623.1 | Bacteria | DVNI01000017.1 | transposase | Candidatus | |
| | | | | | | Avacidaminococcus | |
| | | | | | | intestinavium | |
| 1953 | — | WP_163615378.1 | Bacteria | NZ_SCEZ01000006.1 | RNA-guided endonuclease | Fructilactobacillus | |
| | | | | | TnpB family protein | sanfranciscensis | |
| 1954 | — | SJX67953.1 | Bacteria | FUWE01000018.1 | hypothetical protein | Weissella confusa | |
| 1955 | — | WP_231529909.1 | Bacteria | NZ_JAJNUW010000022.1 | RNA-guided endonuclease | Lactobacillus delbrueckii | |
| | | | | | TnpB family protein | | |
| 1956 | — | HJG05863.1 | Bacteria | DYVI01000027.1 | transposase | Ligilactobacillus agilis | |
| 1957 | — | MCI2032741.1 | Bacteria | JALCRA010000012.1 | zinc ribbon domain-containing | Lactobacillus sp. | |
| | | | | | protein | | |
| 1958 | — | MBD3230160.1 | Archaea | WJJF01000549.1 | IS200/IS605 family element | Candidatus Lokiarchaeota | |
| | | | | | transposase accessory protein | archaeon | |
| | | | | | TnpB | | |
| 1959 | — | MCK4253157.1 | Archaea | JAGMEJ010000117.1 | hypothetical protein | Candidatus | |
| | | | | | | Heimdallarchaeota | |
| | | | | | | archaeon | |
| 1960 | — | OLS33119.1 | Archaea | MEHH01000006.1 | hypothetical protein | Candidatus | |
| | | | | | | Heimdallarchaeota | |
| | | | | | | archaeon AB_125 | |
| 1961 | — | WP_258561268.1 | Bacteria | NZ_VDFE01000177.1 | zinc ribbon domain-containing | Cylindrospermopsis | |
| | | | | | protein | raciborskii | |
| 1962 | — | CAB1104744.1 | Eukaryota | CACKRE030001212.1 | unnamed protein product | Ectocarpus sp. CCAP | |
| | | | | | | 1310/34 | |
| 1963 | — | WP_256379406.1 | Bacteria | NZ_CP030118.1 | transposase | Brasilonema sennae | |
| 1964 | — | WP_138783388.1 | Archaea | NZ_SMZK01000007.1 | aminotransferase class V-fold | Haloterrigena sp. H1 | |
| | | | | | PLP-dependent enzyme | | |
| 1965 | — | TXK21954.1 | Bacteria | VRUA01000033.1 | transposase | Ottowia sp. GY511 | |
| 1966 | — | WP_018234394.1 | Bacteria | NZ_KB900537.1 | zinc ribbon domain-containing | Thioalkalivibrio | |
| | | | | | protein | thiocyanodenitrificans | |
| 1967 | — | WP_165989253.1 | Bacteria | NZ_CP049160.1 | zinc ribbon domain-containing | Caballeronia sp. SBC1 | |
| | | | | | protein | | |
| 1968 | — | NEX63437.1 | Bacteria | JAAIVB010000069.1 | transposase | Noviherbaspirillum galbum | |
| 1969 | — | MBL6782343.1 | Bacteria | JADHOM010000008.1 | transposase | Alphaproteobacteria | |
| | | | | | | bacterium | |
| 1970 | — | MBQ65357.1 | Bacteria | PBSX01000003.1 | hypothetical protein | Marinovum sp. | |
| 1971 | — | MBI4468182.1 | Bacteria | JACQTD010000045.1 | transposase | Acidobacteria bacterium | |
| 1972 | — | NOZ67979.1 | Bacteria | JAADFS010000028.1 | transposase | Deferribacteres bacterium | |
| 1973 | — | MCL6480551.1 | Bacteria | JAIMBE010000014.1 | transposase | Firmicutes bacterium | |
| 1974 | — | PZN20932.1 | Bacteria | QGUH01000670.1 | hypothetical protein | Proteobacteria bacterium | |
| 1975 | — | NJN63730.1 | Bacteria | JAAUSW010000027.1 | transposase | Acidobacteria bacterium | |
| 1976 | — | MCC7537877.1 | Bacteria | JADZFZ010000476.1 | transposase | Deltaproteobacteria | |
| | | | | | | bacterium | |
| 1977 | — | MCL2723382.1 | Bacteria | WQYX01000007.1 | transposase | Polyangiaceae bacterium | |
| 1978 | — | TXH51828.1 | Bacteria | SSEM01000272.1 | hypothetical protein | Desulfurellales bacterium | |
| 1979 | — | MCI0525614.1 | Bacteria | JAKEGE010000461.1 | transposase | Acidobacteria bacterium | |
| 1980 | — | MBK7823159.1 | Bacteria | JADJNP010000009.1 | transposase | Tessaracoccus sp. | |
| 1981 | — | ADH65437.1 | Bacteria | CP002044.1 | transposase IS605 OrfB | Meiothermus silvanus DSM | |
| | | | | | | 9946 | |
| 1982 | — | PZM90038.1 | Bacteria | QGUG01000600.1 | transposase | Actinobacteria bacterium | |
| 1983 | — | WP_170157671.1 | Bacteria | NZ_RKRE01000001.1 | zinc ribbon domain-containing | Thermodesulfitimonas | |
| | | | | | protein | autotrophica | |
| 1984 | — | QNB45423.1 | Bacteria | CP045798.1 | transposase | Thermanaerosceptrum | |
| | | | | | | fracticalcis | |
| 1985 | — | MBT9147095.1 | Bacteria | QLUG01000077.1 | hypothetical protein | Syntrophomonadaceae | |
| | | | | | | bacterium | |
| 1986 | — | MTI82326.1 | Bacteria | VENG01000001.1 | transposase | Firmicutes bacterium | |
| 1987 | — | MBS6482620.1 | Bacteria | JAHAAF010000008.1 | transposase | Veillonella sp. | |
| 1988 | — | MCK9172294.1 | Bacteria | JALNVQ010000030.1 | zinc ribbon domain-containing | Desulfuromonas thiophila | |
| | | | | | protein | | |
| 1989 | — | WP_092118774.1 | Bacteria | NZ_FMXO01000006.1 | zinc ribbon domain-containing | Desulfonatronum | |
| | | | | | protein | thiosulfatophilum | |
| 1990 | — | ATG92530.1 | Bacteria | CP023670.1 | hypothetical protein | Methylomonas koyamae | |
| 1991 | — | MCL4485043.1 | Bacteria | JAMCPW010000006.1 | zinc ribbon domain-containing | Nitrospirae bacterium | |
| | | | | | protein | | |
| 1992 | — | MCI0563852.1 | Archaea | JALAHR010002331.1 | transposase | Nitrososphaera sp. | |
| 1993 | — | WP_011733919.1 | Bacteria | NC_008607.1 | zinc ribbon domain-containing | Pelobacter propionicus | |
| | | | | | protein | | |
| 1994 | — | RLB65745.1 | Bacteria | QMMG01000217.1 | transposase | Deltaproteobacteria | |
| | | | | | | bacterium | |
| 1995 | — | WP_147914623.1 | Bacteria | NZ_VRUA01000022.1 | zinc ribbon domain-containing | Ottowia sp. GY511 | |
| | | | | | protein | | |
| 1996 | — | MCI0558276.1 | Archaea | JALAHR010000445.1 | transposase | Nitrososphaera sp. | |
| 1997 | — | WP_157353943.1 | Bacteria | NZ_KB899504.1 | hypothetical protein | Aromatoleum toluclasticum | |
| 1998 | — | WP_155270481.1 | Bacteria | NZ_JMEB01000165.1 | zinc ribbon domain-containing | Acidithiobacillus | |
| | | | | | protein | thiooxidans | |
| 1999 | — | MBN6740301.1 | Bacteria | JAEQBF010000039.1 | transposase | Acidithiobacillus sp. | |
| | | | | | | MC6.1 | |
| 2000 | — | WP_014288647.1 | Archaea | NC_016645.1 | zinc ribbon domain-containing | Pyrobaculum ferrireducens | |
| | | | | | protein | | |
| 2001 | — | WP_169240387.1 | Bacteria | NZ_JAAIIG010000002.1 | zinc ribbon domain-containing | Bifidobacterium sp. DSM | |
| | | | | | protein | 109959 | |
| 2002 | — | NER27440.1 | Bacteria | JAAHFQ010000100.1 | transposase | Symploca sp. SIO1C4 | |
| 2003 | FZ1 | MBD8909288.1 | Bacteria | NKUI01000233.1 | hypothetical protein | Methylorubrum zatmanii | |
| 2004 | FZ1 | HBZ34620.1 | Bacteria | DOUS01000191.1 | NAD(+) diphosphatase | Bacteroidales bacterium | |
| 2005 | FZ1 | HIT83194.1 | Bacteria | DVLS01000100.1 | NAD(+) diphosphatase | Candidatus Avibacteroides | |
| | | | | | | faecavium | |
| 2006 | FZ1 | WP_255323207.1 | Bacteria | NZ_CAJTBQ010000012.1 | NAD(+) diphosphatase | Bacteroides faecis | |
| 2007 | FZ1 | GJG27037.1 | Bacteria | BPTR01000001.1 | NADH pyrophosphatase | Prevotella bryantii | |
| 2008 | FZ1 | MBS1968053.1 | Bacteria | JAFEAS010000185.1 | NAD(+) diphosphatase | Chloroflexi bacterium | |
| | | | | | | SZAS-1 | |
| 2009 | FZ1 | SHJ72093.1 | Bacteria | FQYQ01000048.1 | NAD+ diphosphatase | Pseudobutyrivibrio | |
| | | | | | | xylanivorans DSM 14809 | |
| 2010 | FZ1 | MBP2626078.1 | Bacteria | JAGFZX010000006.1 | diphosphatase | Firmicutes bacterium | |
| 2011 | FZ1 | MCB9445557.1 | Bacteria | JACKCE010000041.1 | NAD(+) diphosphatase | Ardenticatenaceae | |
| | | | | | | bacterium | |
| 2012 | FZ1 | KXS09892.1 | Eukaryota | KQ965844.1 | hypothetical protein | Gonapodya prolifera | |
| | | | | | | JEL478 | |
| 2013 | FZ1 | XP_042926726.1 | Eukaryota | NC_057005.1 | uncharacterized protein | Chlamydomonas reinhardtii | |
| 2014 | FZ1 | XP_042928557.1 | Eukaryota | NC_057004.1 | uncharacterized protein | Chlamydomonas reinhardtii | |
| 2015 | FZ1 | KAG2494334.1 | Eukaryota | JAEHOE010000031.1 | hypothetical protein | Edaphochlamys debaryana | |
| 2016 | FZ1 | KAG2495790.1 | Eukaryota | JAEHOE010000022.1 | hypothetical protein | Edaphochlamys debaryana | |
| 2017 | FZ1 | CDH61486.1 | Eukaryota | CBTN010000202.1 | predicted protein | Lichtheimia corymbifera | |
| | | | | | | JMRC:FSU:9682 | |
| 2018 | FZ1 | KAF9201042.1 | Eukaryota | JAAAUH010000627.1 | hypothetical protein | Haplosporangium sp. Z 27 | |
| 2019 | FZ1 | KAG0214700.1 | Eukaryota | JAAAIW010001202.1 | hypothetical protein | Mortierella sp. GBA43 | |
| 2020 | FZ1 | KAF9951883.1 | Eukaryota | JAAAHZ010000436.1 | hypothetical protein | Mortierella alpina | |
| 2021 | FZ1 | KAG0220417.1 | Eukaryota | JAAAIX010000001.1 | hypothetical protein | Mortierella sp. NVP41 | |
| 2022 | FZ1 | KAF9576861.1 | Eukaryota | JAABKD010000002.1 | hypothetical protein | Mortierella alpina | |
| 2023 | FZ1 | KAF9106577.1 | Eukaryota | JAAAUM010000613.1 | hypothetical protein | Mortierella sp. AM989 | |
| 2024 | FZ1 | KAF9934623.1 | Eukaryota | JAAAHW010009908.1 | hypothetical protein | Modicella reniformis | |
| 2025 | FZ1 | KAF9291699.1 | Eukaryota | JAAAUT010000017.1 | hypothetical protein | Mortierella alpina | |
| 2026 | FZ1 | KAG9320341.1 | Eukaryota | JAIFTL010000300.1 | hypothetical protein | Mortierella alpina | |
| 2027 | FZ1 | KAF9117604.1 | Eukaryota | JAAAUP010001421.1 | hypothetical protein | Mortierella sp. 14UC | |
| 2028 | FZ1 | KAF9567075.1 | Eukaryota | JAABKD010000204.1 | hypothetical protein | Mortierella alpina | |
| 2029 | FZ1 | KAF9570598.1 | Eukaryota | JAABKD010000141.1 | hypothetical protein | Mortierella alpina | |
| 2030 | FZ1 | KAG9324824.1 | Eukaryota | JAIFTL010000055.1 | hypothetical protein | Mortierella alpina | |
| 2031 | FZ1 | KAG2228467.1 | Eukaryota | JAEPRE010000453.1 | hypothetical protein | Thamnidium elegans | |
| 2032 | FZ1 | CEG67418.1 | Eukaryota | CCYT01000007.1 | hypothetical protein | Rhizopus microsporus | |
| 2033 | FZ1 | KAG1169249.1 | Eukaryota | JAANIK010000659.1 | hypothetical protein | Rhizopus microsporus | |
| 2034 | FZ1 | ORX42108.1 | Eukaryota | MCGT01000077.1 | hypothetical protein | Hesseltinella vesiculosa | |
| 2035 | FZ1 | OAD06009.1 | Eukaryota | AMYB01000002.1 | hypothetical protein | Mucor lusitanicus CBS | |
| | | | | | | 277.49 | |
| 2036 | FZ1 | OAD05386.1 | Eukaryota | AMYB01000003.1 | hypothetical protein | Mucor lusitanicus CBS | |
| | | | | | | 277.49 | |
| 2037 | FZ1 | KAG2205158.1 | Eukaryota | JAEPRC010000181.1 | hypothetical protein | Mucor plumbeus | |
| 2038 | FZ1 | CEP15936.1 | Eukaryota | LN732725.1 | hypothetical protein | Parasitella parasitica | |
| 2039 | FZ1 | KAG2200097.1 | Eukaryota | JAEPRC010000327.1 | hypothetical protein | Mucor plumbeus | |
| 2040 | FZ1 | KAF1803963.1 | Eukaryota | JAAECE010000003.1 | hypothetical protein | Mucor lusitanicus | |
| 2041 | FZ1 | KAG2197763.1 | Eukaryota | JAEPRC010000419.1 | hypothetical protein | Mucor plumbeus | |
| 2042 | FZ1 | OAC99372.1 | Eukaryota | AMYB01000008.1 | hypothetical protein | Mucor lusitanicus CBS | |
| | | | | | | 277.49 | |
| 2043 | FZ1 | OAD01797.1 | Eukaryota | AMYB01000005.1 | hypothetical protein | Mucor lusitanicus CBS | |
| | | | | | | 277.49 | |
| 2044 | FZ1 | KAG2229227.1 | Eukaryota | JAEPRE010000295.1 | hypothetical protein | Thamnidium elegans | |
| 2045 | FZ1 | KAG1514277.1 | Eukaryota | JAANIS010003741.1 | hypothetical protein | Rhizopus delemar | |
| 2046 | FZ1 | OAD03016.1 | Eukaryota | AMYB01000004.1 | hypothetical protein | Mucor lusitanicus CBS | |
| | | | | | | 277.49 | |
| 2047 | FZ1 | KAG1174754.1 | Eukaryota | JAANIK010000190.1 | hypothetical protein | Rhizopus microsporus | |
| 2048 | FZ1 | OAD73728.1 | Eukaryota | KV440980.1 | hypothetical protein | Phycomyces blakesleeanus | |
| | | | | | | NRRL 1555(−) | |
| 2049 | FZ1 | OAD78499.1 | Eukaryota | KV440973.1 | hypothetical protein | Phycomyces blakesleeanus | |
| | | | | | | NRRL 1555(−) | |
| 2050 | FZ1 | KAG1265047.1 | Eukaryota | JAANQQ010000182.1 | hypothetical protein | Rhizopus microsporus | |
| 2051 | FZ1 | MBR1925719.1 | Bacteria | JAFVEA010000009.1 | zinc ribbon domain-containing | Clostridia bacterium | |
| | | | | | protein | | |
| 2052 | FZ1 | KAF1782766.1 | Eukaryota | WXXK01002862.1 | Peptidase C54 | Phytophthora cactorum | |
| 2053 | FZ1 | ORY22527.1 | Eukaryota | MCGO01000179.1 | hypothetical protein | Rhizoclosmatium globosum | |
| 2054 | FZ1 | ORY52054.1 | Eukaryota | MCGO01000004.1 | hypothetical protein | Rhizoclosmatium globosum | |
| 2055 | FZ1 | ORY52599.1 | Eukaryota | MCGO01000003.1 | hypothetical protein | Rhizoclosmatium globosum | |
| 2056 | FZ1 | TPX49262.1 | Eukaryota | QEAN01000085.1 | hypothetical protein | Synchytrium endobioticum | |
| 2057 | FZ1 | TPX48303.1 | Eukaryota | QEAM01000055.1 | hypothetical protein | Synchytrium endobioticum | |
| 2058 | FZ1 | TPX49148.1 | Eukaryota | QEAM01000039.1 | hypothetical protein | Synchytrium endobioticum | |
| 2059 | FZ1 | TPX52249.1 | Eukaryota | QEAN01000041.1 | hypothetical protein | Synchytrium endobioticum | |
| 2060 | FZ1 | XP_042919154.1 | Eukaryota | NC_057015.1 | uncharacterized protein | Chlamydomonas reinhardtii | |
| 2061 | FZ1 | OAD67303.1 | Eukaryota | KV441024.1 | hypothetical protein | Phycomyces blakesleeanus | |
| | | | | | | NRRL 1555(−) | |
| 2062 | FZ1 | EPB90321.1 | Eukaryota | KE123922.1 | hypothetical protein | Mucor circinelloides | |
| | | | | | | 1006PhL | |
| 2063 | FZ1 | KAG2179812.1 | Eukaryota | JAEPQZ010000006.1 | hypothetical protein | Umbelopsis isabellina | |
| 2064 | FZ1 | KAG2203935.1 | Eukaryota | JAEPRD010000048.1 | hypothetical protein | Mucor saturninus | |
| 2065 | FZ1 | ORX51298.1 | Eukaryota | MCGT01000021.1 | hypothetical protein | Hesseltinella vesiculosa | |
| 2066 | FZ1 | ORX51696.1 | Eukaryota | MCGT01000020.1 | hypothetical protein | Hesseltinella vesiculosa | |
| 2067 | FZ1 | KAG0169076.1 | Eukaryota | JAAZWU010000231.1 | hypothetical protein | Apophysomyces sp. | |
| | | | | | | BC1015 | |
| 2068 | FZ1 | KAG0186302.1 | Eukaryota | JAAZWW010000513.1 | hypothetical protein | Apophysomyces sp. | |
| | | | | | | BC1034 | |
| 2069 | FZ1 | ORX61999.1 | Eukaryota | MCGT01000002.1 | hypothetical protein | Hesseltinella vesiculosa | |
| 2070 | FZ1 | ORX59680.1 | Eukaryota | MCGT01000005.1 | hypothetical protein | Hesseltinella vesiculosa | |
| 2071 | FZ1 | ORX50518.1 | Eukaryota | MCGT01000023.1 | hypothetical protein | Hesseltinella vesiculosa | |
| 2072 | FZ1 | KAG1461711.1 | Eukaryota | JAANIO010002185.1 | hypothetical protein | Rhizopus delemar | |
| 2073 | FZ1 | SAL98421.1 | Eukaryota | LT552071.1 | hypothetical protein | Absidia glauca | |
| 2074 | FZ1 | KAG0185025.1 | Eukaryota | JAAZWW010000735.1 | hypothetical protein | Apophysomyces sp. | |
| | | | | | | BC1034 | |
| 2075 | FZ1 | ORX49066.1 | Eukaryota | MCGT01000027.1 | hypothetical protein | Hesseltinella vesiculosa | |
| 2076 | FZ1 | ORX53494.1 | Eukaryota | MCGT01000015.1 | hypothetical protein | Hesseltinella vesiculosa | |
| 2077 | FZ1 | KAG0181934.1 | Eukaryota | JAAZWV010000046.1 | hypothetical protein | Apophysomyces sp. | |
| | | | | | | BC1021 | |
| 2078 | FZ1 | SAL96470.1 | Eukaryota | LT551130.1 | hypothetical protein | Absidia glauca | |
| 2079 | FZ1 | ORX63043.1 | Eukaryota | MCGT01000001.1 | hypothetical protein | Hesseltinella vesiculosa | |
| 2080 | FZ1 | ORX60267.1 | Eukaryota | MCGT01000004.1 | hypothetical protein | Hesseltinella vesiculosa | |
| 2081 | FZ1 | CDH49516.1 | Eukaryota | CBTN010000003.1 | hypothetical protein | Lichtheimia corymbifera | |
| | | | | | RO3G 01681 | JMRC:FSU:9682 | |
| 2082 | FZ1 | OAD00684.1 | Eukaryota | AMYB01000006.1 | hypothetical protein | Mucor lusitanicus CBS | |
| | | | | | | 277.49 | |
| 2083 | FZ1 | CEP20192.1 | Eukaryota | LN734259.1 | hypothetical protein | Parasitella parasitica | |
| 2084 | FZ1 | KAG1047748.1 | Eukaryota | JAANJB010001690.1 | hypothetical protein | Rhizopus delemar | |
| 2085 | FZ1 | KAG2208174.1 | Eukaryota | JAEPRC010000116.1 | hypothetical protein | Mucor plumbeus | |
| 2086 | FZ1 | KAG2198206.1 | Eukaryota | JAEPRC010000398.1 | hypothetical protein | Mucor plumbeus | |
| 2087 | FZ1 | KAG2215819.1 | Eukaryota | JAEPRC010000003.1 | hypothetical protein | Mucor plumbeus | |
| 2088 | FZ1 | KAH8556768.1 | Eukaryota | JAJSME010000001.1 | hypothetical protein | Umbelopsis sp. PMI 123 | |
| 2089 | FZ1 | KAF7721224.1 | Eukaryota | JABAYA010000290.1 | hypothetical protein | Apophysomyces ossiformis | |
| 2090 | FZ1 | KAG0163032.1 | Eukaryota | JAAZWU010001150.1 | hypothetical protein | Apophysomyces sp. | |
| | | | | | | BC1015 | |
| 2091 | FZ1 | RCH93528.1 | Eukaryota | PJQL01000686.1 | hypothetical protein | Rhizopus azygosporus | |
| 2092 | FZ1 | CEI96835.1 | Eukaryota | CDGI01000344.1 | hypothetical protein | Rhizopus microsporus | |
| 2093 | FZ1 | CEG77523.1 | Eukaryota | CCYT01000096.1 | hypothetical protein | Rhizopus microsporus | |
| 2094 | FZ1 | CEG80323.1 | Eukaryota | CCYT01000204.1 | hypothetical protein | Rhizopus microsporus | |
| 2095 | FZ1 | EPB91797.1 | Eukaryota | KE123905.1 | hypothetical protein | Mucor circinelloides | |
| | | | | | | 1006PhL | |
| 2096 | FZ1 | EPB92523.1 | Eukaryota | KE123899.1 | hypothetical protein | Mucor circinelloides | |
| | | | | | | 1006PhL | |
| 2097 | FZ1 | KAG2202060.1 | Eukaryota | JAEPRD010000065.1 | hypothetical protein | Mucor saturninus | |
| 2098 | FZ1 | KAG2199802.1 | Eukaryota | JAEPRD010000091.1 | hypothetical protein | Mucor saturninus | |
| 2099 | FZ1 | ORX57539.1 | Eukaryota | MCGT01000008.1 | hypothetical protein | Hesseltinella vesiculosa | |
| 2100 | FZ1 | ORX42432.1 | Eukaryota | MCGT01000067.1 | hypothetical protein | Hesseltinella vesiculosa | |
| 2101 | FZ1 | SAM09778.1 | Eukaryota | LT555210.1 | hypothetical protein | Absidia glauca | |
| 2102 | FZ1 | ORX60682.1 | Eukaryota | MCGT01000004.1 | hypothetical protein | Hesseltinella vesiculosa | |
| 2103 | FZ1 | KAG8466019.1 | Eukaryota | JAGTXO010000009.1 | hypothetical protein | Diacronema lutheri | |
| 2104 | FZ1 | KAF9956896.1 | Eukaryota | JAAAHZ010000163.1 | hypothetical protein | Mortierella alpina | |
| 2105 | FZ1 | KAG9325517.1 | Eukaryota | JAIFTL010000039.1 | hypothetical protein | Mortierella alpina | |
| 2106 | FZ1 | KAF9430362.1 | Eukaryota | JAAAVE010000044.1 | hypothetical protein | Podila epigama | |
| 2107 | FZ1 | KAF9409181.1 | Eukaryota | JAAAVE010001492.1 | hypothetical protein | Podila epigama | |
| 2108 | FZ1 | KAF9156689.1 | Eukaryota | JAAAUS010000847.1 | hypothetical protein | Actinomortierella ambigua | |
| 2109 | FZ1 | KAF9580539.1 | Eukaryota | JAABOA010002001.1 | hypothetical protein | Lunasporangiospora | |
| | | | | | | selenospora | |
| 2110 | FZ1 | KAF8976016.1 | Eukaryota | JAAAUG010000614.1 | hypothetical protein | Entomortierella lignicola | |
| 2111 | FZ1 | KAG0243527.1 | Eukaryota | JAAAIW010000080.1 | hypothetical protein | Mortierella sp. GBA43 | |
| 2112 | FZ1 | KAF9401987.1 | Eukaryota | JAAAVD010000099.1 | hypothetical protein | Mortierella sp. AD011 | |
| 2113 | FZ1 | KAF8978230.1 | Eukaryota | JAAAUG010000380.1 | hypothetical protein | Entomortierella lignicola | |
| 2114 | FZ1 | KAG0304984.1 | Eukaryota | JAAAIO010000261.1 | hypothetical protein | Dissophora globulifera | |
| 2115 | FZ1 | KAF9347175.1 | Eukaryota | JAAAVA010001793.1 | hypothetical protein | Mortierella sp. NVP85 | |
| 2116 | FZ1 | GJJ68040.1 | Eukaryota | BQFW01000001.1 | hypothetical protein | Entomortierella parvispora | |
| 2117 | FZ1 | GJJ73840.1 | Eukaryota | BQFW01000008.1 | hypothetical protein | Entomortierella parvispora | |
| 2118 | FZ1 | KAF9109300.1 | Eukaryota | JAAAUM010000465.1 | hypothetical protein | Mortierella sp. AM989 | |
| 2119 | FZ1 | KAF9386103.1 | Eukaryota | JAAAVD010001168.1 | hypothetical protein | Mortierella sp. AD011 | |
| 2120 | FZ1 | KAG0048556.1 | Eukaryota | JAAAIG010000360.1 | hypothetical protein | Gryganskiella cystojenkinii | |
| 2121 | FZ1 | KAG0045951.1 | Eukaryota | JAAAIG010000567.1 | hypothetical protein | Gryganskiella cystojenkinii | |
| 2122 | FZ1 | MBF6450708.1 | Bacteria | JADLPS010000012.1 | DUF2235 domain-containing | Nocardia elegans | |
| | | | | | protein | | |
| 2123 | FZ1 | KAF9939674.1 | Eukaryota | JAAAHW010009513.1 | hypothetical protein | Modicella reniformis | |
| 2124 | FZ1 | KAG0324181.1 | Eukaryota | JAAAIP010000160.1 | hypothetical protein | Dissophora globulifera | |
| 2125 | FZ1 | KAG0320651.1 | Eukaryota | JAAAIQ010001776.1 | hypothetical protein | Podila horticola | |
| 2126 | FZ1 | KAF9216096.1 | Eukaryota | JAAAUK010000087.1 | hypothetical protein | Podila verticillata | |
| 2127 | FZ1 | KAF9574988.1 | Eukaryota | JAABKD010000026.1 | hypothetical protein | Mortierella alpina | |
| 2128 | FZ1 | KAG9323443.1 | Eukaryota | JAIFTL010000101.1 | hypothetical protein | Mortierella alpina | |
| 2129 | FZ1 | KAF9943699.1 | Eukaryota | JAAAHY010002963.1 | hypothetical protein | Mortierella alpina | |
| 2130 | FZ1 | KAF9555836.1 | Eukaryota | JAABKD010000586.1 | hypothetical protein | Mortierella alpina | |
| 2131 | FZ1 | KAF9349653.1 | Eukaryota | JAAAVA010001333.1 | hypothetical protein | Mortierella sp. NVP85 | |
| 2132 | FZ1 | KAF9146337.1 | Eukaryota | JAAAUO010000012.1 | hypothetical protein | Mortierella sp. GBA39 | |
| 2133 | FZ1 | KAG0210361.1 | Eukaryota | JAAAIX010000264.1 | hypothetical protein | Mortierella sp. NVP41 | |
| 2134 | FZ1 | KAF9946007.1 | Eukaryota | JAAAHZ010001139.1 | hypothetical protein | Mortierella alpina | |
| 2135 | FZ1 | KAF9576320.1 | Eukaryota | JAABKD010000007.1 | hypothetical protein | Mortierella alpina | |
| 2136 | FZ1 | KAF9947650.1 | Eukaryota | JAAAHZ010000852.1 | hypothetical protein | Mortierella alpina | |
| 2137 | FZ1 | KAG9072621.1 | Eukaryota | JAHRHY010000001.1 | hypothetical protein | Linnemannia hyalina | |
| 2138 | FZ1 | KAG0058120.1 | Eukaryota | JAAAII010002306.1 | hypothetical protein | Linnemannia elongata | |
| 2139 | FZ1 | KAG0346432.1 | Eukaryota | JAAAIR010000145.1 | hypothetical protein | Podila humilis | |
| 2140 | FZ1 | KAG9064920.1 | Eukaryota | JAHRHY010000013.1 | hypothetical protein | Linnemannia hyalina | |
| 2141 | FZ1 | KAG0284381.1 | Eukaryota | JAAAIM010000778.1 | hypothetical protein | Linnemannia gamsii | |
| 2142 | FZ1 | KAG9063601.1 | Eukaryota | JAHRHY010000016.1 | hypothetical protein | Linnemannia hyalina | |
| 2143 | FZ1 | KAF9116719.1 | Eukaryota | JAAAUP010001603.1 | hypothetical protein | Mortierella sp. 14UC | |
| 2144 | FZ1 | GJJ78229.1 | Eukaryota | BQFW01000014.1 | hypothetical protein | Entomortierella parvispora | |
| 2145 | FZ1 | OAQ24126.1 | Eukaryota | KV442101.1 | hypothetical protein | Linnemannia elongata AG- | |
| | | | | | | 77 | |
| 2146 | FZ1 | KAF9910422.1 | Eukaryota | JAAAHU010000034.1 | hypothetical protein | Linnemannia zychae | |
| 2147 | FZ1 | KAG0218288.1 | Eukaryota | JAAAIW010000982.1 | hypothetical protein | Mortierella sp. GBA43 | |
| 2148 | FZ1 | KAF8976772.1 | Eukaryota | JAAAUG010000526.1 | hypothetical protein | Entomortierella lignicola | |
| 2149 | FZ1 | KAF9355237.1 | Eukaryota | JAAAVA010000728.1 | hypothetical protein | Mortierella sp. NVP85 | |
| 2150 | FZ1 | KAF9338415.1 | Eukaryota | JAAAUY010000001.1 | hypothetical protein | Podila minutissima | |
| 2151 | FZ1 | KAF9556112.1 | Eukaryota | JAABKD010000553.1 | hypothetical protein | Mortierella alpina | |
| 2152 | FZ1 | KAF9948913.1 | Eukaryota | JAAAHZ010000690.1 | hypothetical protein | Mortierella alpina | |
| 2153 | FZ1 | KAF9980453.1 | Eukaryota | JAAAIB010000636.1 | hypothetical protein | Mortierella antarctica | |
| 2154 | FZ1 | KAF9966905.1 | Eukaryota | JAAAHY010000117.1 | hypothetical protein | Mortierella alpina | |
| 2155 | FZ1 | KAF9364987.1 | Eukaryota | JAAAVA010000092.1 | hypothetical protein | Mortierella sp. NVP85 | |
| 2156 | FZ1 | KAF9556935.1 | Eukaryota | JAABKD010000488.1 | hypothetical protein | Mortierella alpina | |
| 2157 | FZ1 | KAF9967645.1 | Eukaryota | JAAAHY010000066.1 | hypothetical protein | Mortierella alpina | |
| 2158 | FZ1 | KAF9927226.1 | Eukaryota | JAAAHX010000493.1 | hypothetical protein | Mortierella alpina | |
| 2159 | FZ1 | KAF9378618.1 | Eukaryota | JAAAVC010000834.1 | hypothetical protein | Podila verticillata | |
| 2160 | FZ1 | KAG0322448.1 | Eukaryota | JAAAIQ010001609.1 | hypothetical protein | Podila horticola | |
| 2161 | FZ1 | KAF9291389.1 | Eukaryota | JAAAUT010000024.1 | hypothetical protein | Mortierella alpina | |
| 2162 | FZ1 | KAG9321106.1 | Eukaryota | JAIFTL010000230.1 | hypothetical protein | Mortierella alpina | |
| 2163 | FZ1 | GJJ75571.1 | Eukaryota | BQFW01000011.1 | putative transposase | Entomortierella parvispora | |
| 2164 | FZ1 | GJJ68527.1 | Eukaryota | BQFW01000002.1 | putative transposase | Entomortierella parvispora | |
| 2165 | FZ1 | KAF9966593.1 | Eukaryota | JAAAHY010000143.1 | hypothetical protein | Mortierella alpina | |
| 2166 | FZ1 | KAF9964235.1 | Eukaryota | JAAAHY010000389.1 | hypothetical protein | Mortierella alpina | |
| 2167 | FZ1 | KAG0082841.1 | Eukaryota | JAAAIJ010000896.1 | hypothetical protein | Podila epicladia | |
| 2168 | FZ1 | KAF9919060.1 | Eukaryota | JAAAHV010000964.1 | hypothetical protein | Linnemannia zychae | |
| 2169 | FZ1 | KAG0377717.1 | Eukaryota | JAAAIU010000247.1 | hypothetical protein | Mortierella sp. AD032 | |
| 2170 | FZ1 | KAG9065429.1 | Eukaryota | JAHRHY010000012.1 | hypothetical protein | Linnemannia hyalina | |
| 2171 | FZ1 | KAF9289007.1 | Eukaryota | JAAAUU010001135.1 | hypothetical protein | Mortierella antarctica | |
| 2172 | FZ1 | KAG0349541.1 | Eukaryota | JAAAIT010002332.1 | hypothetical protein | Gamsiella multidivaricata | |
| 2173 | FZ1 | KAF9165033.1 | Eukaryota | JAAAUS010000118.1 | Elongation of fatty acids protein | Actinomortierella ambigua | |
| | | | | | 2 | | |
| 2174 | FZ1 | KAG0319327.1 | Eukaryota | JAAAIP010000328.1 | hypothetical protein | Dissophora globulifera | |
| 2175 | FZ1 | KAF9998929.1 | Eukaryota | JAAAIC010000451.1 | hypothetical protein | Entomortierella | |
| | | | | | | chlamydospora | |
| 2176 | FZ1 | KAF9164552.1 | Eukaryota | JAAAUS010000140.1 | hypothetical protein | Actinomortierella ambigua | |
| 2177 | FZ1 | KAG9321197.1 | Eukaryota | JAIFTL010000221.1 | hypothetical protein | Mortierella alpina | |
| 2178 | FZ1 | KAI1290718.1 | Eukaryota | JAABNM010000665.1 | hypothetical protein | Mortierella claussenii | |
| 2179 | FZ1 | KAF8920072.1 | Eukaryota | JAAAUD010002367.1 | hypothetical protein | Dissophora ornata | |
| 2180 | FZ1 | KAF9125707.1 | Eukaryota | JAAAUP010000424.1 | hypothetical protein | Mortierella sp. 14UC | |
| 2181 | FZ1 | KAF9928552.1 | Eukaryota | JAAAHV010000162.1 | hypothetical protein | Linnemannia zychae | |
| 2182 | FZ1 | KAF9995964.1 | Eukaryota | JAAAIC010000842.1 | hypothetical protein | Entomortierella | |
| | | | | | | chlamydospora | |
| 2183 | FZ1 | KAG0263678.1 | Eukaryota | JAAAJB010000156.1 | hypothetical protein | Actinomortierella ambigua | |
| 2184 | FZ1 | KAG0303305.1 | Eukaryota | JAAAIO010000406.1 | hypothetical protein | Dissophora globulifera | |
| 2185 | FZ1 | KAG0220974.1 | Eukaryota | JAAAIY010000701.1 | hypothetical protein | Actinomortierella wolfii | |
| 2186 | FZ1 | KAF8927958.1 | Eukaryota | JAAAUD010000773.1 | hypothetical protein | Dissophora ornata | |
| 2187 | FZ1 | KAF9951295.1 | Eukaryota | JAAAHZ010000479.1 | hypothetical protein | Mortierella alpina | |
| 2188 | FZ1 | KAF9543057.1 | Eukaryota | JAAAXW010000123.1 | hypothetical protein | Mortierella hygrophila | |
| 2189 | FZ1 | KAF9368672.1 | Eukaryota | JAAAVC010002347.1 | hypothetical protein | Podila verticillata | |
| 2190 | FZ1 | KAG0051896.1 | Eukaryota | JAAAIG010000182.1 | Chromatin structure-remodeling | Gryganskiella cystojenkinii | |
| | | | | | complex protein rsc9 | | |
| 2191 | FZ1 | KAG0213512.1 | Eukaryota | JAAAIW010001265.1 | hypothetical protein | Mortierella sp. GBA43 | |
| 2192 | FZ1 | KAG0262509.1 | Eukaryota | JAAAJA010000096.1 | hypothetical protein | Mortierella polycephala | |
| 2193 | FZ1 | KAF9158623.1 | Eukaryota | JAAAUR010001807.1 | hypothetical protein | Mortierella sp. AD010 | |
| 2194 | FZ1 | KAF8957427.1 | Eukaryota | JAAAUG010001516.1 | hypothetical protein | Entomortierella lignicola | |
| 2195 | FZ1 | KAG0020662.1 | Eukaryota | JAAAID010000203.1 | hypothetical protein | Entomortierella | |
| | | | | | | chlamydospora | |
| 2196 | FZ1 | KAF9376609.1 | Eukaryota | JAAAVD010001836.1 | hypothetical protein | Mortierella sp. AD011 | |
| 2197 | FZ1 | KAF9181956.1 | Eukaryota | JAAAUJ010000330.1 | hypothetical protein | Haplosporangium sp. Z 767 | |
| 2198 | FZ1 | KAF9574621.1 | Eukaryota | JAABKD010000033.1 | hypothetical protein | Mortierella alpina | |
| 2199 | FZ1 | KAF9569519.1 | Eukaryota | JAABKD010000171.1 | hypothetical protein | Mortierella alpina | |
| 2200 | FZ1 | KAF9276712.1 | Eukaryota | JAAAUT010000801.1 | hypothetical protein | Mortierella alpina | |
| 2201 | FZ1 | KAF9292104.1 | Eukaryota | JAAAUV010000300.1 | hypothetical protein | Linnemannia elongata | |
| 2202 | FZ1 | OAQ22469.1 | Eukaryota | KV442163.1 | hypothetical protein | Linnemannia elongata AG- | |
| | | | | | | 77 | |
| 2203 | FZ1 | KAG9060877.1 | Eukaryota | JAHRHY010000029.1 | hypothetical protein | Linnemannia hyalina | |
| 2204 | FZ1 | KAF9541240.1 | Eukaryota | JAAAXW010000173.1 | hypothetical protein | Mortierella hygrophila | |
| 2205 | FZ1 | KAG9063431.1 | Eukaryota | JAHRHY010000016.1 | hypothetical protein | Linnemannia hyalina | |
| 2206 | FZ1 | KAF9100189.1 | Eukaryota | JAAAUL010000002.1 | hypothetical protein | Mortierella sp. AD031 | |
| 2207 | FZ1 | KAF9333019.1 | Eukaryota | JAAAUY010000226.1 | hypothetical protein | Podila minutissima | |
| 2208 | FZ1 | KAG0295332.1 | Eukaryota | JAAAIM010000088.1 | hypothetical protein | Linnemannia gamsii | |
| 2209 | FZ1 | KAF9348187.1 | Eukaryota | JAAAUZ010001055.1 | hypothetical protein | Mortierella sp. AD094 | |
| 2210 | FZ1 | KAF9149755.1 | Eukaryota | JAAAUQ010000491.1 | hypothetical protein | Linnemannia schmuckeri | |
| 2211 | FZ1 | KAG0058911.1 | Eukaryota | JAAAIH010001148.1 | hypothetical protein | Linnemannia elongata | |
| 2212 | FZ1 | KAF9912681.1 | Eukaryota | JAAAHU010000006.1 | hypothetical protein | Linnemannia zychae | |
| 2213 | FZ1 | KAG0267982.1 | Eukaryota | JAAAIL010001580.1 | hypothetical protein | Linnemannia exigua | |
| 2214 | FZ1 | KAG0262907.1 | Eukaryota | JAAAIL010001932.1 | hypothetical protein | Linnemannia exigua | |
| 2215 | FZ1 | KAF9537113.1 | Eukaryota | JAAAXW010000459.1 | hypothetical protein | Mortierella hygrophila | |
| 2216 | FZ1 | KAG0294208.1 | Eukaryota | JAAAIO010001457.1 | hypothetical protein | Dissophora globulifera | |
| 2217 | FZ1 | KAF9188467.1 | Eukaryota | JAAAUJ010000113.1 | hypothetical protein | Haplosporangium sp. Z 767 | |
| 2218 | FZ1 | KAF9110941.1 | Eukaryota | JAAAUM010000302.1 | hypothetical protein | Mortierella sp. AM989 | |
| 2219 | FZ1 | KAG0363795.1 | Eukaryota | JAAAIT010000570.1 | hypothetical protein | Gamsiella multidivaricata | |
| 2220 | FZ1 | KAF9349185.1 | Eukaryota | JAAAUZ010000901.1 | hypothetical protein | Mortierella sp. AD094 | |
| 2221 | FZ1 | KAG0221592.1 | Eukaryota | JAAAIY010000549.1 | hypothetical protein | Actinomortierella wolfii | |
| 2222 | FZ1 | KAG0016911.1 | Eukaryota | JAAAID010000490.1 | Rad2 nuclease | Entomortierella | |
| | | | | | | chlamydospora | |
| 2223 | FZ1 | KAF9961563.1 | Eukaryota | JAAAHZ010000020.1 | hypothetical protein | Mortierella alpina | |
| 2224 | FZ1 | KAF9572130.1 | Eukaryota | JAABKD010000089.1 | hypothetical protein | Mortierella alpina | |
| 2225 | FZ1 | KAF9562940.1 | Eukaryota | JAABKD010000276.1 | hypothetical protein | Mortierella alpina | |
| 2226 | FZ1 | KAF9379007.1 | Eukaryota | JAAAVD010001618.1 | hypothetical protein | Mortierella sp. AD011 | |
| 2227 | FZ1 | KAI3658407.1 | Eukaryota | JALGPX010000074.1 | hypothetical protein | Amoeboaphelidium | |
| | | | | | | occidentale | |
| 2228 | FZ1 | KAI3658640.1 | Eukaryota | JALGPX010000067.1 | hypothetical protein | Amoeboaphelidium | |
| | | | | | | occidentale | |
| 2229 | FZ1 | KAI3661525.1 | Eukaryota | JALGPX010000011.1 | hypothetical protein | Amoeboaphelidium | |
| | | | | | | occidentale | |
| 2230 | FZ1 | KAI3636164.1 | Eukaryota | JALDTO010000179.1 | hypothetical protein | Amoeboaphelidium | |
| | | | | | | protococcarum | |
| 2231 | FZ1 | KAI3640636.1 | Eukaryota | JALDTO010000098.1 | hypothetical protein | Amoeboaphelidium | |
| | | | | | | protococcarum | |
| 2232 | FZ1 | TPX34279.1 | Eukaryota | QEAM01000835.1 | hypothetical protein | Synchytrium endobioticum | |
| 2233 | FZ1 | TPX41744.1 | Eukaryota | QEAN01000259.1 | hypothetical protein | Synchytrium endobioticum | |
| 2234 | FZ1 | TPX42925.1 | Eukaryota | QEAN01000216.1 | hypothetical protein | Synchytrium endobioticum | |
| 2235 | FZ1 | TPX45735.1 | Eukaryota | QEAN01000147.1 | hypothetical protein | Synchytrium endobioticum | |
| 2236 | FZ1 | TPX53465.1 | Eukaryota | QEAN01000016.1 | hypothetical protein | Synchytrium endobioticum | |
| 2237 | FZ1 | TPX45013.1 | Eukaryota | QEAN01000161.1 | hypothetical protein | Synchytrium endobioticum | |
| 2238 | FZ1 | KAF9346511.1 | Eukaryota | JAAAVA010001959.1 | hypothetical protein | Mortierella sp. NVP85 | |
| 2239 | FZ1 | KAF9944011.1 | Eukaryota | JAAAHY010002715.1 | hypothetical protein | Mortierella alpina | |
| 2240 | FZ1 | KAF9566863.1 | Eukaryota | JAABKD010000207.1 | hypothetical protein | Mortierella alpina | |
| 2241 | FZ1 | KAG0368058.1 | Eukaryota | JAAAIU010001590.1 | hypothetical protein | Mortierella sp. AD032 | |
| 2242 | FZ1 | GJJ75596.1 | Eukaryota | BQFW01000011.1 | hypothetical protein | Entomortierella parvispora | |
| 2243 | FZ1 | GJJ76092.1 | Eukaryota | BQFW01000012.1 | hypothetical protein | Entomortierella parvispora | |
| 2244 | FZ1 | GJJ70709.1 | Eukaryota | BQFW01000004.1 | hypothetical protein | Entomortierella parvispora | |
| 2245 | FZ1 | GJJ73901.1 | Eukaryota | BQFW01000008.1 | hypothetical protein | Entomortierella parvispora | |
| 2246 | FZ1 | KAG0302090.1 | Eukaryota | JAAAIN010001552.1 | hypothetical protein | Linnemannia gamsii | |
| 2247 | FZ1 | KAF9949975.1 | Eukaryota | JAAAHZ010000588.1 | hypothetical protein | Mortierella alpina | |
| 2248 | FZ1 | KAG0378492.1 | Eukaryota | JAAAIU010000178.1 | hypothetical protein | Mortierella sp. AD032 | |
| 2249 | FZ1 | XP_021884711.1 | Eukaryota | NW 019028983.1 | hypothetical protein | Lobosporangium | |
| | | | | | | transversale | |
| 2250 | FZ1 | ORZ22893.1 | Eukaryota | MCFF01000010.1 | hypothetical protein | Lobosporangium | |
| | | | | | | transversale | |
| 2251 | FZ1 | KAG0216617.1 | Eukaryota | JAAAIW010001097.1 | hypothetical protein | Mortierella sp. GBA43 | |
| 2252 | FZ1 | KAF9954437.1 | Eukaryota | JAAAHZ010000285.1 | hypothetical protein | Mortierella alpina | |
| 2253 | FZ1 | KAF9383209.1 | Eukaryota | JAAAVC010000550.1 | hypothetical protein | Podila verticillata | |
| 2254 | FZ1 | KAF9574392.1 | Eukaryota | JAABKD010000037.1 | hypothetical protein | Mortierella alpina | |
| 2255 | FZ1 | KAF9945248.1 | Eukaryota | JAAAHZ010001336.1 | hypothetical protein | Mortierella alpina | |
| 2256 | FZ1 | KAF9975593.1 | Eukaryota | JAAAIB010001097.1 | hypothetical protein | Mortierella antarctica | |
| 2257 | FZ1 | KAF9288572.1 | Eukaryota | JAAAUT010000099.1 | hypothetical protein | Mortierella alpina | |
| 2258 | FZ1 | PWN96948.1 | Eukaryota | KZ819297.1 | hypothetical protein | Tilletiopsis | |
| | | | | | | washingtonensis | |
| 2259 | FZ1 | KXS17374.1 | Eukaryota | KQ965747.1 | hypothetical protein | Gonapodya prolifera | |
| | | | | | | JEL478 | |
| 2260 | FZ1 | KAI3655684.1 | Eukaryota | JALGPX010000390.1 | hypothetical protein | Amoeboaphelidium | |
| | | | | | | occidentale | |
| 2261 | FZ1 | KAI3657851.1 | Eukaryota | JALGPX010000093.1 | hypothetical protein | Amoeboaphelidium | |
| | | | | | | occidentale | |
| 2262 | FZ1 | KAI3656286.1 | Eukaryota | JALGPX010000201.1 | hypothetical protein | Amoeboaphelidium | |
| | | | | | | occidentale | |
| 2263 | FZ1 | KAI3661661.1 | Eukaryota | JALGPX010000009.1 | hypothetical protein | Amoeboaphelidium | |
| | | | | | | occidentale | |
| 2264 | FZ1 | KAI3630610.1 | Eukaryota | JALDTO010000266.1 | hypothetical protein | Amoeboaphelidium | |
| | | | | | | protococcarum | |
| 2265 | FZ1 | KAI3657602.1 | Eukaryota | JALGPX010000103.1 | hypothetical protein | Amoeboaphelidium | |
| | | | | | | occidentale | |
| 2266 | FZ1 | KAI3655380.1 | Eukaryota | JALGPX010000668.1 | hypothetical protein | Amoeboaphelidium | |
| | | | | | | occidentale | |
| 2267 | FZ1 | KAI3657448.1 | Eukaryota | JALGPX010000110.1 | hypothetical protein | Amoeboaphelidium | |
| | | | | | | occidentale | |
| 2268 | FZ1 | KAI3660260.1 | Eukaryota | JALGPX010000029.1 | hypothetical protein | Amoeboaphelidium | |
| | | | | | | occidentale | |
| 2269 | FZ1 | CDZ97809.1 | Eukaryota | LN483249.1 | Transposase IS605, OrfB, C- | Phaffia rhodozyma | |
| | | | | | terminal | | |
| 2270 | FZ1 | RIB19240.1 | Eukaryota | QKWP01000487.1 | hypothetical protein | Gigaspora rosea | |
| 2271 | FZ1 | KAI3662076.1 | Eukaryota | JALGPX010000006.1 | hypothetical protein | Amoeboaphelidium | |
| | | | | | | occidentale | |
| 2272 | FZ1 | KAI3658671.1 | Eukaryota | JALGPX010000066.1 | hypothetical protein | Amoeboaphelidium | |
| | | | | | | occidentale | |
| 2273 | FZ1 | KAI3661251.1 | Eukaryota | JALGPX010000014.1 | hypothetical protein | Amoeboaphelidium | |
| | | | | | | occidentale | |
| 2274 | FZ1 | KAI3660701.1 | Eukaryota | JALGPX010000021.1 | hypothetical protein | Amoeboaphelidium | |
| | | | | | | occidentale | |
| 2275 | FZ1 | KAI3659768.1 | Eukaryota | JALGPX010000039.1 | hypothetical protein | Amoeboaphelidium | |
| | | | | | | occidentale | |
| 2276 | FZ1 | KAI3660383.1 | Eukaryota | JALGPX010000027.1 | hypothetical protein | Amoeboaphelidium | |
| | | | | | | occidentale | |
| 2277 | FZ1 | KAI3661712.1 | Eukaryota | JALGPX010000009.1 | hypothetical protein | Amoeboaphelidium | |
| | | | | | | occidentale | |
| 2278 | FZ1 | KAI3659908.1 | Eukaryota | JALGPX010000036.1 | hypothetical protein | Amoeboaphelidium | |
| | | | | | | occidentale | |
| 2279 | FZ1 | KAI3662498.1 | Eukaryota | JALGPX010000002.1 | hypothetical protein | Amoeboaphelidium | |
| | | | | | | occidentale | |
| 2280 | FZ1 | KAI3658356.1 | Eukaryota | JALGPX010000076.1 | hypothetical protein | Amoeboaphelidium | |
| | | | | | | occidentale | |
| 2281 | FZ1 | NCA22991.1 | Bacteria | RFVH01001302.1 | hypothetical protein | Crocinitomicaceae | |
| | | | | | | bacterium | |
| 2282 | FZ1 | GFH27573.1 | Eukaryota | BLLF01003527.1 | uncharacterized protein | Haematococcus lacustris | |
| 2283 | FZ1 | NBS68719.1 | Bacteria | RFXA01000125.1 | hypothetical protein | bacterium | |
| 2284 | FZ1 | KAA6417349.1 | Eukaryota | VXIU01000090.1 | hypothetical protein | Trebouxia sp. A1-2 | |
| 2285 | FZ1 | QDZ21418.1 | Eukaryota | CP031038.1 | hypothetical protein | Chloropicon primus | |
| 2286 | FZ1 | OAD03071.1 | Eukaryota | AMYB01000004.1 | hypothetical protein | Mucor lusitanicus CBS | |
| | | | | | | 277.49 | |
| 2287 | FZ1 | EPB89501.1 | Eukaryota | KE123934.1 | hypothetical protein | Mucor circinelloides | |
| | | | | | | 1006PhL | |
| 2288 | FZ1 | CEG65362.1 | Eukaryota | CCYT01000003.1 | hypothetical protein | Rhizopus microsporus | |
| 2289 | FZ1 | KAG1170783.1 | Eukaryota | JAANIK010000451.1 | hypothetical protein | Rhizopus microsporus | |
| 2290 | FZ1 | CEI91939.1 | Eukaryota | CDGI01000138.1 | hypothetical protein | Rhizopus microsporus | |
| 2291 | FZ1 | CDS06778.1 | Eukaryota | LK023321.1 | hypothetical protein | Lichtheimia ramosa | |
| 2292 | FZ1 | CDH51949.1 | Eukaryota | CBTN010000011.1 | predicted protein | Lichtheimia corymbifera | |
| | | | | | | JMRC:FSU:9682 | |
| 2293 | FZ1 | CDH52134.1 | Eukaryota | CBTN010000012.1 | predicted protein | Lichtheimia corymbifera | |
| | | | | | | JMRC:FSU:9682 | |
| 2294 | FZ1 | AEP15317.1 | Viruses | JF974310.1 | hypothetical protein | Emiliania huxleyi virus 88 | Eukaryotic |
| | | | | | | | algae |
| 2295 | FZ1 | XP_005840014.1 | Eukaryota | NW 005434667.1 | hypothetical protein | Guillardia theta CCMP2712 | |
| 2296 | FZ1 | PNH01995.1 | Eukaryota | PGGS01000743.1 | hypothetical protein | Tetrabaena socialis | |
| 2297 | FZ1 | CAH6420741.1 | Viruses | CALPDY010000002.1 | Hypothetical protein | uncultured virus | N.A. |
| 2298 | FZ1 | CAH6420238.1 | Viruses | CALPDY010000002.1 | Hypothetical protein | uncultured virus | N.A. |
| 2299 | FZ1 | XP_007880192.1 | Eukaryota | NW 006920882.1 | uncharacterized protein | Pseudozyma flocculosa PF- | |
| | | | | | | 1 | |
| 2300 | FZ1 | NCR14667.1 | Bacteria | JAADBO010000375.1 | transposase | Microcystis aeruginosa | |
| | | | | | | SX13-11 | |
| 2301 | FZ1 | PIA19644.1 | Eukaryota | KZ303486.1 | galactose-binding like protein | Coemansia reversa NRRL | |
| | | | | | | 1564 | |
| 2302 | FZ1 | PIA13712.1 | Eukaryota | KZ303528.1 | hypothetical protein | Coemansia reversa NRRL | |
| | | | | | | 1564 | |
| 2303 | FZ1 | KAH8552694.1 | Eukaryota | JAJSME010000007.1 | hypothetical protein | Umbelopsis sp. PMI_123 | |
| 2304 | FZ1 | XP_023463440.1 | Eukaryota | NW 019671931.1 | uncharacterized protein | Rhizopus microsporus | |
| | | | | | | ATCC 52813 | |
| 2305 | FZ1 | ORE09056.1 | Eukaryota | KV921880.1 | hypothetical protein | Rhizopus microsporus var. | |
| | | | | | | microsporus | |
| 2306 | FZ1 | CEG63188.1 | Eukaryota | CCYT01000001.1 | hypothetical protein | Rhizopus microsporus | |
| 2307 | FZ1 | CEP14290.1 | Eukaryota | LN731111.1 | hypothetical protein | Parasitella parasitica | |
| 2308 | FZ1 | ORE07476.1 | Eukaryota | KV921903.1 | hypothetical protein | Rhizopus microsporus var. | |
| | | | | | | microsporus | |
| 2309 | FZ1 | KAG1470123.1 | Eukaryota | JAANIO010000789.1 | hypothetical protein | Rhizopus delemar | |
| 2310 | FZ1 | KAG1572414.1 | Eukaryota | JAANIU010000420.1 | hypothetical protein | Rhizopus delemar | |
| 2311 | FZ1 | KAG1257915.1 | Eukaryota | JAANQQ010001082.1 | hypothetical protein | Rhizopus microsporus | |
| 2312 | FZ1 | XP_018285963.1 | Eukaryota | NW 017265160.1 | hypothetical protein | Phycomyces blakesleeanus | |
| | | | | | | NRRL 1555(−) | |
| 2313 | FZ1 | OAD07257.1 | Eukaryota | AMYB01000002.1 | hypothetical protein | Mucor lusitanicus CBS | |
| | | | | | | 277.49 | |
| 2314 | FZ1 | CEG82468.1 | Eukaryota | CCYT01000367.1 | hypothetical protein | Rhizopus microsporus | |
| 2315 | FZ1 | ORE03770.1 | Eukaryota | KV921992.1 | hypothetical protein | Rhizopus microsporus var. | |
| | | | | | | microsporus | |
| 2316 | FZ1 | CAD6977073.1 | Eukaryota | CAJHJI010003942.1 | unnamed protein product | Tilletia controversa | |
| 2317 | FZ1 | CAD6889211.1 | Eukaryota | CAJHJA010003637.1 | unnamed protein product | Tilletia caries | |
| 2318 | FZ1 | TPX64340.1 | Eukaryota | QEAR01000057.1 | hypothetical protein | Spizellomyces sp.‘palustris’ | |
| 2319 | FZ1 | KNC96900.1 | Eukaryota | KQ257466.1 | hypothetical protein | Spizellomyces punctatus | |
| | | | | | | DAOM BR117 | |
| 2320 | FZ1 | NDB60816.1 | Bacteria | RGWU01000465.1 | hypothetical protein | bacterium | |
| 2321 | FZ1 | NDA90527.1 | Bacteria | RGPV01000210.1 | hypothetical protein | Alphaproteobacteria | |
| | | | | | | bacterium | |
| 2322 | FZ1 | AYV82100.1 | Viruses | MK072338.1 | transposase | Homavirus sp. | Unknown |
| 2323 | FZ1 | AYV77714.1 | Viruses | MK072066.1 | hypothetical protein | Edafosvirus sp. | Unknown |
| 2324 | FZ1 | AYV81939.1 | Viruses | MK072324.1 | hypothetical protein | Harvfovirus sp. | Unknown |
| 2325 | FZ1 | AYV83137.1 | Viruses | MK072386.1 | hypothetical protein | Hyperionvirus sp. | Unknown |
| 2326 | FZ1 | AYV77370.1 | Viruses | MK072042.1 | hypothetical protein | Dasosvirus sp. | Unknown |
| 2327 | FZ1 | AYV77114.1 | Viruses | MK072010.1 | hypothetical protein | Barrevirus sp. | Unknown |
| 2328 | FZ1 | AYV83337.1 | Viruses | MK072388.1 | hypothetical protein | Hyperionvirus sp. | Unknown |
| 2329 | FZ1 | MCJ7637949.1 | Archaea | JALHVF010000689.1 | hypothetical protein | Nitrososphaeraceae | |
| | | | | | | archaeon | |
| 2330 | FZ1 | MBT3408735.1 | Archaea | JABGRS010000251.1 | hypothetical protein | Candidatus | |
| | | | | | | Woesearchaeota archaeon | |
| 2331 | FZ1 | ATZ80196.1 | Viruses | MF782455.1 | putative chaperone Hsp70/DnaK | Bodo saltans virus | Bodo saltans |
| | | | | | | | (protozoa) |
| 2332 | FZ1 | QIG60031.1 | Viruses | MN940580.1 | transposase | Dishui Lake large algae | Eukaryotic |
| | | | | | | virus 1 | algae |
| 2333 | FZ1 | KAH9258919.1 | Eukaryota | JAKFGG010000008.1 | hypothetical protein | Batrachochytrium | |
| | | | | | | salamandrivorans | |
| 2334 | FZ1 | KAH9262875.1 | Eukaryota | JAKFGH010000013.1 | hypothetical protein | Batrachochytrium | |
| | | | | | | salamandrivorans | |
| 2335 | FZ1 | KAH9259926.1 | Eukaryota | JAKFGG010000005.1 | hypothetical protein | Batrachochytrium | |
| | | | | | | salamandrivorans | |
| 2336 | FZ1 | KAH9249064.1 | Eukaryota | JAKFGG010000154.1 | hypothetical protein | Batrachochytrium | |
| | | | | | | salamandrivorans | |
| 2337 | FZ1 | KAH9262877.1 | Eukaryota | JAKFGH010000012.1 | hypothetical protein | Batrachochytrium | |
| | | | | | | salamandrivorans | |
| 2338 | FZ1 | KAH9254122.1 | Eukaryota | JAKFGG010000048.1 | hypothetical protein | Batrachochytrium | |
| | | | | | | salamandrivorans | |
| 2339 | FZ1 | CCI39629.1 | Eukaryota | CAIX01000002.1 | unnamed protein product | Albugo candida | |
| 2340 | FZ1 | MBX3649648.1 | Bacteria | JAHCAF010000087.1 | hypothetical protein | Rhodocyclaceae bacterium | |
| 2341 | FZ1 | ATZ80674.1 | Viruses | MF782455.1 | hypothetical protein | Bodo saltans virus | Bodo saltans (protozoa) |
| 2342 | FZ1 | MBS1622385.1 | Bacteria | JAFDYJ010000069.1 | transposase | Bacteroidetes bacterium | |
| 2343 | FZ1 | ARF09744.1 | Viruses | KY684086.1 | hypothetical protein | Indivirus IL V1 | Unknown |
| 2344 | FZ1 | VBB17860.1 | Viruses | UPSH01000001.1 | hypothetical protein | Yasminevirus sp. GU-2018 | Unknown |
| 2345 | FZ1 | AYV78669.1 | Viruses | MK072088.1 | hypothetical protein | Edafosvirus sp. | Unknown |
| 2346 | FZ1 | ATZ80118.1 | Viruses | MF782455.1 | hypothetical protein | Bodo saltans virus | Bodo saltan (protozoa) |
| 2347 | FZ1 | AYV79948.1 | Viruses | MK072201.1 | hypothetical protein | Gaeavirus sp. | Unknown |
| 2348 | FZ1 | KAG1089314.1 | Eukaryota | JAANRD010002071.1 | hypothetical protein | Rhizopus arrhizus | |
| 2349 | FZ1 | MCH8520278.1 | Archaea | JAIUMM010000035.1 | transposase | Nanoarchaeota archaeon | |
| 2350 | FZ1 | RLN68060.1 | Eukaryota | MBAC02007609.1 | hypothetical protein | Nothophytophthora sp. | |
| | | | | | | Chile5 | |
| 2351 | FZ1 | RLN26509.1 | Eukaryota | MBAC02010695.1 | hypothetical protein | Nothophytophthora sp. | |
| | | | | | | Chile5 | |
| 2352 | FZ1 | RMH14426.1 | Bacteria | RFGN01000515.1 | hypothetical protein | Gammaproteobacteria | |
| | | | | | | bacterium | |
| 2353 | FZ1 | CDS13654.1 | Eukaryota | LK023379.1 | hypothetical protein | Lichtheimia ramosa | |
| 2354 | FZ1 | CDS11822.1 | Eukaryota | LK023350.1 | hypothetical protein | Lichtheimia ramosa | |
| 2355 | FZ1 | BDA45239.1 | Eukaryota | AP024994.1 | hypothetical protein | Coccomyxa sp. Obi | |
| 2356 | FZ1 | RMD58048.1 | Bacteria | RFLN01000255.1 | hypothetical protein | Nitrospirae bacterium | |
| 2357 | FZ1 | KAI3653082.1 | Eukaryota | JALECJ010000005.1 | hypothetical protein | Amoeboaphelidium | |
| | | | | | | protococcarum | |
| 2358 | FZ1 | KAI3642987.1 | Eukaryota | JALECJ010000258.1 | hypothetical protein | Amoeboaphelidium | |
| | | | | | | protococcarum | |
| 2359 | FZ1 | NDG67260.1 | Bacteria | RGPY01000214.1 | hypothetical protein | Actinomycetia bacterium | |
| 2360 | FZ1 | XP_031623265.1 | Eukaryota | NW 022198046.1 | uncharacterized protein | Contarinia nasturtii | |
| | | | | | LOC116340757 | | |
| 2361 | FZ1 | XP_031639167.1 | Eukaryota | NW 022202214.1 | uncharacterized protein | Contarinia nasturtii | |
| | | | | | LOC116351227 | | |
| 2362 | FZ1 | XP_031633850.1 | Eukaryota | NW 022199210.1 | uncharacterized protein | Contarinia nasturtii | |
| | | | | | LOC116347413 | | |
| 2363 | FZ1 | XP_031625311.1 | Eukaryota | NW 022197486.1 | uncharacterized protein | Contarinia nasturtii | |
| | | | | | LOC116341987 | | |
| 2364 | FZ1 | XP_031636067.1 | Eukaryota | NW 022200029.1 | uncharacterized protein | Contarinia nasturtii | |
| | | | | | LOC116348961 | | |
| 2365 | FZ1 | XP_031637630.1 | Eukaryota | NW 022200678.1 | uncharacterized protein | Contarinia nasturtii | |
| | | | | | LOC116350048 | | |
| 2366 | FZ1 | XP_031635277.1 | Eukaryota | NW 022199747.1 | uncharacterized protein | Contarinia nasturtii | |
| | | | | | LOC116348424 | | |
| 2367 | FZ1 | XP_031639324.1 | Eukaryota | NW 022202605.1 | uncharacterized protein | Contarinia nasturtii | |
| | | | | | LOC116351369 | | |
| 2368 | FZ1 | XP_037040211.1 | Eukaryota | NW 023503493.1 | uncharacterized protein | Bradysia coprophila | |
| | | | | | LOC119077137 | | |
| 2369 | FZ1 | XP_031616836.1 | Eukaryota | NW 022197544.1 | uncharacterized protein | Contarinia nasturtii | |
| | | | | | LOC116336825 | | |
| 2370 | FZ1 | XP_031627783.1 | Eukaryota | NW 022198383.1 | uncharacterized protein | Contarinia nasturtii | |
| | | | | | LOC116343711 | | |
| 2371 | FZ1 | XP_031632052.1 | Eukaryota | NW 022197486.1 | uncharacterized protein | Contarinia nasturtii | |
| | | | | | LOC116346249 | | |
| 2372 | FZ1 | XP_031618445.1 | Eukaryota | NW 022197640.1 | uncharacterized protein | Contarinia nasturtii | |
| | | | | | LOC116337743 isoform X1 | | |
| 2373 | FZ1 | XP_031637882.1 | Eukaryota | NW 022201338.1 | uncharacterized protein | Contarinia nasturtii | |
| | | | | | LOC116350273 | | |
| 2374 | FZ1 | XP_031622434.1 | Eukaryota | NW 022197486.1 | uncharacterized protein | Contarinia nasturtii | |
| | | | | | LOC116340218 | | |
| 2375 | FZ1 | XP_031623944.1 | Eukaryota | NW 022198046.1 | uncharacterized protein | Contarinia nasturtii | |
| | | | | | LOC116341170 | | |
| 2376 | FZ1 | XP_031629964.1 | Eukaryota | NW 022198581.1 | uncharacterized protein | Contarinia nasturtii | |
| | | | | | LOC116345058 | | |
| 2377 | FZ1 | XP_043475117.1 | Eukaryota | NW 025111084.1 | uncharacterized protein | Leptopilina heterotoma | |
| | | | | | LOC122506833 | | |
| 2378 | FZ1 | XP_043481162.1 | Eukaryota | NW 025111161.1 | uncharacterized protein | Leptopilina heterotoma | |
| | | | | | LOC122510516 | | |
| 2379 | FZ1 | XP_043477482.1 | Eukaryota | NW 025111115.1 | uncharacterized protein | Leptopilina heterotoma | |
| | | | | | LOC122508274 | | |
| 2380 | FZ1 | XP_043471543.1 | Eukaryota | NW 025111002.1 | uncharacterized protein | Leptopilina heterotoma | |
| | | | | | PF11 0207-like | | |
| 2381 | FZ1 | XP_043469232.1 | Eukaryota | NW 025110956.1 | uncharacterized protein | Leptopilina heterotoma | |
| | | | | | LOC122502940 | | |
| 2382 | FZ1 | XP_043476341.1 | Eukaryota | NW 025111101.1 | uncharacterized protein | Leptopilina heterotoma | |
| | | | | | LOC122507604 | | |
| 2383 | FZ1 | XP_043463730.1 | Eukaryota | NW 025110883.1 | uncharacterized protein | Leptopilina heterotoma | |
| | | | | | LOC122499438 | | |
| 2384 | FZ1 | AJD20157.1 | Viruses | KM610234.1 | transposase | Tipula oleracea nudivirus | Tipula oleracea (insecta) |
| 2385 | FZ1 | QNH90560.1 | Viruses | MN320360.1 | maco-A 94/2 86 | Mamestra configurata | Mamestra configurata (insecta) |
| | | | | | | nucleopolyhedrovirus A | |
| 2386 | FZ1 | CAF4807074.1 | Eukaryota | CAJOBZ010000006.1 | unnamed protein product | Pieris macdunnoughi | |
| 2387 | FZ1 | KAH8547694.1 | Eukaryota | JAJSME010000031.1 | hypothetical protein | Umbelopsis sp. PMI 123 | |
| 2388 | FZ1 | AYV82494.1 | Viruses | MK072383.1 | hypothetical protein | Hyperionvirus sp. | Unknown |
| 2389 | FZ1 | AYV84552.1 | Viruses | MK072411.1 | hypothetical protein | Hyperionvirus sp. | Unknown |
| 2390 | FZ1 | KAI3639350.1 | Eukaryota | JALDTO010000142.1 | hypothetical protein | Amoeboaphelidium | |
| | | | | | | protococcarum | |
| 2391 | FZ1 | KAI3646743.1 | Eukaryota | JALECJ010000256.1 | hypothetical protein | Amoeboaphelidium | |
| | | | | | | protococcarum | |
| 2392 | FZ1 | KAI3645781.1 | Eukaryota | JALECJ010000256.1 | hypothetical protein | Amoeboaphelidium | |
| | | | | | | protococcarum | |
| 2393 | FZ1 | KAI3642692.1 | Eukaryota | JALECJ010000258.1 | hypothetical protein | Amoeboaphelidium | |
| | | | | | | protococcarum | |
| 2394 | FZ1 | NBW28745.1 | Bacteria | RFPP01000063.1 | hypothetical protein | Flavobacteriaceae | |
| | | | | | | bacterium | |
| 2395 | FZ1 | NCG05012.1 | Bacteria | JAACDD010000157.1 | hypothetical protein | Bacteroidetes bacterium | |
| 2396 | FZ1 | NBP57899.1 | Bacteria | RGCK01000466.1 | hypothetical protein | bacterium | |
| 2397 | FZ1 | AYV86408.1 | Viruses | MK072507.1 | hypothetical protein | Sylvanvirus sp. | Unknown |
| 2398 | FZ1 | RLN77043.1 | Eukaryota | MBAC02006119.1 | hypothetical protein | Nothophytophthora sp. | |
| | | | | | | Chile5 | |
| 2399 | FZ1 | RLN26819.1 | Eukaryota | MBAC02010638.1 | hypothetical protein | Nothophytophthora sp. | |
| | | | | | | Chile5 | |
| 2400 | FZ1 | RLN67790.1 | Eukaryota | MBAC02007632.1 | hypothetical protein | Nothophytophthora sp. | |
| | | | | | | Chile5 | |
| 2401 | FZ1 | RLN69124.1 | Eukaryota | MBDO02000007.1 | hypothetical protein | Phytophthora kernoviae | |
| 2402 | FZ1 | RLN89470.1 | Eukaryota | MBAC02003966.1 | hypothetical protein | Nothophytophthora sp. | |
| | | | | | | Chile5 | |
| 2403 | FZ1 | KAG2954445.1 | Eukaryota | RCMK01000013.1 | hypothetical protein | Phytophthora cactorum | |
| 2404 | FZ1 | KAF1791831.1 | Eukaryota | WXXK01000603.1 | hypothetical protein | Phytophthora cactorum | |
| 2405 | FZ1 | RLN94945.1 | Eukaryota | MBAC02001676.1 | hypothetical protein | Nothophytophthora sp. | |
| | | | | | | Chile5 | |
| 2406 | FZ1 | POM79240.1 | Eukaryota | NCKW01001821.1 | DNA phosphorothioation- | Phytophthora palmivora | |
| | | | | | dependent restriction protein | var. palmivora | |
| | | | | | DptG | | |
| 2407 | FZ1 | RLN96521.1 | Eukaryota | MBAC02001011.1 | hypothetical protein | Nothophytophthora sp. | |
| | | | | | | Chile5 | |
| 2408 | FZ1 | KAG7398139.1 | Eukaryota | JAGDFL010000089.1 | hypothetical protein | Phytophthora boehmeriae | |
| 2409 | FZ1 | RLN65933.1 | Eukaryota | MBDO02000045.1 | hypothetical protein | Phytophthora kernoviae | |
| 2410 | FZ1 | RLN49762.1 | Eukaryota | MBDO02001273.1 | hypothetical protein | Phytophthora kernoviae | |
| 2411 | FZ1 | KAF4127477.1 | Eukaryota | JAACNO010003265.1 | hypothetical protein | Phytophthora infestans | |
| 2412 | FZ1 | XP_009531228.1 | Eukaryota | NW 009258120.1 | hypothetical protein | Phytophthora sojae | |
| 2413 | FZ1 | RMZ54728.1 | Eukaryota | QOKY01000173.1 | hypothetical protein | Auxenochlorella | |
| | | | | | | protothecoides | |
| 2414 | FZ1 | XP_011397847.1 | Eukaryota | NW 011934213.1 | hypothetical protein | Auxenochlorella | |
| | | | | | | protothecoides | |
| 2415 | FZ1 | KFM28038.1 | Eukaryota | KL662161.1 | hypothetical protein | Auxenochlorella | |
| | | | | | | protothecoides | |
| 2416 | FZ1 | KFM26723.1 | Eukaryota | KL662130.1 | hypothetical protein | Auxenochlorella | |
| | | | | | | protothecoides | |
| 2417 | FZ1 | KUG00132.1 | Eukaryota | LNFO01000779.1 | hypothetical protein | Phytophthora nicotianae | |
| 2418 | FZ1 | RLN75737.1 | Eukaryota | MBAC02006208.1 | hypothetical protein | Nothophytophthora sp. | |
| | | | | | | Chile5 | |
| 2419 | FZ1 | MBX8645053.1 | Archaea | JAHEAC010000156.1 | transposase | Thermoplasmata archaeon | |
| 2420 | FZ1 | KAF1317709.1 | Eukaryota | VFIW01000095.1 | hypothetical protein | Globisporangium splendens | |
| 2421 | FZ1 | BDA45247.1 | Eukaryota | AP024994.1 | hypothetical protein | Coccomyxa sp. Obi | |
| 2422 | FZ1 | RLN73346.1 | Eukaryota | MBAC02006620.1 | hypothetical protein | Nothophytophthora sp. | |
| | | | | | | Chile5 | |
| 2423 | FZ1 | XP_009520384.1 | Eukaryota | NW 009258116.1 | hypothetical protein | Phytophthora sojae | |
| 2424 | FZ1 | XP_009533819.1 | Eukaryota | NW 009258122.1 | hypothetical protein | Phytophthora sojae | |
| 2425 | FZ1 | ETO60245.1 | Eukaryota | ANJA01003965.1 | hypothetical protein | Phytophthora parasitica | |
| | | | | | | P1976 | |
| 2426 | FZ1 | RLN91973.1 | Eukaryota | MBAC02002907.1 | hypothetical protein | Nothophytophthora sp. | |
| | | | | | | Chile5 | |
| 2427 | FZ1 | RLN82979.1 | Eukaryota | MBAC02005570.1 | hypothetical protein | Nothophytophthora sp. | |
| | | | | | | Chile5 | |
| 2428 | FZ1 | TYZ64311.1 | Eukaryota | SMMQ01002239.1 | hypothetical protein | | |
| 2429 | FZ1 | KAG2424322.1 | Eukaryota | JAEHOD010000125.1 | hypothetical protein | Chlamydomonas | |
| | | | | | | schloesseri | |
| 2430 | FZ1 | PNH04425.1 | Eukaryota | PGGS01000389.1 | hypothetical protein | Tetrabaena socialis | |
| 2431 | FZ1 | PNH12515.1 | Eukaryota | PGGS01000007.1 | hypothetical protein | Tetrabaena socialis | |
| 2432 | FZ1 | GAQ90634.1 | Eukaryota | DF237614.1 | hypothetical protein | Klebsormidium nitens | |
| 2433 | FZ1 | XP_020436971.1 | Eukaryota | NW 008805064.1 | predicted protein | Heterostelium album | |
| | | | | | | PN500 | |
| 2434 | FZ1 | EFA85291.1 | Eukaryota | ADBJ01000008.1 | hypothetical protein | Heterostelium album | |
| | | | | | | PN500 | |
| 2435 | FZ1 | ORE16732.1 | Eukaryota | KV921376.1 | hypothetical protein | Rhizopus microsporus | |
| 2436 | FZ1 | KAG2230332.1 | Eukaryota | JAEPRE010000208.1 | hypothetical protein | Thamnidium elegans | |
| 2437 | FZ1 | CEP08037.1 | Eukaryota | LN719426.1 | hypothetical protein | Parasitella parasitica | |
| 2438 | FZ1 | CEP15642.1 | Eukaryota | LN732612.1 | hypothetical protein | Parasitella parasitica | |
| 2439 | FZ1 | CEG63410.1 | Eukaryota | CCYT01000001.1 | hypothetical protein | Rhizopus microsporus | |
| 2440 | FZ1 | CEG64808.1 | Eukaryota | CCYT01000002.1 | hypothetical protein | Rhizopus microsporus | |
| 2441 | FZ1 | ATU83390.1 | Viruses | MF768985.1 | ORF62 | White spot syndrome virus | Crustacea |
| 2442 | FZ1 | AUF82705.1 | Viruses | KY322437.1 | hypothetical protein | Tetraselmis virus 1 | Eukaryotic |
| | | | | | | | algae |
| 2443 | FZ1 | QIG60107.1 | Viruses | MN940580.1 | putative transposase DNA- | Dishui Lake large algae | Algae |
| | | | | | binding domain protein | virus 1 | |
| 2444 | FZ1 | MBS1983055.1 | Bacteria | JAFEAR010000040.1 | transposase | Bdellovibrionales | |
| | | | | | | bacterium | |
| 2445 | FZ1 | MCB9879830.1 | Bacteria | JACKHZ010000017.1 | hypothetical protein | Planctomycetes bacterium | |
| 2446 | FZ1 | KAG9072126.1 | Eukaryota | JAHRHY010000002.1 | hypothetical protein | Linnemannia hyalina | |
| 2447 | FZ1 | KAG0296077.1 | Eukaryota | JAAAIM010000066.1 | hypothetical protein | Linnemannia gamsii | |
| 2448 | FZ1 | KAG9062067.1 | Eukaryota | JAHRHY010000021.1 | hypothetical protein | Linnemannia hyalina | |
| 2449 | FZ1 | KAG0240861.1 | Eukaryota | JAAAIY010000054.1 | hypothetical protein | Actinomortierella wolfii | |
| 2450 | FZ1 | KAF9212845.1 | Eukaryota | JAAAUK010000336.1 | hypothetical protein | Podila verticillata | |
| 2451 | FZ1 | KAF9577551.1 | Eukaryota | JAABOA010004678.1 | hypothetical protein | Lunasporangiospora | |
| | | | | | | selenospora | |
| 2452 | FZ1 | KAG0030533.1 | Eukaryota | JAAAIE010000157.1 | hypothetical protein | Podila clonocystis | |
| 2453 | FZ1 | KAG9323317.1 | Eukaryota | JAIFTL010000106.1 | hypothetical protein | Mortierella alpina | |
| 2454 | FZ1 | GJJ73003.1 | Eukaryota | BQFW01000007.1 | hypothetical protein | Entomortierella parvispora | |
| 2455 | FZ1 | GJJ71254.1 | Eukaryota | BQFW01000005.1 | hypothetical protein | Entomortierella parvispora | |
| 2456 | FZ1 | KAG0263341.1 | Eukaryota | JAAAJB010000163.1 | hypothetical protein | Actinomortierella ambigua | |
| 2457 | FZ1 | KAF9160226.1 | Eukaryota | JAAAUS010000412.1 | hypothetical protein | Actinomortierella ambigua | |
| 2458 | FZ1 | EJK44297.1 | Eukaryota | AGNL01049890.1 | hypothetical protein | Thalassiosira oceanica | |
| 2459 | FZ1 | GKT27103.1 | Eukaryota | BQXS01012704.1 | hypothetical protein | Aduncisulcus paluster | |
| 2460 | FZ1 | GKT24803.1 | Eukaryota | BQXS01012547.1 | Malic enzyme | Aduncisulcus paluster | |
| 2461 | FZ1 | GKT28741.1 | Eukaryota | BQXS01000459.1 | hypothetical protein | Aduncisulcus paluster | |
| 2462 | FZ1 | GBG00447.1 | Eukaryota | BDRX01000226.1 | hypothetical protein | Raphidocelis subcapitata | |
| 2463 | FZ1 | KAG5175474.1 | Eukaryota | JAFCMP010000549.1 | hypothetical protein | Tribonema minus | |
| 2464 | FZ1 | KAG5187641.1 | Eukaryota | JAFCMP010000086.1 | hypothetical protein | Tribonema minus | |
| 2465 | FZ1 | KAG5181032.1 | Eukaryota | JAFCMP010000346.1 | hypothetical protein | Tribonema minus | |
| 2466 | FZ1 | KAG5186441.1 | Eukaryota | JAFCMP010000112.1 | hypothetical protein | Tribonema minus | |
| 2467 | FZ1 | KAG5186381.1 | Eukaryota | JAFCMP010000112.1 | hypothetical protein | Tribonema minus | |
| 2468 | FZ1 | CBN80449.1 | Eukaryota | FN648730.1 | n/a | Ectocarpus siliculosus | |
| 2469 | FZ1 | GBF96039.1 | Eukaryota | BDRX01000073.1 | hypothetical protein | Raphidocelis subcapitata | |
| 2470 | FZ1 | NBR24981.1 | Bacteria | RFZZ01000438.1 | hypothetical protein | Micrococcales bacterium | |
| 2471 | FZ1 | NP_597947.1 | Viruses | NC_002687.1 | EsV-1-178/222 paralog 3 | Ectocarpus siliculosus virus | Eukaryotic |
| | | | | | | 1 | algae |
| 2472 | FZ1 | KAG5188946.1 | Eukaryota | JAFCMP010000059.1 | hypothetical protein | Tribonema minus | |
| 2473 | FZ1 | KAG5191271.1 | Eukaryota | JAFCMP010000021.1 | hypothetical protein | Tribonema minus | |
| 2474 | FZ1 | KAG5192843.1 | Eukaryota | JAFCMP010000001.1 | hypothetical protein | Tribonema minus | |
| 2475 | FZ1 | KAG5184543.1 | Eukaryota | JAFCMP010000161.1 | hypothetical protein | Tribonema minus | |
| 2476 | FZ1 | KAG5175556.1 | Eukaryota | JAFCMP010000547.1 | hypothetical protein | Tribonema minus | |
| 2477 | FZ1 | KAG5186745.1 | Eukaryota | JAFCMP010000105.1 | hypothetical protein | Tribonema minus | |
| 2478 | FZ1 | OAD70046.1 | Eukaryota | KV440990.1 | hypothetical protein | Phycomyces blakesleeanus | |
| | | | | | | NRRL 1555(−) | |
| 2479 | FZ1 | RLN98441.1 | Eukaryota | MBAC02000215.1 | hypothetical protein | Nothophytophthora sp. | |
| | | | | | | Chile5 | |
| 2480 | FZ1 | KAI3434475.1 | Eukaryota | SIDB01000003.1 | hypothetical protein | Chlorella vulgaris | |
| 2481 | FZ1 | RLN37395.1 | Eukaryota | MBAC02010103.1 | hypothetical protein | Nothophytophthora sp. | |
| | | | | | | Chile5 | |
| 2482 | FZ1 | KNE68139.1 | Eukaryota | GG745355.1 | hypothetical protein | Allomyces macrogynus | |
| | | | | | | ATCC 38327 | |
| 2483 | FZ1 | ORE12334.1 | Eukaryota | KV921703.1 | hypothetical protein | Rhizopus microsporus | |
| 2484 | FZ1 | KAG0088672.1 | Eukaryota | JAAAIJ010000270.1 | Vesicle trafficking between the | Podila epicladia | |
| | | | | | ER and Golgi | | |
| 2485 | FZ1 | KAF9185547.1 | Eukaryota | JAAAUH010002294.1 | hypothetical protein | Haplosporangium sp. Z 27 | |
| 2486 | FZ1 | KAF9343722.1 | Eukaryota | JAAAUZ010002408.1 | hypothetical protein | Mortierella sp. AD094 | |
| 2487 | FZ1 | KAI3434642.1 | Eukaryota | SIDB01000003.1 | hypothetical protein | Chlorella vulgaris | |
| 2488 | FZ1 | MBS1982659.1 | Bacteria | JAFEAR010000009.1 | hypothetical protein | Bdellovibrionales | |
| | | | | | | bacterium | |
| 2489 | FZ1 | AUF82525.1 | Viruses | KY322437.1 | hypothetical protein | Tetraselmis virus 1 | Eukaryotic |
| | | | | | | | algae |
| 2490 | FZ1 | PNW83195.1 | Eukaryota | CM008967.1 | hypothetical protein | Chlamydomonas reinhardtii | |
| 2491 | FZ1 | KAG2486241.1 | Eukaryota | JAEHOE010000115.1 | hypothetical protein | Edaphochlamys debaryana | |
| 2492 | FZ1 | NLL82520.1 | Bacteria | JAAYNS010000193.1 | large conductance | Tissierellia bacterium | |
| | | | | | mechanosensitive channel | | |
| | | | | | protein MscL | | |
| 2493 | FZ1 | MBQ9297651.1 | Bacteria | JAFUGK010000002.1 | large conductance | Clostridia bacterium | |
| | | | | | mechanosensitive channel | | |
| | | | | | protein MscL | | |
| 2494 | FZ1 | KAF9967901.1 | Eukaryota | JAAAHY010000051.1 | hypothetical protein | Mortierella alpina | |
| 2495 | FZ1 | MBD0360858.1 | Archaea | JACVRJ010000760.1 | hypothetical protein | Nitrososphaeraceae | |
| | | | | | | archaeon | |
| 2496 | FZ1 | EGD75924.1 | Eukaryota | GL832956.1 | hypothetical protein | Salpingoeca rosetta | |
| 2497 | FZ1 | XP_004992632.1 | Eukaryota | NW 004754918.1 | uncharacterized protein | Salpingoeca rosetta | |
| 2498 | FZ1 | XP_004997439.1 | Eukaryota | NW 004754930.1 | uncharacterized protein | Salpingoeca rosetta | |
| 2499 | FZ1 | MBR2093592.1 | Archaea | JAFVGP010000356.1 | transposase | Candidatus | |
| | | | | | | Methanomethylophilaceae | |
| | | | | | | archaeon | |
| 2500 | FZ1 | TPX39844.1 | Eukaryota | QEAM01000439.1 | hypothetical protein | Synchytrium endobioticum | |
| 2501 | FZ1 | RLN52695.1 | Eukaryota | MBAC02008810.1 | hypothetical protein | Nothophytophthora sp. | |
| | | | | | | Chile5 | |
| 2502 | FZ1 | KUF97689.1 | Eukaryota | LNFO01000920.1 | hypothetical protein | Phytophthora nicotianae | |
| 2503 | — | WP_110887550.1 | Bacteria | NZ_QJSX01000011.1 | zinc ribbon domain-containing | Deinococcus yavapaiensis | |
| | | | | | protein | | |
| 2504 | — | WP_188904801.1 | Bacteria | NZ_BMOM01000025.1 | zinc ribbon domain-containing | Deinococcus aerophilus | |
| | | | | | protein | | |
| 2505 | — | WP_184115917.1 | Bacteria | NZ_BNAJ01000018.1 | zinc ribbon domain-containing | Deinococcus metalli | |
| | | | | | protein | | |
| 2506 | — | GGK34319.1 | Bacteria | BMPP01000014.1 | hypothetical protein | Deinococcus malanensis | |
| 2507 | — | WP_239049742.1 | Bacteria | NZ_CP092190.1 | transposase | Deinococcus sp. | |
| | | | | | | KNUC1210 | |
| 2508 | — | WP_156123126.1 | Bacteria | NZ_CP010028.1 | zinc ribbon domain-containing | Deinococcus radiopugnans | |
| | | | | | protein | | |
| 2509 | — | WP_189011282.1 | Bacteria | NZ_BMPP01000019.1 | zinc ribbon domain-containing | Deinococcus malanensis | |
| | | | | | protein | | |
| 2510 | — | WP_168734642.1 | Bacteria | NZ_SSNX01000001.1 | zinc ribbon domain-containing | Deinococcus sp. KSM4-11 | |
| | | | | | protein | | |
| 2511 | — | WP_156039424.1 | Bacteria | NZ_JNIV01000086.1 | zinc ribbon domain-containing | Deinococcus marmoris | |
| | | | | | protein | | |
| 2512 | — | AFD26700.1 | Bacteria | CP002191.1 | hypothetical protein | Deinococcus gobiensis I-0 | |
| 2513 | — | WP_075831044.1 | Bacteria | NZ_MSTI01000039.1 | zinc ribbon domain-containing | Deinococcus marmoris | |
| | | | | | protein | | |
| 2514 | — | WP_161882796.1 | Bacteria | NZ_WXZL01000013.1 | zinc ribbon domain-containing | Deinococcus alpinitundrae | |
| | | | | | protein | | |
| 2515 | — | ASN82408.1 | Bacteria | CP021082.1 | hypothetical protein | Deinococcus ficus | |
| 2516 | | MCP2014799.1 | Bacteria | JALJZW010000004.1 | hypothetical protein | Deinococcus sp. HSC- | |
| | | | | | | 46F16 | |
| 2517 | — | WP_136364774.1 | Bacteria | NZ_SSNW01000007.1 | zinc ribbon domain-containing | Deinococcus sp. Arct2-2 | |
| | | | | | protein | | |
| 2518 | — | GGM60232.1 | Bacteria | BMQG01000035.1 | hypothetical protein | Deinococcus arenae | |
| 2519 | — | KUO92809.1 | Archaea | LOBW01000009.1 | hypothetical protein | Thermocladium sp. ECH_B | |
| 2520 | — | MBL9035024.1 | Bacteria | JAEUKU010000228.1 | potassium channel family | Rhodospirillaceae | |
| | | | | | protein | bacterium | |
| 2521 | — | MCR5285990.1 | Bacteria | JAILHM010000065.1 | anti-sigma factor antagonist | Treponema sp. | |
| 2522 | — | KAF8589382.1 | Eukaryota | MU134313.1 | hypothetical protein | Ramaria rubella | |
| 2523 | — | ORX58035.1 | Eukaryota | MCGT01000007.1 | hypothetical protein | Hesseltinella vesiculosa | |
| 2524 | — | QIB74166.1 | Archaea | CP048739.1 | transposase | Halogeometricum | |
| | | | | | | borinquense | |
| 2525 | — | XP_048508078.1 | Eukaryota | NC_064028.1 | DNA repair protein XRCC4-like | Athalia rosae | |
| | | | | | isoform X2 | | |
| 2526 | — | KAG2231873.1 | Eukaryota | JAEPRE010000132.1 | hypothetical protein | Thamnidium elegans | |
| 2527 | — | XP_004353836.1 | Eukaryota | NW 004457624.1 | hypothetical protein | Cavenderia fasciculata | |
| 2528 | — | KAI4183675.1 | Eukaryota | JALAIH010000360.1 | hypothetical protein | Letrouitia leprolyta | |
| 2529 | — | WP_245693956.1 | Bacteria | NZ_FNFM01000003.1 | dihydrofolate reductase family | Actinopolyspora mzabensis | |
| | | | | | protein | | |
| 2530 | — | TPX49222.1 | Eukaryota | QEAN01000086.1 | hypothetical protein | Synchytrium endobioticum | |
| 2531 | — | HBE34010.1 | Bacteria | DNOW01000524.1 | hypothetical protein | Cyanobacteria bacterium | |
| | | | | | | UBA11368 | |
| 2532 | — | MBD2579026.1 | Bacteria | JACJSM010000015.1 | transposase | Oscillatoria sp. FACHB- | |
| | | | | | | 1406 | |
| 2533 | — | AFZ18968.1 | Bacteria | CP003630.1 | transposase | Allocoleopsis franciscana | |
| | | | | | | PCC 7113 | |
| 2534 | — | OJJ27526.1 | Bacteria | MLAW01000001.1 | hypothetical protein | Roseofilum reptotaenium | |
| | | | | | | AO1-A | |
| 2535 | — | WP_023066538.1 | Bacteria | NZ_AUZM01000024.1 | type V CRISPR-associated | Lyngbya aestuarii | |
| | | | | | protein C2c8 | | |
| 2536 | — | WP_206817738.1 | Bacteria | NZ_BLJI01000044.1 | type V CRISPR-associated | Chroococcus sp. FPU101 | |
| | | | | | protein C2c8 | | |
| 2537 | — | QNL31671.1 | Viruses | MT840188.1 | transposase | Bacteriophage sp. | |
| 2538 | — | MBD1882141.1 | Bacteria | JACJOG010000058.1 | transposase | Coleofasciculus sp. | |
| | | | | | | FACHB-T130 | |
| 2539 | — | AFW95391.1 | Bacteria | CP003284.1 | IS200/IS605 family transposase | Anabaena sp. 90 | |
| 2540 | — | MBD1846633.1 | Bacteria | JACJNX010000084.1 | transposase | Cyanobacteria bacterium | |
| | | | | | | FACHB-63 | |
| 2541 | — | AXK90473.1 | Viruses | MH636380.1 | transposase | Cylindrospermopsis | |
| | | | | | | raciborskii virus RM-2018a | |
| 2542 | — | WP_096566095.1 | Bacteria | NZ_AP018314.1 | zinc ribbon domain-containing | Sphaerospermopsis | |
| | | | | | protein | kisseleviana | |
| 2543 | — | ACK68059.1 | Bacteria | CP001287.1 | transposase IS605 OrfB | Rippkaea orientalis PCC | |
| | | | | | | 8801 | |
| 2544 | — | WP_238999151.1 | Bacteria | NZ_CP025929.1 | type V CRISPR-associated | Microcystis aeruginosa | |
| | | | | | protein C2c8 | | |
| 2545 | — | MCE2671804.1 | Bacteria | JAJTDH010000137.1 | transposase | Microcystis sp. 49638_E5 | |
| 2546 | — | MBF2098307.1 | Bacteria | JACYLR010000136.1 | transposase | Gloeomargaritaceae | |
| | | | | | | cyanobacterium | |
| | | | | | | C42 A2020 066 | |
| 2547 | — | MBL1176862.1 | Bacteria | VRZD01000020.1 | transposase | Pantanalinema sp. GBBB05 | |
| 2548 | — | OKH13190.1 | Bacteria | MRBY01000050.1 | hypothetical protein | Limnothrix rosea IAM M- | |
| | | | | | | 220 | |
| 2549 | — | MCA6546628.1 | Bacteria | JADBWM010000026.1 | transposase | Pseudanabaena sp. | |
| | | | | | | M152S2SP2A07QC | |
| 2550 | — | WP_190354083.1 | Bacteria | NZ_JACJQD010000004.1 | type V CRISPR-associated | unclassified Limnothrix | |
| | | | | | protein C2c8 | | |
| 2551 | — | WP_011994561.1 | Bacteria | NC_009718.1 | zinc ribbon domain-containing | Fervidobacterium nodosum | |
| | | | | | protein | | |
| 2552 | — | WP_013704691.1 | Bacteria | NC_015387.1 | zinc ribbon domain-containing | Marinithermus | |
| | | | | | protein | hydrothermalis | |
| 2553 | — | RIH84767.1 | Bacteria | QWLA01000052.1 | putative transposase DNA- | Calidithermus roseus | |
| | | | | | binding domain protein | | |
| 2554 | — | WP_211205272.1 | Bacteria | NC_015707.1 | transposase | Pseudothermotoga | |
| | | | | | | thermarum | |
| 2555 | — | MBP7119516.1 | Bacteria | JAGOKE010000133.1 | transposase | Candidatus Woesebacteria | |
| | | | | | | bacterium | |
| 2556 | — | MCK6512061.1 | Bacteria | JAKLKB010000105.1 | transposase | Myxococcota bacterium | |
| 2557 | — | MBU49114.1 | Bacteria | PCBK01000048.1 | transposase | Deltaproteobacteria | |
| | | | | | | bacterium | |
| 2558 | — | OLS27286.1 | Archaea | MDVS01000008.1 | hypothetical protein | Candidatus | |
| | | | | | | Heimdallarchaeota | |
| | | | | | | archaeon LC_3 | |
| 2559 | — | OLS25305.1 | Archaea | MDVS01000024.1 | hypothetical protein | Candidatus | |
| | | | | | | Heimdallarchaeota | |
| | | | | | | archaeon LC_3 | |
| 2560 | — | MCH4505645.1 | Bacteria | JAKVGX010000075.1 | transposase | Staphylococcus | |
| | | | | | | haemolyticus | |
| 2561 | — | MCL4344040.1 | Archaea | JAMCTX010000010.1 | transposase | Thaumarchaeota archaeon | |
| 2562 | — | NMG82736.1 | Archaea | WNEG01000019.1 | transposase | Methanosarcinales | |
| | | | | | | archaeon | |
| 2563 | — | WP_009886087.1 | Archaea | NC_021592.1 | RNA-guided endonuclease | Ferroplasma acidarmanus | |
| | | | | | TnpB family protein | | |
| 2564 | — | HII81737.1 | Archaea | DUHA01000005.1 | transposase | Ferroplasma sp. | |
| 2565 | — | MCQ2975058.1 | Bacteria | JAKSUC010000037.1 | transposase | Bacteroidales bacterium | |
| 2566 | — | HIS14390.1 | Bacteria | DVIF01000070.1 | transposase | Candidatus | |
| | | | | | | Ornithospirochaeta | |
| | | | | | | stercorigallinarum | |
| 2567 | — | MBR6517054.1 | Bacteria | JAFYLB010000078.1 | transposase | Bacilli bacterium | |
| 2568 | — | MCD8208490.1 | Bacteria | JAJQAQ010000426.1 | transposase | Bacteroidales bacterium | |
| 2569 | — | DAM44442.1 | Viruses | BK051965.1 | endonuclease | Siphoviridae sp. | |
| 2570 | — | MBR1611209.1 | Archaea | JAFUXR010000456.1 | transposase | Methanobrevibacter sp. | |
| 2571 | — | MBP7820117.1 | Archaea | JAGNIH010000020.1 | transposase | Candidatus | |
| | | | | | | Methanofastidiosum sp. | |
| 2572 | — | OQA20535.1 | Bacteria | MWAT01000002.1 | putative transposase DNA- | bacterium ADurb.Bin363 | |
| | | | | | binding domain protein | | |
| 2573 | — | HIV98884.1 | Bacteria | DXHU01000015.1 | transposase | Candidatus | |
| | | | | | | Ornithospirochaeta avicola | |
| 2574 | — | MCI7606606.1 | Bacteria | JALFYG010000188.1 | transposase | Spirochaetales bacterium | |
| 2575 | — | WP_239646869.1 | Bacteria | NZ_JDTQ01000004.1 | transposase | Bifidobacterium porcinum | |
| 2576 | — | PWG66759.1 | Bacteria | QFFM01000003.1 | hypothetical protein | Bifidobacterium | |
| | | | | | | callitrichidarum | |
| 2577 | — | WP_150380427.1 | Bacteria | NZ_RZUI01000001.1 | zinc ribbon domain-containing | Bifidobacterium tissieri | |
| | | | | | protein | | |
| 2578 | — | WP_217301278.1 | Bacteria | NZ_JAHOFX010000003.1 | zinc ribbon domain-containing | Bifidobacterium longum | |
| | | | | | protein | | |
| 2579 | — | WP_051224786.1 | Bacteria | NZ_AUIC01000006.1 | zinc ribbon domain-containing | Pseudoclavibacter soli | |
| | | | | | protein | | |
| 2580 | — | PZO97243.1 | Bacteria | QFNY01000441.1 | transposase | Corynebacterium | |
| | | | | | | urealyticum | |
| 2581 | — | TXG78546.1 | Bacteria | SSDS01000012.1 | transposase | Candidatus Dojkabacteria | |
| | | | | | | bacterium | |
| 2582 | — | NJO61900.1 | Bacteria | JAAURC010000127.1 | transposase | Richelia sp. RM2_1_2 | |
| 2583 | — | HIV99340.1 | Bacteria | DXHU01000023.1 | hypothetical protein | Candidatus | |
| | | | | | | Ornithospirochaeta avicola | |
| 2584 | — | MCK9577360.1 | Bacteria | JALOBO010000202.1 | zinc ribbon domain-containing | Clostridia bacterium | |
| | | | | | protein | | |
| 2585 | — | MBO8416409.1 | Bacteria | JADINH010000173.1 | transposase | Proteobacteria bacterium | |
| 2586 | — | WP_040693839.1 | Bacteria | NZ_KE150269.1 | RNA-guided endonuclease | Propionimicrobium | |
| | | | | | TnpB family protein | lymphophilum | |
| 2587 | — | AWP23921.1 | Bacteria | CP027663.1 | hypothetical protein | Acidiferrobacter sp. | |
| | | | | | | SPIII 3 | |
| 2588 | — | KGM26367.1 | Bacteria | JQOC01000019.1 | hypothetical protein | Photorhabdus luminescens | |
| 2589 | — | MBA4070970.1 | Bacteria | PNKL01000008.1 | hypothetical protein | Gemmatimonas sp. | |
| 2590 | — | PPD44013.1 | Bacteria | PERZ01000066.1 | hypothetical protein | Methylotenera sp. | |
| 2591 | — | MBS0371682.1 | Bacteria | JAFEDJ010000055.1 | transposase | Proteobacteria bacterium | |
| 2592 | — | NHK29178.1 | Bacteria | VCJR02000003.1 | transposase | Aquisalinus luteolus | |
| 2593 | — | NCA27620.1 | Bacteria | RGCI01000386.1 | transposase | Methylophilaceae | |
| | | | | | | bacterium | |
| 2594 | — | TSA39979.1 | Bacteria | QYQN01000088.1 | tetraacyldisaccharide 4'-kinase | Methylococcaceae | |
| | | | | | | bacterium | |
| 2595 | — | WP_150984704.1 | Bacteria | NZ_CP062806.1 | transposase | Cupriavidus basilensis | |
| 2596 | — | APJ03023.1 | Bacteria | CP017834.1 | hypothetical protein | Silvanigrella aquatica | |
| 2597 | — | MBN6819246.1 | Bacteria | JAFDOX010000005.1 | transposase | Methylobacterium | |
| | | | | | | organophilum | |
| 2598 | — | WP_211224688.1 | Bacteria | NZ_AULT01000023.1 | RNA-guided endonuclease | Oceanospirillum | |
| | | | | | TnpB family protein | beijerinckii | |
| 2599 | — | MBP7616328.1 | Bacteria | JAGODC010000296.1 | transposase | Steroidobacteraceae | |
| | | | | | | bacterium | |
| 2600 | — | WP_139983012.1 | Bacteria | NZ_CP041046.1 | RNA-guided endonuclease | Luteibacter pinisoli | |
| | | | | | TnpB family protein | | |
| 2601 | — | PZQ83551.1 | Bacteria | QFQJ01000196.1 | hypothetical protein | Acinetobacter johnsonii | |
| 2602 | — | PZU43279.1 | Bacteria | QFPK01000080.1 | hypothetical protein | Sphingomonas sp. | |
| 2603 | — | QBE67547.1 | Bacteria | CP035913.1 | transposase | Massilia lutea | |
| 2604 | — | DAK39748.1 | Viruses | BK036097.1 | endonuclease | Myoviridae sp. | |
| 2605 | — | WP_219907358.1 | Bacteria | NZ_QAOF01000002.1 | RNA-guided endonuclease | Sphingomonas sp. PP-CE- | |
| | | | | | TnpB family protein | 3G-477 | |
| 2606 | — | MCC6775663.1 | Bacteria | JADLHN010000037.1 | transposase | Hyphomicrobiales | |
| | | | | | | bacterium | |
| 2607 | — | CEG79098.1 | Eukaryota | CCYT01000149.1 | hypothetical protein | Rhizopus microsporus | |
| 2608 | — | KAG0237387.1 | Eukaryota | JAAAIW010000206.1 | hypothetical protein | Mortierella sp. GBA43 | |
| 2609 | — | KAG9068054.1 | Eukaryota | JAHRHY010000007.1 | hypothetical protein | Linnemannia hyalina | |
| 2610 | — | NER01279.1 | Bacteria | JAAHHI010000014.1 | PAS domain S-box protein | Okeania sp. SIO3C4 | |
| 2611 | — | MBO7109600.1 | Bacteria | JAGCOD010000193.1 | lactate utilization protein | Prevotella sp. | |
| 2612 | — | OFV81970.1 | Bacteria | MEKI01000059.1 | hypothetical protein | Acidobacteria bacterium | |
| | | | | | | RBG_13_68_16 | |
| 2613 | — | TPX33140.1 | Eukaryota | QEAN01000546.1 | hypothetical protein | Synchytrium endobioticum | |
| 2614 | — | KAF9161085.1 | Eukaryota | JAAAUS010000344.1 | hypothetical protein | Actinomortierella ambigua | |
| 2615 | — | KAG0171590.1 | Eukaryota | JAAZWU010000113.1 | hypothetical protein | Apophysomyces sp. | |
| | | | | | | BC1015 | |
| 2616 | — | EFA84021.1 | Eukaryota | ADBJ01000010.1 | proteophosphoglycan | Heterostelium album | |
| | | | | | | PN500 | |
| 2617 | — | XP_020427206.1 | Eukaryota | NW 008805075.1 | hypothetical protein | Heterostelium album | |
| | | | | | | PN500 | |
| 2618 | — | MBS1747704.1 | Bacteria | JAFDXI010000155.1 | transposase | Bacteroidetes bacterium | |
| 2619 | — | MBP7967128.1 | Bacteria | JAGNEA010000031.1 | transposase | Candidatus Woesebacteria | |
| | | | | | | bacterium | |
| 2620 | — | GBD90325.1 | Bacteria | BDSW01000107.1 | putative transposase DNA- | bacterium BMS3Abin04 | |
| | | | | | binding domain protein | | |
| 2621 | — | NCN22369.1 | Bacteria | JAACWD010000080.1 | type V CRISPR-associated | Candidatus Falkowbacteria | |
| | | | | | protein Cas12a/Cpf1 | bacterium | |
| 2622 | — | PIS39514.1 | Bacteria | PEYD01000029.1 | hypothetical protein | Candidatus Nealsonbacteria | |
| | | | | | | bacterium | |
| | | | | | | CG08_land_8_20_14_0_20_ | |
| | | | | | | 38_20 | |
| 2623 | FZ2 | CAG8448100.1 | Eukaryota | CAJVPK010000097.1 | 4676 t:CDS: 2 | Diversispora eburnea | |
| 2624 | FZ2 | KAG9289801.1 | Eukaryota | JAAOMT010000603.1 | hypothetical protein | Geosiphon pyriformis | |
| 2625 | FZ2 | MCO5565629.1 | Eukaryota | JAKNSL020003401.1 | hypothetical protein | Adiantum nelumboides | |
| 2626 | FZ2 | KAF1772473.1 | Eukaryota | WXXK01005288.1 | Transposase IS605, OrfB, C- | Phytophthora cactorum | |
| | | | | | terminal | | |
| 2627 | FZ2 | KAF1775349.1 | Eukaryota | WXXK01004774.1 | Transposase, putative, helix- | Phytophthora cactorum | |
| | | | | | turn-helix domain | | |
| 2628 | FZ2 | KAE8985833.1 | Eukaryota | QXFV01002583.1 | hypothetical protein | Phytophthora rubi | |
| 2629 | FZ2 | KUG01316.1 | Eukaryota | LNFO01000356.1 | hypothetical protein | Phytophthora nicotianae | |
| 2630 | FZ2 | RLN90125.1 | Eukaryota | MBAC02003692.1 | hypothetical protein | Nothophytophthora sp. | |
| | | | | | | Chile5 | |
| 2631 | FZ2 | OWY95916.1 | Eukaryota | NBNE01012320.1 | Oxidoreductase | Phytophthora megakarya | |
| 2632 | FZ2 | KAG2509986.1 | Eukaryota | JPWU03000623.1 | hypothetical protein | Phytophthora kernoviae | |
| 2633 | FZ2 | RLN38153.1 | Eukaryota | MAYM02000484.1 | hypothetical protein | Phytophthora kernoviae | |
| 2634 | FZ2 | QYA18551.1 | Viruses | MZ420154.1 | RuvC-like nuclease Rnase H | Clandestinovirus | Vermamoeba |
| | | | | | fold | | vermiformis |
| | | | | | | | (amoeba) |
| 2635 | FZ2 | BCU03134.1 | Viruses | LC625835.1 | transposase | Pandoravirus japonicus | Amoeba |
| 2636 | FZ2 | QPB44359.1 | Viruses | MW018138.1 | Transposase | Acanthamoeba castellanii | Acanthamoeba |
| | | | | | | medusavirus | castellanii |
| | | | | | | | (amoeba) |
| 2637 | FZ2 | AVK76442.1 | Viruses | MG011690.1 | Transposase | Pandoravirus neocaledonia | Acanthamoeba |
| | | | | | | | castellanii |
| | | | | | | | (amoeba) |
| 2638 | FZ2 | ARF10041.1 | Viruses | KY684094.1 | hypothetical protein | Indivirus ILV1 | Unknown |
| 2639 | FZ2 | YP_009507514.1 | Viruses | NC_038553.1 | transposase | Heterosigma akashiwo | Eukaryotic |
| | | | | | | virus 01 | algae |
| 2640 | FZ2 | PCJ28973.1 | Bacteria | NVVL01000024.1 | hypothetical protein | Rickettsiales bacterium | |
| 2641 | FZ2 | QOI90150.1 | Viruses | MT663534.1 | hypothetical protein | Pyramimonas orientalis | Pyramimonas |
| | | | | | | virus | orientalis |
| | | | | | | | (eukaryotic |
| | | | | | | | algae) |
| 2642 | FZ2 | NDC95497.1 | Bacteria | RGZS01000153.1 | transposase | bacterium | |
| 2643 | FZ2 | GAQ90981.1 | Eukaryota | DF237658.1 | putative Transposase IS605 | Klebsormidium nitens | |
| | | | | | OrfB C-terminal | | |
| 2644 | FZ2 | GAQ92011.1 | Eukaryota | DF237853.1 | putative Transposase IS605 | Klebsormidium nitens | |
| | | | | | OrfB C-terminal | | |
| 2645 | FZ2 | YP_001497574.1 | Viruses | NC_009898.1 | transposase | Paramecium bursaria | Paramecium |
| | | | | | | Chlorella virus NY2A | bursaria |
| | | | | | | | (ciliate, |
| | | | | | | | endosymbiotic |
| | | | | | | | relationship |
| | | | | | | | with green |
| | | | | | | | algae) |
| 2646 | FZ2 | YP_009665491.1 | Viruses | NC_043235.1 | transposase | Paramecium bursaria | Paramecium |
| | | | | | | Chlorella virus NYs1 | bursaria |
| | | | | | | | (ciliate, |
| | | | | | | | endosymbiotic |
| | | | | | | | relationship |
| | | | | | | | with green |
| | | | | | | | algae) |
| 2647 | FZ2 | NBP58269.1 | Bacteria | RGCK01000628.1 | hypothetical protein | bacterium | |
| 2648 | FZ2 | YP_009352508.1 | Viruses | NC_034249.1 | transposase | Kaumoebavirus | Vermamoeba |
| | | | | | | | vermiformis |
| | | | | | | | (amoeba) |
| 2649 | FZ2 | AYV77780.1 | Viruses | MK072066.1 | transposase | Edafosvirus sp. | Unknown |
| 2650 | FZ2 | AYV85267.1 | Viruses | MK072444.1 | putative transposase | Satyrvirus sp. | Unknown |
| 2651 | FZ2 | BCS82632.1 | Viruses | AP024483.1 | putative transposase | Cotonvirus japonicus | Acanthamoeba |
| | | | | | | | castellanii |
| | | | | | | | (amoeba) |
| 2652 | FZ2 | AKI78974.1 | Viruses | KM982401.1 | putative transposase | Acanthamoeba polyphaga | Acanthamoeba |
| | | | | | | mimivirus | (amoeba) |
| 2653 | FZ2 | BCS83717.1 | Viruses | AP024483.1 | putative transposase | Cotonvirus japonicus | Acanthamoeba |
| | | | | | | | castellanii |
| | | | | | | | amoeba |
| 2654 | FZ2 | AEQ60366.1 | Viruses | JF801956.1 | putative transposase | Acanthamoeba castellanii | Acanthamoeba |
| | | | | | | mamavirus | (amoeba) |
| 2655 | FZ2 | AYV77672.1 | Viruses | MK072066.1 | putative transposase | Edafosvirus sp. | Unknown |
| 2656 | FZ2 | NBS84840.1 | Bacteria | RFUG01000392.1 | transposase | Verrucomicrobia bacterium | |
| 2657 | FZ2 | YP_003969989.1 | Viruses | NC_014637.1 | transposase | Cafeteria roenbergensis | Cafeteria |
| | | | | | | virus BV-PW1 | roenbergensis |
| | | | | | | | (SAR) |
| 2658 | FZ2 | QKU35668.1 | Viruses | KY523104.2 | putative transposase | Tupanvirus soda lake | Acanthamoeba |
| | | | | | | | (amoeba) |
| 2659 | FZ2 | NQV78708.1 | Bacteria | JABMOC010000497.1 | transposase | Lutibacter sp. | |
| 2660 | FZ2 | MBT6753514.1 | Bacteria | JABHSZ010000011.1 | transposase | bacterium | |
| 2661 | FZ2 | ARF08566.1 | Viruses | KY684083.1 | transposase | Catovirus CTV1 | Unknown |
| 2662 | FZ2 | NBS84894.1 | Bacteria | RFUG01000422.1 | hypothetical protein | Verrucomicrobia bacterium | |
| 2663 | FZ2 | NBX76700.1 | Bacteria | RFNV01000249.1 | hypothetical protein | Proteobacteria bacterium | |
| 2664 | FZ2 | NBO39840.1 | Bacteria | RGDM01000169.1 | transposase | bacterium | |
| 2665 | FZ2 | CAH6419602.1 | Viruses | CALPDW010000001.1 | Transposase | uncultured virus | N.A. |
| 2666 | FZ2 | ARF08269.1 | Viruses | KY684083.1 | transposase | Catovirus CTV1 | Unknown |
| 2667 | FZ2 | MCK9609188.1 | Bacteria | JALOBS010000047.1 | zinc ribbon domain-containing | Methylomonas sp. | |
| | | | | | protein | | |
| 2668 | FZ2 | ARF10353.1 | Viruses | KY684103.1 | transposase | Hokovirus HKV1 | Cercozoa |
| | | | | | | | (SAR) |
| 2669 | FZ2 | AYV78324.1 | Viruses | MK072074.1 | transposase | Edafosvirus sp. | Unknown |
| 2670 | FZ2 | ATZ80679.1 | Viruses | MF782455.1 | hypothetical protein | Bodo saltans virus | Bodo saltans |
| | | | | | | | (protozoa) |
| 2671 | FZ2 | AYV78371.1 | Viruses | MK072076.1 | transposase | Edafosvirus sp. | Unknown |
| 2672 | FZ2 | CAH6421108.1 | Viruses | CALPDW010000003.1 | Transposase | uncultured virus | N.A. |
| 2673 | FZ2 | MBT4795728.1 | Bacteria | JABJPJ010000044.1 | transposase | Candidatus Marinimicrobia | |
| | | | | | | bacterium | |
| 2674 | FZ2 | NBS84428.1 | Bacteria | RFUG01000206.1 | hypothetical protein | Verrucomicrobia bacterium | |
| 2675 | FZ2 | ARF12317.1 | Viruses | KY684111.1 | transposase | Klosneuvirus KNV1 | Cercozoa |
| | | | | | | | (SAR) |
| 2676 | FZ2 | NBP03882.1 | Bacteria | RGDD01000498.1 | hypothetical protein | Proteobacteria bacterium | |
| 2677 | FZ2 | NDC56400.1 | Bacteria | RGVO01000224.1 | hypothetical protein | Alphaproteobacteria | |
| | | | | | | bacterium | |
| 2678 | FZ2 | ARF10201.1 | Viruses | KY684103.1 | transposase | Hokovirus HKV1 | Cercozoa |
| | | | | | | | (SAR) |
| 2679 | FZ2 | AYV79516.1 | Viruses | MK072150.1 | transposase | Faunusvirus sp. | Unknown |
| 2680 | FZ2 | YP_003986594.1 | Viruses | NC_014649.1 | transposase | Acanthamoeba polyphaga | Acanthamoeba |
| | | | | | | mimivirus | polyphaga |
| | | | | | | | (amoeba) |
| 2681 | FZ2 | QIG60123.1 | Viruses | MN940580.1 | putative transposase | Dishui Lake large algae | Eukaryotic |
| | | | | | | virus 1 | algae |
| 2682 | FZ2 | MBT3407180.1 | Archaea | JABGRS010000059.1 | transposase | Candidatus | |
| | | | | | | Woesearchaeota archaeon | |
| 2683 | FZ2 | AQN68586.1 | Viruses | KY110734.1 | putative transposase | Saudi moumouvirus | Acanthamoeba |
| | | | | | | | polyphaga |
| | | | | | | | (amoeba) |
| 2684 | FZ2 | QKE50536.1 | Viruses | MN956669.1 | putative transposase | Faustovirus | Vermamoeba |
| | | | | | | | vermiformis |
| | | | | | | | (amoeba) |
| 2685 | FZ2 | MCK9356748.1 | Bacteria | JALNYR010000051.1 | transposase | Dehalococcoidia bacterium | |
| 2686 | FZ2 | QJX72058.1 | Viruses | MN830295.1 | putative transposase | Faustovirus | Vermamoeba |
| | | | | | | | vermiformis |
| | | | | | | | (amoeba) |
| 2687 | FZ2 | QKE50206.1 | Viruses | MN956669.1 | putative transposase | Faustovirus | Vermamoeba |
| | | | | | | | vermiformis |
| | | | | | | | amoeba) |
| 2688 | FZ2 | RLN91820.1 | Eukaryota | MBAC02002982.1 | hypothetical protein | Nothophytophthora sp. | |
| | | | | | | Chile5 | |
| 2689 | FZ2 | RLN02906.1 | Eukaryota | MBAC02011774.1 | hypothetical protein | Nothophytophthora sp. | |
| | | | | | | Chile5 | |
| 2690 | FZ2 | KAG2381876.1 | Eukaryota | PYSW02000025.1 | hypothetical protein | Naegleria lovaniensis | |
| 2691 | FZ2 | KAG2381996.1 | Eukaryota | PYSW02000025.1 | hypothetical protein | Naegleria lovaniensis | |
| 2692 | FZ2 | NBP03464.1 | Bacteria | RGDD01000367.1 | transposase | Proteobacteria bacterium | |
| 2693 | FZ2 | AEY98553.1 | Eukaryota | CP002711.1 | FAGL264Wp | Eremothecium gossypii | |
| | | | | | | FDAG1 | |
| 2694 | FZ2 | NBU33979.1 | Bacteria | RFTN01000011.1 | hypothetical protein | bacterium | |
| 2695 | FZ2 | XP_003680532.1 | Eukaryota | NC_016503.1 | hypothetical protein | Torulaspora delbrueckii | |
| 2696 | FZ2 | CAG8681461.1 | Eukaryota | CAJVQC010016999.1 | 7673 t:CDS: 2 | Racocetra persica | |
| 2697 | FZ2 | CAG8545176.1 | Eukaryota | CAJVPU010005246.1 | 16187 t:CDS: 2 | Dentiscutata heterogama | |
| 2698 | FZ2 | CAG8498805.1 | Eukaryota | CAJVQA010000996.1 | 23018 t:CDS: 2 | Cetraspora pellucida | |
| 2699 | FZ2 | CAG8621872.1 | Eukaryota | CAJVPM010017821.1 | 5518 t:CDS: 2 | Scutellospora calospora | |
| 2700 | FZ2 | CAG8447381.1 | Eukaryota | CAJVPM010000582.1 | 9219 t:CDS: 2 | Scutellospora calospora | |
| 2701 | FZ2 | CAG8449366.1 | Eukaryota | CAJVQA010000007.1 | 8827 t:CDS: 2 | Cetraspora pellucida | |
| 2702 | FZ2 | CAG8436474.1 | Eukaryota | CAJVPM010000130.1 | 8566 t:CDS: 2 | Scutellospora calospora | |
| 2703 | FZ2 | KAF0471510.1 | Eukaryota | WTPW01000892.1 | transposase | Gigaspora margarita | |
| 2704 | FZ2 | CAG8716393.1 | Eukaryota | CAJVQB010008260.1 | 34182 t:CDS: 2 | Gigaspora margarita | |
| 2705 | FZ2 | CAG8498739.1 | Eukaryota | CAJVQB010000624.1 | 19524 t:CDS: 2 | Gigaspora margarita | |
| 2706 | FZ2 | CAB5365895.1 | Eukaryota | CAGKOT010000022.1 | unnamed protein product | Rhizophagus irregularis | |
| 2707 | FZ2 | GET01997.1 | Eukaryota | BLAL01000304.1 | ribonuclease H-like domain- | Rhizophagus clarus | |
| | | | | | containing protein | | |
| 2708 | FZ2 | RHZ81291.1 | Eukaryota | PQFF01000114.1 | hypothetical protein | Diversispora epigaea | |
| 2709 | FZ2 | CAG8768034.1 | Eukaryota | CAJVPY010018671.1 | 12453 t:CDS: 2 | Dentiscutata erythropus | |
| 2710 | FZ2 | MCP3663106.1 | Bacteria | JAAGZG010001027.1 | transposase | Gammaproteobacteria | |
| | | | | | | bacterium | |
| 2711 | FZ2 | NBO24211.1 | Bacteria | RGDG01000102.1 | transposase | Chlamydiae bacterium | |
| 2712 | FZ2 | UMO78250.1 | Viruses | MZ420562.1 | HTH OrfB IS605 superfamily | Pandoravirus | Amoeba |
| | | | | | domain containing protein | belohorizontensis | |
| 2713 | FZ2 | XP_004367500.1 | Eukaryota | NW 004457618.1 | RecF/RecN/SMC domain | Acanthamoeba castellanii | |
| | | | | | containing protein | str. Neff | |
| 2714 | FZ2 | ELR20413.1 | Eukaryota | KB007917.1 | transposase | Acanthamoeba castellanii | |
| | | | | | | str. Neff | |
| 2715 | FZ2 | QBZ81754.1 | Viruses | MK174290.1 | Transposase domain containing | Pandoravirus celtis | Amoeba |
| | | | | | protein | | |
| 2716 | FZ2 | XP_044556121.1 | Eukaryota | NW 025407823.1 | uncharacterized protein | Naegleria lovaniensis | |
| 2717 | FZ2 | XP_044543835.1 | Eukaryota | NW 025407866.1 | uncharacterized protein | Naegleria lovaniensis | |
| 2718 | FZ2 | MCK9356353.1 | Bacteria | JALNYR010000028.1 | RNA-guided endonuclease | Dehalococcoidia bacterium | |
| | | | | | TnpB family protein | | |
| 2719 | FZ2 | RHZ64154.1 | Eukaryota | PQFF01000298.1 | hypothetical protein | Diversispora epigaea | |
| 2720 | FZ2 | QDZ22394.1 | Eukaryota | CP031040.1 | putative IS605 transposase | Chloropicon primus | |
| 2721 | FZ2 | QDZ17863.1 | Eukaryota | CP031034.1 | putative IS605 transposase | Chloropicon primus | |
| 2722 | FZ2 | RHZ82200.1 | Eukaryota | PQFF01000104.1 | hypothetical protein | Diversispora epigaea | |
| 2723 | FZ2 | CDH48301.1 | Eukaryota | CBTN010000001.1 | is605 central region | Lichtheimia corymbifera | |
| | | | | | | JMRC:FSU: 9682 | |
| 2724 | FZ2 | RHZ45176.1 | Eukaryota | PQFF01000554.1 | hypothetical protein | Diversispora epigaea | |
| 2725 | FZ2 | CAG8554615.1 | Eukaryota | CAJVPW010005415.1 | 15741 t:CDS: 2 | Cetraspora pellucida | |
| 2726 | FZ2 | KAG9286232.1 | Eukaryota | JAAOMT010000706.1 | hypothetical protein | Geosiphon pyriformis | |
| 2727 | FZ2 | GAQ92077.1 | Eukaryota | DF237866.1 | putative Transposase IS605 | Klebsormidium nitens | |
| | | | | | OrfB C-terminal | | |
| 2728 | FZ2 | KAI3432486.1 | Eukaryota | SIDB01000005.1 | hypothetical protein | Chlorella vulgaris | |
| 2729 | FZ2 | MCP4449707.1 | Bacteria | JAAEPE010000924.1 | transposase | Myxococcales bacterium | |
| 2730 | FZ2 | KAF5826737.1 | Eukaryota | MU070738.1 | hypothetical protein | Dunaliella salina | |
| 2731 | FZ2 | NDH07819.1 | Bacteria | RGOU01001109.1 | hypothetical protein | bacterium | |
| 2732 | FZ2 | GAQ93499.1 | Eukaryota | DF238532.1 | putative Resolvase | Klebsormidium nitens | |
| 2733 | FZ2 | XP_007876027.1 | Eukaryota | NW 006920869.1 | uncharacterized protein | Pseudozyma flocculosa PF- | |
| | | | | | | — | |
| 2734 | FZ2 | KAE8244556.1 | Eukaryota | LWDF02000628.1 | hypothetical protein | Tilletia indica | |
| 2735 | FZ2 | KAE8236959.1 | Eukaryota | LWDF02001989.1 | hypothetical protein | Tilletia indica | |
| 2736 | FZ2 | KAE8218304.1 | Eukaryota | RDSI01000795.1 | hypothetical protein | Tilletia indica | |
| 2737 | FZ2 | MBT5424205.1 | Archaea | JABJDO010000045.1 | IS200/IS605 family element | archaeon | |
| | | | | | transposase accessory protein | | |
| | | | | | TnpB | | |
| 2738 | FZ2 | WP_157862492.1 | Bacteria | NC_013960.1 | RNA-guided endonuclease | Nitrosococcus halophilus | |
| | | | | | TnpB family protein | | |
| 2739 | FZ2 | OQW90388.1 | Bacteria | MTEL01000692.1 | hypothetical protein | Beggiatoa sp. IS2 | |
| 2740 | FZ2 | MCQ2209290.1 | Bacteria | JAKSLB010000004.1 | transposase | Paludibacteraceae | |
| | | | | | | bacterium | |
| 2741 | FZ2 | MBQ7562136.1 | Bacteria | JAFSWW010000128.1 | transposase | Synergistaceae bacterium | |
| 2742 | FZ2 | MBQ7154346.1 | Bacteria | JAFSSM010000011.1 | transposase | Synergistaceae bacterium | |
| 2743 | FZ2 | MBO6266732.1 | Bacteria | JAGBKQ010000044.1 | transposase | Synergistaceae bacterium | |
| 2744 | FZ2 | MCK9442005.1 | Archaea | JALNZQ010000161.1 | transposase | Methanothrix sp. | |
| 2745 | FZ2 | KYC36703.1 | Bacteria | ANNX02000047.1 | hypothetical protein | Scytonema hofmannii PCC | |
| | | | | | | 7110 | |
| 2746 | FZ2 | WP_102220092.1 | Bacteria | NZ_NMQG01000305.1 | transposase | Fischerella thermalis | |
| 2747 | FZ2 | MCK9325296.1 | Bacteria | JALNXW010000063.1 | transposase | Bacteroidales bacterium | |
| 2748 | FZ2 | DAN33190.1 | Viruses | BK022527.1 | endonuclease | Siphoviridae sp. | Bacteria and |
| | | | | | | | archaea |
| 2749 | FZ2 | QZI86954.1 | Viruses | MW824372.1 | transposase | Vibrio phage 184E37.3a | Vibrionaceae |
| 2750 | FZ2 | NCB78637.1 | Bacteria | SAAI01000002.1 | transposase | Bacilli bacterium | |
| 2751 | FZ2 | MBQ9446144.1 | Bacteria | JAFTDC010000349.1 | transposase | Victivallales bacterium | |
| 2752 | FZ2 | CAZ69458.1 | Viruses | FN429076.1 | putative transposase | Emiliania huxleyi virus | Eukaryotic |
| | | | | | | 99B1 | algae |
| 2753 | FZ2 | CAB1102801.1 | Eukaryota | CACKRE030000866.1 | unnamed protein product | Ectocarpus sp. CCAP | |
| | | | | | | 1310/34 | |
| 2754 | FZ2 | MBD2572243.1 | Bacteria | JACJSX010000009.1 | transposase | Arthrospira platensis | |
| | | | | | | FACHB-971 | |
| 2755 | FZ2 | PIL00893.1 | Bacteria | AXUV01000001.1 | transposase ISSoc2 | Synechococcus sp. | |
| | | | | | | 65AY640 | |
| 2756 | FZ2 | BAY42996.1 | Bacteria | AP018194.1 | IS891/IS1136/IS1341 | Scytonema sp. HK-05 | |
| | | | | | transposase | | |
| 2757 | FZ2 | WP_084639748.1 | Bacteria | NZ_LNDC01000175.1 | reverse transcriptase domain- | Geitlerinema sp. PCC 9228 | |
| | | | | | containing protein | | |
| 2758 | FZ2 | ABA24789.1 | Bacteria | CP000119.1 | Transposase, | Trichormus variabilis | |
| | | | | | IS891/IS1136/IS1341 | ATCC 29413 | |
| 2759 | FZ2 | MBR8838589.1 | Bacteria | JADQBA010000110.1 | transposase | Stigonema ocellatum SAG | |
| | | | | | | 48.90 = DSM 106950 | |
| 2760 | FZ2 | BAZ14332.1 | Bacteria | AP018255.1 | transposase | Calothrix sp. NIES-4071 | |
| 2761 | FZ2 | EDX76002.1 | Bacteria | DS989847.1 | Putative transposase DNA- | Coleofasciculus | |
| | | | | | binding domain family | chthonoplastes PCC 7420 | |
| 2762 | FZ2 | NEO58012.1 | Bacteria | JAAHHG010000525.1 | hypothetical protein | Okeania sp. SIO3B5 | |
| 2763 | FZ2 | RZK29894.1 | Bacteria | SECD01001646.1 | transposase | Hymenobacter sp. | |
| 2764 | FZ2 | NEQ75623.1 | Bacteria | JAAHGO010000033.1 | transposase | Okeania sp. SIO2C9 | |
| 2765 | FZ2 | ABU43614.1 | Viruses | DQ491003.2 | hypothetical protein | Paramecium bursaria | Paramecium |
| | | | | | | Chlorella virus AR158 | bursaria |
| | | | | | | | (ciliate, |
| | | | | | | | endosymbiotic |
| | | | | | | | relationship |
| | | | | | | | with green |
| | | | | | | | algae) |
| 2766 | FZ2 | KAI3432514.1 | Eukaryota | SIDB01000005.1 | hypothetical protein | Chlorella vulgaris | |
| 2767 | FZ2 | WP_245584685.1 | Bacteria | NZ_KE557274.1 | IS200/IS605 family accessory | Salipiger mucosus | |
| | | | | | protein TnpB-related protein | | |
| 2768 | FZ2 | KHD08873.2 | Bacteria | JSZA02000073.1 | hypothetical protein | Candidatus Thiomargarita | |
| | | | | | | nelsonii | |
| 2769 | FZ2 | DAT04529.1 | Viruses | BK042838.1 | endonuclease | Bacteriophage sp. | N.A. |
| 2770 | FZ2 | NBL01183.1 | Bacteria | SAAR01001080.1 | hypothetical protein | Erysipelotrichia bacterium | |
| 2771 | FZ2 | MCP4262678.1 | Bacteria | JAAENU010001020.1 | transposase | Planctomycetes bacterium | |
| 2772 | FZ2 | WP_020331843.1 | Bacteria | NZ_ASXS01000023.1 | RNA-guided endonuclease | Vibrio fluvialis | |
| | | | | | TnpB family protein | | |
| 2773 | FZ2 | WP_235866963.1 | Bacteria | NA | NA | Photobacterium toruni | |
| 2774 | FZ2 | KAI3658963.1 | Eukaryota | JALGPX010000058.1 | hypothetical protein | Amoeboaphelidium | |
| | | | | | | occidentale | |
| 2775 | FZ2 | CAB1120549.1 | Eukaryota | CACKRE030005181.1 | unnamed protein product | Ectocarpus sp. CCAP | |
| | | | | | | 1310/34 | |
| 2776 | FZ2 | GAX85868.1 | Eukaryota | BEGY01000198.1 | hypothetical protein | Chlamydomonas eustigma | |
| 2777 | FZ2 | MBL1211343.1 | Bacteria | VRZC01000201.1 | IS200/IS605 family element | Geminocystis sp. GBBB08 | |
| | | | | | transposase accessory protein | | |
| | | | | | TnpB | | |
| 2778 | FZ2 | CAD6944024.1 | Eukaryota | CAJHJB010000889.1 | unnamed protein product | Tilletia controversa | |
| 2779 | FZ2 | MBT3680240.1 | Bacteria | JABILT010000061.1 | transposase | Candidatus Marinimicrobia | |
| | | | | | | bacterium | |
| 2780 | FZ2 | KAI3661173.1 | Eukaryota | JALGPX010000014.1 | hypothetical protein | Amoeboaphelidium | |
| | | | | | | occidentale | |
| 2781 | FZ2 | KAI3657634.1 | Eukaryota | JALGPX010000102.1 | hypothetical protein | Amoeboaphelidium | |
| | | | | | | occidentale | |
| 2782 | FZ2 | EGD78173.1 | Eukaryota | GL832981.1 | hypothetical protein | Salpingoeca rosetta | |
| 2783 | FZ2 | EGD73462.1 | Eukaryota | GL832966.1 | hypothetical protein | Salpingoeca rosetta | |
| 2784 | FZ2 | CAG8682309.1 | Eukaryota | CAJVQA010009209.1 | 3728 t:CDS: 2 | Cetraspora pellucida | |
| 2785 | FZ2 | CAG8466918.1 | Eukaryota | CAJVQA010000299.1 | 858 t:CDS: 2 | Cetraspora pellucida | |
| 2786 | FZ2 | RHZ61369.1 | Eukaryota | PQFF01000318.1 | hypothetical protein | Diversispora epigaea | |
| 2787 | FZ2 | CAG8576195.1 | Eukaryota | CAJVPL010001539.1 | 4226 t:CDS: 2 | Ambispora gerdemannii | |
| 2788 | FZ2 | RHZ54568.1 | Eukaryota | PQFF01000377.1 | hypothetical protein | Diversispora epigaea | |
| 2789 | FZ2 | RUS69625.1 | Eukaryota | RQTK01001619.1 | hypothetical protein | Elysia chlorotica | |
| 2790 | FZ2 | KAG5704361.1 | Eukaryota | JACVVK010000091.1 | hypothetical protein | Batillaria attramentaria | |
| 2791 | FZ2 | YP_006908738.1 | Viruses | NC_018874.1 | putative methyltransferase | Abalone herpesvirus | Mollusca |
| | | | | | | Victoria/AUS/2009 | |
| 2792 | FZ2 | XP_045183411.1 | Eukaryota | NA | NA | Mercenaria mercenaria | |
| 2793 | FZ2 | KAH3797817.1 | Eukaryota | CM035921.1 | hypothetical protein | Dreissena polymorpha | |
| 2794 | FZ2 | KAI3481072.1 | Eukaryota | JAKOPN010000592.1 | hypothetical protein | Cichorium endivia | |
| 2795 | FZ2 | EST09391.1 | Eukaryota | KI545853.1 | Transposase IS605, OrfB, C- | Kalmanozyma brasiliensis | |
| | | | | | terminal | GHG001 | |
| 2796 | FZ2 | CDU26330.1 | Eukaryota | LK056694.1 | related to transposases | Sporisorium scitamineum | |
| 2797 | FZ2 | SJX65245.1 | Eukaryota | LT795069.1 | uncharacterized protein | Sporisorium reilianum f. sp. | |
| | | | | | | reilianum | |
| 2798 | FZ2 | GAC98732.1 | Eukaryota | DF238821.1 | hypothetical protein | Pseudozyma hubeiensis | |
| | | | | | | SY62 | |
| 2799 | FZ2 | SAM70572.1 | Eukaryota | LT558118.1 | uncharacterized protein | Ustilago bromivora | |
| 2800 | FZ2 | CDU22831.1 | Eukaryota | LK056657.1 | uncharacterized protein | Sporisorium scitamineum | |
| 2801 | FZ2 | GAC95491.1 | Eukaryota | DF238795.1 | hypothetical protein | Pseudozyma hubeiensis | |
| | | | | | | SY62 | |
| 2802 | FZ2 | MBV9386231.1 | Bacteria | JAFASY010000097.1 | Uma2 family endonuclease | Chroococcidiopsidaceae | |
| | | | | | | cyanobacterium | |
| | | | | | | CP_BM_ER_R8_30 | |
| 2803 | FZ2 | CAG8439319.1 | Eukaryota | CAJVPM010000245.1 | 5949 t:CDS: 2 | Scutellospora calospora | |
| 2804 | FZ2 | CBQ67901.1 | Eukaryota | FQ311430.1 | hypothetical protein | Sporisorium reilianum | |
| | | | | | | SRZ2 | |
| 2805 | FZ2 | KND49919.1 | Bacteria | LFCL01000009.1 | hypothetical protein | Parcubacteria bacterium | |
| | | | | | | C7867-002 | |
| 2806 | FZ2 | MBN2312349.1 | Bacteria | JAFGTG010000003.1 | hypothetical protein | Sedimentisphaerales | |
| | | | | | | bacterium | |
| 2807 | FZ2 | RKY70959.1 | Bacteria | QNDD01000189.1 | hypothetical protein | Candidatus Latescibacteria | |
| | | | | | | bacterium | |
| 2808 | FZ2 | DAR60917.1 | Viruses | BK057759.1 | endonuclease | Myoviridae sp. | Bacteria and |
| | | | | | | | archaea |
| 2809 | — | DAG42762.1 | Viruses | BK018044.1 | endonuclease | Bacteriophage sp. | |
| 2810 | — | MBI3412636.1 | Archaea | JACPZZ010000005.1 | IS200/IS605 family element | Candidatus | |
| | | | | | transposase accessory protein | Aenigmarchaeota archaeon | |
| | | | | | TnpB | | |
| 2811 | — | MCK9415865.1 | Bacteria | JALNZL010000034.1 | transposase | Candidatus Dojkabacteria | |
| | | | | | | bacterium | |
| 2812 | — | YP_009169107.1 | Viruses | NC_027996.1 | transposase | Firehammervirus CPt10 | |
| 2813 | — | MCK9416013.1 | Bacteria | JALNZL010000043.1 | RNA-guided endonuclease | Candidatus Dojkabacteria | |
| | | | | | TnpB family protein | bacterium | |
| 2814 | — | MCK9416319.1 | Bacteria | JALNZL010000062.1 | transposase | Candidatus Dojkabacteria | |
| | | | | | | bacterium | |
| 2815 | — | MCD6106807.1 | Bacteria | JAGGUX010000018.1 | transposase | Caldisericaceae bacterium | |
| 2816 | — | NUM36950.1 | Bacteria | JABWCH010000385.1 | transposase | Candidatus Brocadiae | |
| | | | | | | bacterium | |
| 2817 | — | GHO97234.1 | Bacteria | BNJK01000001.1 | hypothetical protein | Reticulibacter mediterranei | |
| 2818 | — | WP_218282177.1 | Bacteria | NZ_CP078093.1 | RNA-guided endonuclease | Crassaminicella sp. 143-21 | |
| | | | | | TnpB family protein | | |
| 2819 | — | MBD3214200.1 | Archaea | WJIN01000266.1 | transposase | Candidatus Lokiarchaeota | |
| | | | | | | archaeon | |
| 2820 | — | MCL5418902.1 | Archaea | JAMCZH010000003.1 | transposase | Candidatus Marsarchaeota | |
| | | | | | | archaeon | |
| 2821 | — | OKY78086.1 | Archaea | MSDW01000001.1 | IS605 OrfB-like transposable | Candidatus | |
| | | | | | element containing RNAse H- | Methanohalarchaeum | |
| | | | | | like and Zn finger domain | thermophilum | |
| 2822 | — | WP_245546408.1 | Archaea | NC_019972.1 | RNA-guided endonuclease | Methanomethylovorans | |
| | | | | | TnpB family protein | hollandica | |
| 2823 | — | WP_074174968.1 | Archaea | NZ_JAHAVR010000007.1 | RNA-guided endonuclease | Methanoculleus bourgensis | |
| | | | | | TnpB family protein | | |
| 2824 | — | WP_243276796.1 | Bacteria | NZ_JADNRQ010000004.1 | RNA-guided endonuclease | Desulfallas sp. Bu1-1 | |
| | | | | | TnpB family protein | | |
| 2825 | — | WP_054698157.1 | Bacteria | NZ_BBCE01000041.1 | RNA-guided endonuclease | Syntrophomonas | |
| | | | | | TnpB family protein | palmitatica | |
| 2826 | — | MBL4704272.1 | Bacteria | JAESSW010000294.1 | transposase | Flavobacteriales bacterium | |
| 2827 | — | UNC93582.1 | Bacteria | CP054699.1 | transposase | Candidatus Contubernalis | |
| | | | | | | alkalaceticum | |
| 2828 | — | WP_255044541.1 | Bacteria | NZ_JAKDFC010000092.1 | transposase | Photobacterium sp. | |
| | | | | | | ZSDE20 | |
| 2829 | — | MBC8230746.1 | Bacteria | JACNLI010000573.1 | transposase | bacterium | |
| 2830 | — | QQX89488.1 | Bacteria | CP068436.1 | transposase | Cupriavidus necator | |
| 2831 | — | MAT41736.1 | Bacteria | PABH01000016.1 | transposase | Anaerolineaceae bacterium | |
| 2832 | — | GJM17767.1 | Bacteria | BQJP01000164.1 | hypothetical protein | Thermodesulfobacteria | |
| | | | | | | bacterium | |
| 2833 | — | OGN58253.1 | Bacteria | MGLT01000033.1 | hypothetical protein | Chlamydiae bacterium | |
| | | | | | | RIFCSPHIGHO2_02_FULL_ | |
| | | | | | | 49_29 | |
| 2834 | — | MCI7622519.1 | Bacteria | JALFXM010000112.1 | transposase | Bacilli bacterium | |
| 2835 | — | ADI73401.1 | Archaea | CP002069.1 | transposase IS605 OrfB | Methanohalobium | |
| | | | | | | evestigatum Z-7303 | |
| 2836 | — | WP_129728869.1 | Bacteria | NZ_SCFM01000023.1 | zinc ribbon domain-containing | Ectobacillus funiculus | |
| | | | | | protein | | |
| 2837 | — | MCK9190985.1 | Bacteria | JALNVT010000065.1 | transposase | Sphaerochaetaceae | |
| | | | | | | bacterium | |
| 2838 | — | WP_132849023.1 | Bacteria | NZ_CP058648.1 | RNA-guided endonuclease | Serpentinicella alkaliphila | |
| | | | | | TnpB family protein | | |
| 2839 | — | MCK9415565.1 | Bacteria | JALNZL010000017.1 | transposase | Candidatus Dojkabacteria | |
| | | | | | | bacterium | |
| 2840 | — | MBC8517177.1 | Archaea | JACNFR010000076.1 | IS200/IS605 family element | Nitrosopumilus sp. | |
| | | | | | transposase accessory protein | | |
| | | | | | TnpB | | |
| 2841 | — | WP_015018514.1 | Archaea | NC_018719.1 | RNA-guided endonuclease | Candidatus Nitrososphaera | |
| | | | | | TnpB family protein | gargensis | |
| 2842 | -- | MBS3057616.1 | Archaea | JAGVWD010000047.1 | transposase | Candidatus Diapherotrites | |
| | | | | | | archaeon | |
| 2843 | — | MBI5347674.1 | Archaea | JACRMX010000064.1 | IS200/IS605 family element | Candidatus | |
| | | | | | transposase accessory protein | Aenigmarchaeota archaeon | |
| | | | | | TnpB | | |
| 2844 | — | MBC7113497.1 | Archaea | JACIVQ010000030.1 | IS200/IS605 family element | Candidatus | |
| | | | | | transposase accessory protein | Methanomethylicales | |
| | | | | | TnpB | archaeon | |
| 2845 | — | MBI0584709.1 | Archaea | JAEILR010000033.1 | transposase | Methanomassiliicoccus sp. | |
| 2846 | — | ELY83598.1 | Archaea | AOIK01000043.1 | transposase, IS605 OrfB family | Natrinema altunense JCM | |
| | | | | | protein | 12890 | |
| 2847 | — | EMA56586.1 | Archaea | AOMF01000030.1 | transposase, IS605 OrfB family | Halococcus thailandensis | |
| | | | | | protein | JCM 13552 | |
| 2848 | — | WP_049995599.1 | Archaea | NZ_BBMO01000003.1 | RNA-guided endonuclease | Halapricum salinum | |
| | | | | | TnpB family protein | | |
| 2849 | — | ERG94569.1 | Archaea | KE356561.1 | transposase | Haloquadratum walsbyi | |
| | | | | | | J07HQW2 | |
| 2850 | — | PTD93789.1 | Archaea | PZKD01000100.1 | hypothetical protein | archaeon SCG- | |
| | | | | | | AAA382B04 | |
| 2851 | — | NIQ06979.1 | Archaea | JAACAS010000648.1 | IS200/IS605 family element | Candidatus Korarchaeota | |
| | | | | | transposase accessory protein | archaeon | |
| | | | | | TnpB | | |
| 2852 | — | MBU3967755.1 | Archaea | JAHIFK010000232.1 | transposase | Euryarchaeota archaeon | |
| 2853 | — | MCP6728152.1 | Archaea | JANBVG010000001.1 | transposase | Metallosphaera sedula | |
| 2854 | — | MCL4391199.1 | Archaea | JAMCRY010000015.1 | transposase | Candidatus Parvarchaeota | |
| | | | | | | archaeon | |
| 2855 | — | MBD3189146.1 | Archaea | WJIK01000008.1 | IS200/IS605 family element | Candidatus | |
| | | | | | transposase accessory protein | Heimdallarchaeota | |
| | | | | | TnpB | archaeon | |
| 2856 | — | MCE7743854.1 | Archaea | JAAFKK010000014.1 | IS200/IS605 family element | Candidatus | |
| | | | | | transposase accessory protein | Heimdallarchaeota | |
| | | | | | TnpB | archaeon | |
| 2857 | — | VUT24858.1 | Archaea | CABGHG010000034.1 | putative transposase | Candidatus Methanolliviera | |
| | | | | | | sp. GoM oil | |
| 2858 | — | NYZ77894.1 | Archaea | JACCLK010000030.1 | IS200/IS605 family element | Candidatus Micrarchaeota | |
| | | | | | transposase accessory protein | archaeon | |
| | | | | | TnpB | | |
| 2859 | — | PKK86113.1 | Archaea | PGXE01000021.1 | transposase | Thermoplasmata archaeon | |
| | | | | | | HGW-Thermoplasmata-1 | |
| 2860 | — | OHE56271.1 | Archaea | MIDG01000007.1 | hypothetical protein | Thaumarchaeota archaeon | |
| | | | | | | RBG_16_49_8 | |
| 2861 | — | MCI4319561.1 | Archaea | JAKIWE010000001.1 | transposase | Thermoplasmata archaeon | |
| 2862 | — | MBI3116860.1 | Archaea | JACPUS010000208.1 | IS200/IS605 family element | Thaumarchaeota archaeon | |
| | | | | | transposase accessory protein | | |
| | | | | | TnpB | | |
| 2863 | — | MCJ7489968.1 | Archaea | JALHUA010000361.1 | transposase | Thermoplasmata archaeon | |
| 2864 | — | OLD14755.1 | Archaea | MNGN01000008.1 | hypothetical protein | Crenarchaeota archaeon | |
| | | | | | | 13_1_40CM_3_52_17 | |
| 2865 | — | WP_209620728.1 | Archaea | NZ_JAGGKD010000010.1 | RNA-guided endonuclease | Methanolobus bombayensis | |
| | | | | | TnpB family protein | | |
| 2866 | — | WP_089322883.1 | Bacteria | NZ_FZOB01000004.1 | RNA-guided endonuclease | Desulfurobacterium | |
| | | | | | TnpB family protein | atlanticum | |
| 2867 | — | MBK06402.1 | Bacteria | PBIH01000075.1 | transposase | Deltaproteobacteria | |
| | | | | | | bacterium | |
| 2868 | — | MCL5285856.1 | Bacteria | JAMCWM010000041.1 | transposase | Nitrospirae bacterium | |
| 2869 | — | SHK01165.1 | Bacteria | FRAR01000005.1 | Transposase | Desulforamulus | |
| | | | | | | aeronauticus DSM 10349 | |
| 2870 | — | WP_100667406.1 | Bacteria | NZ_CP024955.1 | RNA-guided endonuclease | Kyrpidia spormannii | |
| | | | | | TnpB family protein | | |
| 2871 | — | PWB55003.1 | Archaea | PQAS01000019.1 | hypothetical protein | Candidatus | |
| | | | | | | Methanoperedenaceae | |
| | | | | | | archaeon | |
| 2872 | — | PWB49236.1 | Archaea | PQAS01000059.1 | hypothetical protein | Candidatus | |
| | | | | | | Methanoperedenaceae | |
| | | | | | | archaeon | |
| 2873 | — | MCL4340177.1 | Archaea | JAMCTU010000037.1 | transposase | Thaumarchaeota archaeon | |
| 2874 | — | MCJ7816508.1 | Archaea | JALHYJ010000062.1 | transposase | Candidatus | |
| | | | | | | Aenigmarchaeota archaeon | |
| 2875 | — | MCL4453202.1 | Archaea | JAMCPE010000024.1 | transposase | Candidatus | |
| | | | | | | Thermoplasmatota | |
| | | | | | | archaeon | |
| 2876 | — | MCJ7443018.1 | Archaea | JALHSR010000019.1 | transposase | Methanotrichaceae | |
| | | | | | | archaeon | |
| 2877 | — | NPD90602.1 | Archaea | JABLTJ010000075.1 | transposase | Asgard group archaeon | |
| 2878 | — | MCL5963011.1 | Archaea | JAMDBY010000012.1 | transposase | Candidatus | |
| | | | | | | Thermoplasmatota | |
| | | | | | | archaeon | |
| 2879 | — | MBU4241493.1 | Bacteria | JAHIJZ010000298.1 | transposase | Actinomycetia bacterium | |
| 2880 | — | MCL4519047.1 | Archaea | JAMCQW010000269.1 | transposase | Thaumarchaeota archaeon | |
| 2881 | — | WP_244471042.1 | Bacteria | NZ_CABMGP010000010. | RNA-guided endonuclease | Microvirga massiliensis | |
| | | | | — | TnpB family protein | | |
| 2882 | — | WP_187627503.1 | Bacteria | NZ_VZQP01000009.1 | RNA-guided endonuclease | Paraburkholderia sp. | |
| | | | | | TnpB family protein | UCT31 | |
| 2883 | — | MBV6504813.1 | Bacteria | JABAQI010000026.1 | hypothetical protein | Syntrophorhabdaceae | |
| | | | | | | bacterium | |
| 2884 | — | MBK6795604.1 | Bacteria | JADJCZ010000001.1 | transposase | Acidobacteria bacterium | |
| 2885 | — | TMD01418.1 | Bacteria | VBIN01000085.1 | IS200/IS605 family element | Chloroflexi bacterium | |
| | | | | | transposase accessory protein | | |
| | | | | | TnpB | | |
| 2886 | — | MBZ1348368.1 | Bacteria | JAHXGL010000004.1 | transposase | Candidatus Nealsonbacteria | |
| | | | | | | bacterium | |
| 2887 | — | TME10471.1 | Bacteria | VBHI01000107.1 | IS200/IS605 family element | Chloroflexi bacterium | |
| | | | | | transposase accessory protein | | |
| | | | | | TnpB | | |
| 2888 | — | MBU4299576.1 | Bacteria | JAHIKZ010000146.1 | transposase | Patescibacteria group | |
| | | | | | | bacterium | |
| 2889 | — | HBE44912.1 | Bacteria | DNOT01000135.1 | transposase | Deltaproteobacteria | |
| | | | | | | bacterium | |
| 2890 | — | RKU06779.1 | Bacteria | PYIZ01000049.1 | transposase | Candidatus Poribacteria | |
| | | | | | | bacterium | |
| 2891 | — | MCE2412957.1 | Bacteria | JAGWBV010000005.1 | transposase | Candidatus Poribacteria | |
| | | | | | | bacterium | |
| 2892 | — | WP_197530008.1 | Bacteria | NC_005125.1 | RNA-guided endonuclease | Gloeobacter violaceus | |
| | | | | | TnpB family protein | | |
| 2893 | — | NJP22390.1 | Bacteria | JAAUOG010000259.1 | transposase | Hydrococcus sp. CRU 1 1 | |
| 2894 | — | NJK77417.1 | Bacteria | JAAUVE010000624.1 | transposase | Microcoleus sp. SU_5_6 | |
| 2895 | — | WP_044209975.1 | Bacteria | NZ_DS989864.1 | RNA-guided endonuclease | Coleofasciculus | |
| | | | | | TnpB family protein | chthonoplastes | |
| 2896 | — | WP_218081361.1 | Bacteria | NZ_CP062698.1 | RNA-guided endonuclease | Anthocerotibacter | |
| | | | | | TnpB family protein | panamensis | |
| 2897 | — | WP_071518710.1 | Bacteria | NZ_LNDC01000186.1 | RNA-guided endonuclease | Geitlerinema sp. PCC 9228 | |
| | | | | | TnpB family protein | | |
| 2898 | — | WP_253852254.1 | Bacteria | NZ_BHVQ01000001.1 | transposase | Microcystis aeruginosa | |
| 2899 | — | WP_017306534.1 | Bacteria | NZ_JH980292.1 | RNA-guided endonuclease | Spirulina subsalsa | |
| | | | | | TnpB family protein | | |
| 2900 | — | NEO52119.1 | Bacteria | JAAHHG010000011.1 | transposase | Okeania sp. SIO3B5 | |
| 2901 | — | WP_071590974.1 | Bacteria | NZ_CM001775.1 | RNA-guided endonuclease | Geminocystis herdmanii | |
| | | | | | TnpB family protein | | |
| 2902 | — | WP_244349240.1 | Bacteria | NZ_JAFIRA010000005.1 | transposase | Thermostichus vulcanus | |
| 2903 | — | PSB31499.1 | Bacteria | PVWH01000108.1 | transposase | filamentous | |
| | | | | | | cyanobacterium Phorm 46 | |
| 2904 | — | WP_211178757.1 | Bacteria | NZ_CP030118.1 | RNA-guided endonuclease | Brasilonema sennae | |
| | | | | | TnpB family protein | | |
| 2905 | — | CAC5344297.1 | Bacteria | CZCZ02000014.1 | hypothetical protein | Planktothrix rubescens | |
| | | | | | | NIVA-CYA 18 | |
| 2906 | — | HHV41420.1 | Bacteria | DUNL01000042.1 | IS200/IS605 family element | Clostridiaceae bacterium | |
| | | | | | transposase accessory protein | | |
| | | | | | TnpB | | |
| 2907 | — | MCJ7610412.1 | Archaea | JALHUV010000464.1 | transposase | Candidatus Bathyarchaeota | |
| | | | | | | archaeon | |
| 2908 | — | VVC05205.1 | Archaea | CABMJN010000019.1 | putative transposase | uncultured archaeon | |
| 2909 | — | MCL5405717.1 | Bacteria | JAMDAF010000063.1 | transposase | Deltaproteobacteria | |
| | | | | | | bacterium | |
| 2910 | — | WP_192623621.1 | Bacteria | NZ_JADBGG010000013.1 | RNA-guided endonuclease | Desulfomicrobium macestii | |
| | | | | | TnpB family protein | | |
| 2911 | — | WP_231480648.1 | Bacteria | NZ_JPOE01000005.1 | transposase | Thiomonas sp. FB-Cd | |
| 2912 | — | CQR37033.1 | Bacteria | CTRK01000045.1 | conserved hypothetical protein | Thiomonas arsenitoxydans | |
| 2913 | — | MBI2569529.1 | Bacteria | JACPHN010000131.1 | transposase | Candidatus | |
| | | | | | | Schekmanbacteria | |
| | | | | | | bacterium | |
| 2914 | — | MBX7220069.1 | Bacteria | JAIBAN010000016.1 | transposase | Blastocatellia bacterium | |
| 2915 | — | NBQ58279.1 | Bacteria | RGAX01000104.1 | transposase | Opitutaceae bacterium | |
| 2916 | — | EHP94718.1 | Bacteria | AGJK01000005.1 | transposase, IS605 OrfB family | Methylorubrum extorquens | |
| | | | | | | DSM 13060 | |
| 2917 | — | BBH53933.1 | Bacteria | AP019368.1 | hypothetical protein | Fluviispira sanaruensis | |
| 2918 | | WP_186392814.1 | Bacteria | NZ_FYAP01000011.1 | RNA-guided endonuclease | unclassified Pannonibacter | |
| | | | | | TnpB family protein | | |
| 2919 | — | WP_219804414.1 | Bacteria | NZ_JAHXRZ010000001.1 | RNA-guided endonuclease | Methylacidiphilum | |
| | | | | | TnpB family protein | fumariolicum | |
| 2920 | — | WP_231902061.1 | Bacteria | NA | NA | Halorhodospira halochloris | |
| 2921 | | WP_110135994.1 | Bacteria | NZ_CP027663.1 | RNA-guided endonuclease | Acidiferrobacter sp. | |
| | | | | | TnpB family protein | SPIII 3 | |
| 2922 | — | MBC8737058.1 | Bacteria | VZQP01000009.1 | transposase | Paraburkholderia sp. | |
| | | | | | | UCT31 | |
| 2923 | — | MCE2680393.1 | Bacteria | JAJTDO010000040.1 | transposase | Burkholderiales bacterium | |
| 2924 | — | USN50752.1 | Bacteria | CP060221.1 | IS200/IS605 family element | Myxococcales bacterium | |
| | | | | | transposase accessory protein | | |
| | | | | | TnpB | | |
| 2925 | — | WP_021119900.1 | Bacteria | NZ_KE557274.1 | RNA-guided endonuclease | Salipiger mucosus | |
| | | | | | TnpB family protein | | |
| 2926 | — | SOB77819.1 | Bacteria | LT907980.1 | putative transposase | Marinobacter sp. | |
| | | | | | | LV10R510-11A | |
| 2927 | — | WP_119361103.1 | Bacteria | NZ_QWKZ01000122.1 | RNA-guided endonuclease | Meiothermus luteus | |
| | | | | | TnpB family protein | | |
| 2928 | — | BAU10347.1 | Bacteria | AP017308.1 | putative | Leptolyngbya sp. NIES- | |
| | | | | | transposaseS891/IS1136/IS1341 | 3755 | |
| | | | | | family protein | | |
| 2929 | — | NEQ08595.1 | Bacteria | JAAHIE010000264.1 | transposase | Moorena sp. SIO4E2 | |
| 2930 | — | MYE17528.1 | Bacteria | VXPX01000257.1 | IS200/IS605 family element | Gemmatimonadetes | |
| | | | | | transposase accessory protein | bacterium | |
| | | | | | TnpB | | |
| 2931 | — | MCE2392665.1 | Bacteria | JAGWBS010000077.1 | transposase | Proteobacteria bacterium | |
| 2932 | — | MXW28243.1 | Bacteria | VXWO01000075.1 | IS200/IS605 family element | Chloroflexi bacterium | |
| | | | | | transposase accessory protein | | |
| | | | | | TnpB | | |
| 2933 | — | MXY93775.1 | Bacteria | VXRG01000086.1 | IS200/IS605 family element | Caldilineaceae bacterium | |
| | | | | | transposase accessory protein | SB0664_bin_27 | |
| | | | | | TnpB | | |
| 2934 | — | MXY69533.1 | Bacteria | VXRL01000057.1 | IS200/IS605 family element | Acidobacteriia bacterium | |
| | | | | | transposase accessory protein | | |
| | | | | | TnpB | | |
| 2935 | — | MXZ90091.1 | Bacteria | VXTR01000013.1 | IS200/IS605 family element | Chloroflexi bacterium | |
| | | | | | transposase accessory protein | | |
| | | | | | TnpB | | |
| 2936 | — | MXW21828.1 | Bacteria | VXXO01000010.1 | IS200/IS605 family element | Candidatus Dadabacteria | |
| | | | | | transposase accessory protein | bacterium | |
| | | | | | TnpB | | |
| 2937 | — | MCE2527613.1 | Bacteria | JAGWAM010000037.1 | transposase | Actinomycetia bacterium | |
| 2938 | — | MYH85779.1 | Bacteria | VYDN01000080.1 | IS200/IS605 family element | Gammaproteobacteria | |
| | | | | | transposase accessory protein | bacterium | |
| | | | | | TnpB | | |
| 2939 | — | WP_161993817.1 | Bacteria | NZ_RCZP01000061.1 | RNA-guided endonuclease | Roseomonas nepalensis | |
| | | | | | TnpB family protein | | |
| 2940 | — | WP_083509465.1 | Bacteria | NZ_LMTR01000028.1 | RNA-guided endonuclease | Hyphomicrobium | |
| | | | | | TnpB family protein | sulfonivorans | |
| 2941 | — | MBX3526468.1 | Bacteria | JAHBYT010000048.1 | transposase | Rhodoblastus sp. | |
| 2942 | — | MBN8815914.1 | Bacteria | JAFKLZ010000002.1 | transposase | Sphingomonas sp. | |
| 2943 | — | OZA20761.1 | Bacteria | NCII01000018.1 | hypothetical protein | Novosphingobium sp. 17- | |
| | | | | | | 62-19 | |
| 2944 | — | WP_080727058.1 | Bacteria | NZ_CAIGKD010000009.1 | RNA-guided endonuclease | Sphingobium yanoikuyae | |
| | | | | | TnpB family protein | | |
| 2945 | — | WP_093154510.1 | Bacteria | NZ_FNBW01000023.1 | RNA-guided endonuclease | Thalassobaculum litoreum | |
| | | | | | TnpB family protein | | |
| 2946 | — | WP_138392430.1 | Bacteria | NZ_VCHT01000001.1 | RNA-guided endonuclease | Rhizobium sp. MHM7A | |
| | | | | | TnpB family protein | | |
| 2947 | — | MBO0859663.1 | Bacteria | JAFMQX010000173.1 | transposase | Chloracidobacterium sp. | |
| 2948 | — | MBC6445300.1 | Bacteria | JACONH010000022.1 | IS200/IS605 family element | Alphaproteobacteria | |
| | | | | | transposase accessory protein | bacterium GM202ARS2 | |
| | | | | | TnpB | | |
| 2949 | — | TME83856.1 | Bacteria | VBFX01000158.1 | IS200/IS605 family element | Chloroflexi bacterium | |
| | | | | | transposase accessory protein | | |
| | | | | | TnpB | | |
| 2950 | — | MQA74162.1 | Bacteria | WHSW01000044.1 | IS200/IS605 family element | Solirubrobacterales | |
| | | | | | transposase accessory protein | bacterium | |
| | | | | | TnpB | | |
| 2951 | — | WP_143587156.1 | Bacteria | NZ_AP019793.1 | RNA-guided endonuclease | Thermus thermophilus | |
| | | | | | TnpB family protein | | |
| 2952 | — | MCM8738713.1 | Bacteria | JAMSLU010000007.1 | transposase | Azospirillum sp. A1-3 | |
| 2953 | — | MCJ7629376.1 | Bacteria | JALHUZ010000897.1 | transposase | Longimicrobiales | |
| | | | | | | bacterium | |
| 2954 | — | MCI2430198.1 | Bacteria | JAJHSC010000075.1 | transposase | Candidatus Acetothermia | |
| | | | | | | bacterium | |
| 2955 | — | MBU6289500.1 | Bacteria | JAGWVV010000120.1 | transposase | Chloroflexi bacterium | |
| 2956 | — | MBV9788015.1 | Bacteria | JAFAYS010000310.1 | transposase | Chloroflexi bacterium | |
| 2957 | — | MCL5892628.1 | Bacteria | JAMDCH010000038.1 | transposase | Deltaproteobacteria | |
| | | | | | | bacterium | |
| 2958 | — | MCE2449712.1 | Bacteria | JAGWBY010000081.1 | transposase | Candidatus Latescibacteria | |
| | | | | | | bacterium | |
| 2959 | — | WP_081909974.1 | Bacteria | NZ_JPIM01000003.1 | RNA-guided endonuclease | Chloroflexus sp. MS-G | |
| | | | | | TnpB family protein | | |
| 2960 | | HDM79241.1 | Bacteria | DRBG01001080.1 | transposase | Deltaproteobacteria | |
| | | | | | | bacterium | |
| 2961 | — | WP_229776094.1 | Bacteria | NZ_BMQL01000018.1 | transposase | Deinococcus ruber | |
| 2962 | — | WP_119358676.1 | Bacteria | NZ_BJXM01000049.1 | RNA-guided endonuclease | Meiothermus granaticius | |
| | | | | | TnpB family protein | | |
| 2963 | — | GHO51727.1 | Bacteria | BNJG01000001.1 | transposase | Ktedonobacter robiniae | |
| 2964 | — | KKW13184.1 | Bacteria | LCQD01000003.1 | Transposase, IS605 OrfB family | Candidatus | |
| | | | | | | Gottesmanbacteria | |
| | | | | | | bacterium | |
| | | | | | | GW2011_GWB1_49_7 | |
| 2965 | — | MCA1599052.1 | Bacteria | JAIVJW010000723.1 | transposase | Chloroflexi bacterium | |
| 2966 | — | MBC7929618.1 | Bacteria | JACMLF010000165.1 | IS200/IS605 family element | Rubrivivax sp. | |
| | | | | | transposase accessory protein | | |
| | | | | | TnpB | | |
| 2967 | — | MCI0485035.1 | Bacteria | JAKEHD010000007.1 | transposase | Blastocatellia bacterium | |
| 2968 | — | MBZ0309697.1 | Bacteria | JAIOHP010001879.1 | transposase | Anaerolineae bacterium | |
| 2969 | — | MBV8078224.1 | Bacteria | JAFAHE010000965.1 | IS200/IS605 family transposase | Planctomycetaceae | |
| | | | | | | bacterium | |
| 2970 | — | PYY05332.1 | Bacteria | QIAU01000186.1 | transposase | Acidobacteria bacterium | |
| 2971 | — | PYU18888.1 | Bacteria | QHYQ01000489.1 | transposase | Acidobacteria bacterium | |
| 2972 | — | AMH93736.1 | Archaea | CP014214.1 | transposase | methanogenic archaeon | |
| | | | | | | ISO4-H5 | |
| 2973 | — | MBE6524723.1 | Archaea | SUSW01000040.1 | transposase | Thermoplasmata archaeon | |
| 2974 | — | MCQ2078537.1 | Archaea | JAKSHU010000004.1 | transposase | archaeon | |
| 2975 | — | HJH56800.1 | Archaea | DZDL01000029.1 | transposase | Euryarchaeota archaeon | |
| 2976 | — | QHK18292.1 | Archaea | CP047880.1 | transposase | Methanomassiliicoccaceae | |
| | | | | | | archaeon DOK | |
| 2977 | — | MCQ2071440.1 | Archaea | JAKSHW010000288.1 | transposase | archaeon | |
| 2978 | — | AMH94398.1 | Archaea | CP014214.1 | transposase IS605 OrfB family | methanogenic archaeon | |
| | | | | | | ISO4-H5 | |
| 2979 | — | MCQ2078712.1 | Archaea | JAKSHU010000012.1 | transposase | archaeon | |
| 2980 | — | MBO7205127.1 | Archaea | JAGCLQ010000109.1 | transposase | Candidatus | |
| | | | | | | Methanomethylophilaceae | |
| | | | | | | archaeon | |
| 2981 | — | MBE6527074.1 | Archaea | SUSU01000012.1 | transposase | Thermoplasmata archaeon | |
| 2982 | — | MBR4504780.1 | Archaea | JAFXUX010000033.1 | transposase | Candidatus | |
| | | | | | | Methanomethylophilaceae | |
| | | | | | | archaeon | |
| 2983 | — | MBQ7700855.1 | Archaea | JAFSYZ010000017.1 | transposase | Candidatus | |
| | | | | | | Methanomethylophilaceae | |
| | | | | | | archaeon | |
| 2984 | — | MBE6513819.1 | Archaea | SUTA01000002.1 | transposase | Thermoplasmata archaeon | |
| 2985 | — | MBR6214203.1 | Archaea | JAFYAO010000062.1 | transposase | Candidatus | |
| | | | | | | Methanomethylophilaceae | |
| | | | | | | archaeon | |
| 2986 | — | MBQ8373236.1 | Archaea | JAFTNQ010000145.1 | transposase | Candidatus | |
| | | | | | | Methanomethylophilaceae | |
| | | | | | | archaeon | |
| 2987 | — | MCQ2085420.1 | Archaea | JAKSHV010000099.1 | transposase | archaeon | |
| 2988 | — | MCQ2071223.1 | Archaea | JAKSHW010000182.1 | transposase | archaeon | |
| 2989 | — | AMH94301.1 | Archaea | CP014214.1 | transposase IS605 OrfB family | methanogenic archaeon | |
| | | | | | | ISO4-H5 | |
| 2990 | — | MBE6527732.1 | Archaea | SUSV01000001.1 | transposase | Thermoplasmata archaeon | |
| 2991 | — | OQA47759.1 | Bacteria | MWBK01000154.1 | putative transposase | Bacteroidetes bacterium | |
| | | | | | | ADurb.Bin302 | |
| 2992 | — | MCE7979998.1 | Bacteria | QWII01000003.1 | hypothetical protein | Caldilinea sp. CFX5 | |
| 2993 | | GHO54331.1 | Bacteria | BNJG01000001.1 | transposase | Ktedonobacter robiniae | |
| 2994 | — | RJR10688.1 | Bacteria | QZIE01000039.1 | transposase | Candidatus Parcubacteria | |
| | | | | | | bacterium | |
| 2995 | — | MBZ0284722.1 | Bacteria | JAIOHM010000201.1 | transposase | Anaerolineae bacterium | |
| 2996 | — | RME07469.1 | Bacteria | RFKX01000009.1 | transposase | Deltaproteobacteria | |
| | | | | | | bacterium | |
| 2997 | — | MCL4427462.1 | Bacteria | JAMCQD010000016.1 | transposase | Deltaproteobacteria | |
| | | | | | | bacterium | |
| 2998 | — | RHZ36635.1 | Bacteria | NWVA01000002.1 | Transposase IS605 | endosymbiont GvMRE of | |
| | | | | | | Glomus versiforme | |
| 2999 | — | CAG8852043.1 | Eukaryota | CAJVQB010109380.1 | 11858 t:CDS:1 | Gigaspora margarita | |
| 3000 | — | MCE8167824.1 | Bacteria | JADQCO010000005.1 | transposase | Candidatus Moeniiplasma | |
| | | | | | | glomeromycotorum | |
| 3001 | — | CAH1757461.1 | Eukaryota | CAKLDN070000138.1 | 10409 t:CDS: 2 | Claroideoglomus sp. | |
| | | | | | | SA101 | |
| 3002 | — | CAG8449407.1 | Eukaryota | CAJVPZ010000020.1 | 17224 t:CDS: 2 | Racocetra fulgida | |
| 3003 | — | CAG8449613.1 | Eukaryota | CAJVPW010000303.1 | 7713 t:CDS: 2 | Cetraspora pellucida | |
| 3004 | — | KLL02323.1 | Bacteria | JPXG01000002.1 | transposase IS605 | Mycoplasmataceae | |
| | | | | | | bacterium RC_NB112A | |
| 3005 | — | CAG8823598.1 | Eukaryota | CAJVQB010036202.1 | 9952 t:CDS: 2 | Gigaspora margarita | |
| 3006 | — | MCE8163423.1 | Bacteria | JADQCM010000005.1 | transposase | Candidatus Moeniiplasma | |
| | | | | | | glomeromycotorum | |
| 3007 | — | CAG8456126.1 | Eukaryota | CAJVQB010000002.1 | 26252 t:CDS: 2 | Gigaspora margarita | |
| 3008 | — | CAG8677919.1 | Eukaryota | CAJVQC010016606.1 | 21360 t:CDS: 2 | Racocetra persica | |
| 3009 | — | KLL04772.1 | Bacteria | JQIB01000012.1 | transposase IS605 | Mycoplasmataceae | |
| | | | | | | bacterium RV_VA103A | |
| 3010 | — | CAG8456031.1 | Eukaryota | CAJVQB010000002.1 | 26244 t:CDS: 2 | Gigaspora margarita | |
| 3011 | — | CAG8609578.1 | Eukaryota | CAJVPW010009845.1 | 2988 t:CDS: 2 | Cetraspora pellucida | |
| 3012 | — | KLL05233.1 | Bacteria | JQIB01000003.1 | transposase IS605 | Mycoplasmataceae | |
| | | | | | | bacterium RV_VA103A | |
| 3013 | — | CAG8551804.1 | Eukaryota | CAJVPW010005206.1 | 878 t:CDS: 2 | Cetraspora pellucida | |
| 3014 | — | CAH1757450.1 | Eukaryota | CAKLDN070000138.1 | 10398 t:CDS:10 | Claroideoglomus sp. | |
| | | | | | | SA101 | |
| 3015 | — | CAG8465824.1 | Eukaryota | CAJVQB010000089.1 | 22869 t:CDS:10 | Gigaspora margarita | |
| 3016 | — | NLT38117.1 | Archaea | JAAYAX010000011.1 | IS200/IS605 family element | Methanomassiliicoccus sp. | |
| | | | | | transposase accessory protein | | |
| | | | | | TnpB | | |
| 3017 | — | HIH19023.1 | Archaea | DUFH01000063.1 | IS200/IS605 family element | Candidatus Micrarchaeota | |
| | | | | | transposase accessory protein | archaeon | |
| | | | | | TnpB | | |
| 3018 | — | MCL5412270.1 | Archaea | JAMCZR010000031.1 | transposase | Candidatus Marsarchaeota | |
| | | | | | | archaeon | |
| 3019 | — | QRF73798.1 | Archaea | CP060530.1 | putative transposase | Candidatus Micrarchaeum | |
| | | | | | | sp. | |
| 3020 | — | QLJ52637.1 | Archaea | CP058998.1 | Mobile element protein | Candidatus | |
| | | | | | | Fermentimicrarchaeum | |
| | | | | | | limneticum | |
| 3021 | — | MBU4267180.1 | Archaea | JAHIKS010000147.1 | transposase | Candidatus Altiarchaeota | |
| | | | | | | archaeon | |
| 3022 | — | MBI0583267.1 | Archaea | JAEILR010000006.1 | transposase | Methanomassiliicoccus sp. | |
| 3023 | — | MBU0907725.1 | Archaea | JAHIWJ010000197.1 | transposase | Nanoarchaeota archaeon | |
| 3024 | — | MBI2530166.1 | Archaea | JACPJC010000005.1 | IS200/IS605 family element | Candidatus Diapherotrites | |
| | | | | | transposase accessory protein | archaeon | |
| | | | | | TnpB | | |
| 3025 | — | MCD6230230.1 | Archaea | JAGGVJ010000045.1 | transposase | Candidatus Diapherotrites | |
| | | | | | | archaeon | |
| 3026 | — | MBI4167646.1 | Archaea | JACQNY010000047.1 | IS200/IS605 family element | Candidatus | |
| | | | | | transposase accessory protein | Aenigmarchaeota archaeon | |
| | | | | | TnpB | | |
| 3027 | — | MCK5332985.1 | Archaea | JAGLKV010000041.1 | transposase | Candidatus | |
| | | | | | | Aenigmarchaeota archaeon | |
| 3028 | — | PJA84275.1 | Bacteria | PFVR01000052.1 | transposase | Candidatus Nealsonbacteria | |
| | | | | | | bacterium | |
| | | | | | | CG_4_9_14_3_um_filter_ | |
| | | | | | | 37_13 | |
| 3029 | — | MCL4398398.1 | Archaea | JAMCRQ010000008.1 | transposase | Candidatus Parvarchaeota | |
| | | | | | | archaeon | |
| 3030 | — | MCK4670638.1 | Archaea | JAGLWF010000017.1 | transposase | Nanoarchaeota archaeon | |
| 3031 | — | MBS3167922.1 | Archaea | JAGVZM010000003.1 | transposase | Candidatus | |
| | | | | | | Woesearchaeota archaeon | |
| 3032 | — | PSN93466.1 | Archaea | NEXH01000048.1 | hypothetical protein | Candidatus Marsarchaeota | |
| | | | | | | G2 archaeon ECH_B2 | |
| 3033 | — | QBM01557.1 | Archaea | MK005748.1 | CRISPR-associated protein | uncultured archaeon | |
| | | | | | Cas14c.1 | | |
| 3034 | — | MCD8338981.1 | Bacteria | JAJPXW010000088.1 | transposase | Burkholderiales bacterium | |
| 3035 | — | TCF28248.1 | Bacteria | SHSN01000007.1 | Transposase | Bifidobacterium longum | |
| | | | | | | subsp. longum | |
| 3036 | — | WP_194677694.1 | Bacteria | NZ_JADKSL010000010.1 | RNA-guided endonuclease | Pseudoclavibacter sp. VKM | |
| | | | | | TnpB family protein | Ac-2867 | |
| 3037 | — | NWN87033.1 | Bacteria | JABXHI010000001.1 | transposase | Micrococcaceae bacterium | |
| 3038 | — | WP_249021373.1 | Bacteria | NZ_CP097127.1 | RNA-guided endonuclease | Conexibacter sp. S30A1 | |
| | | | | | TnpB family protein | | |
| 3039 | — | GIG94665.1 | Bacteria | BONX01000007.1 | transposase | Plantactinospora mayteni | |
| 3040 | — | WP_109685077.1 | Bacteria | NZ_QGDN01000001.1 | RNA-guided endonuclease | Branchiibius hedensis | |
| | | | | | TnpB family protein | | |
| 3041 | — | MVT27254.1 | Bacteria | WRPM01000095.1 | transposase | Nesterenkonia alkaliphila | |
| 3042 | — | MAG42487.1 | Bacteria | NZCJ01000191.1 | hypothetical protein | Erythrobacteraceae | |
| | | | | | | bacterium | |
| 3043 | — | MCP3922837.1 | Bacteria | JAAELO010000273.1 | transposase | Desulfobacterales | |
| | | | | | | bacterium | |
| 3044 | — | MBI4824737.1 | Bacteria | JACQZC010000096.1 | transposase | Nitrospirae bacterium | |
| 3045 | — | MBR4407413.1 | Bacteria | JAFYKO010000122.1 | transposase | Clostridia bacterium | |
| 3046 | — | ACH46754.1 | Viruses | EU916176.1 | putative transposase | Feldmannia species virus | |
| 3047 | — | MBQ9266214.1 | Bacteria | JAFUEZ010000008.1 | transposase | Bacilli bacterium | |
| 3048 | — | DAP05304.1 | Viruses | BK043923.1 | endonuclease | Siphoviridae sp. | |
| 3049 | — | RLF45298.1 | Archaea | QMTD01000066.1 | hypothetical protein | Thermoplasmata archaeon | |
| 3050 | — | ADD96417.1 | N/A | GU943139.1 | putative transposase | uncultured organism | |
| | | | | | | MedDCM-OCT-S09-C426 | |
| 3051 | — | MBO7714753.1 | Archaea | JAGCAQ010000249.1 | transposase | Methanobrevibacter sp. | |
| 3052 | — | MCH9664758.1 | Bacteria | JAHZJG010000093.1 | transposase | Gammaproteobacteria | |
| | | | | | | bacterium | |
| 3053 | — | QQO92479.1 | Viruses | MW349128.1 | transposase | Staphylococcus phage | |
| | | | | | | Machias | |
| 3054 | — | BDH16505.1 | Viruses | LC701594.1 | transposase | Bacteriophage sp. | |
| 3055 | — | BDH16487.1 | Viruses | LC701594.1 | transposase | Bacteriophage sp. | |
| 3056 | — | QDD71300.1 | Bacteria | CP029755.1 | hypothetical protein | Lactobacillus amylovorus | |
| 3057 | — | WP_245328740.1 | Bacteria | NZ_JAGGLU010000006.1 | transposase | Lactobacillus colini | |
| 3058 | — | UIK34312.1 | Bacteria | CP074196.1 | transposase | Lactobacillus amylovorus | |
| 3059 | — | WP_231520617.1 | Bacteria | NZ_JAJNVD010000040.1 | RNA-guided endonuclease | Lactobacillus delbrueckii | |
| | | | | | TnpB family protein | | |
| 3060 | — | WP_148129871.1 | Bacteria | NZ_KV793110.1 | RNA-guided endonuclease | Lactobacillus sp. | |
| | | | | | TnpB family protein | HMSC08B12 | |
| 3061 | — | DAF42628.1 | Viruses | BK032497.1 | endonuclease | Siphoviridae sp. ctHip2 | |
| 3062 | — | NBK99183.1 | Bacteria | SAAR01000246.1 | transposase | Erysipelotrichia bacterium | |
| 3063 | — | QEU46827.1 | Bacteria | CP041364.1 | transposase | Schleiferilactobacillus | |
| | | | | | | harbinensis | |
| 3064 | — | WP_093671210.1 | Bacteria | NZ_FOOY01000007.1 | RNA-guided endonuclease | Sporolactobacillus | |
| | | | | | TnpB family protein | nakayamae | |
| 3065 | — | BDH16509.1 | Viruses | LC701594.1 | transposase | Bacteriophage sp. | |
| 3066 | — | QQO92655.1 | Viruses | MW349128.1 | transposase | Staphylococcus phage | |
| | | | | | | Machias | |
| 3067 | — | NER06906.1 | Bacteria | JAAHHI010001998.1 | IS200/IS605 family element | Okeania sp. SIO3C4 | |
| | | | | | transposase accessory protein | | |
| | | | | | TnpB | | |
| 3068 | — | EAM50761.1 | Bacteria | AADV02000016.1 | Transposase, IS605 OrfB | Crocosphaera watsonii WH | |
| | | | | | | 8501 | |
| 3069 | — | MBP6437373.1 | Bacteria | JAGNRY010000129.1 | transposase | Paludibacteraceae | |
| | | | | | | bacterium | |
| 3070 | — | MCK4381516.1 | Archaea | JAGMBZ010000452.1 | transposase | Candidatus Lokiarchaeota | |
| | | | | | | archaeon | |
| 3071 | — | NES90189.1 | Bacteria | JAAHGK010000365.1 | sigma-70 family RNA | Okeania sp. SIO2B9 | |
| | | | | | polymerase sigma factor | | |
| 3072 | — | MCL5882177.1 | Archaea | JAMDCI010000128.1 | transposase | Candidatus | |
| | | | | | | Thermoplasmatota | |
| | | | | | | archaeon | |
| 3073 | — | WP_021309082.1 | Bacteria | NZ_AUSR01000025.1 | RNA-guided endonuclease | Helicobacter pylori | |
| | | | | | TnpB family protein | | |
| 3074 | — | MCI7772498.1 | Bacteria | JALEWK010000038.1 | transposase | Succinivibrio sp. | |
| 3075 | — | MCI6906812.1 | Bacteria | JALFHN010000143.1 | transposase | Succinatimonas sp. | |
| 3076 | — | WP_093141527.1 | Bacteria | NZ_FOXF01000013.1 | RNA-guided endonuclease | Ruminobacter amylophilus | |
| | | | | | TnpB family protein | | |
| 3077 | — | MTU00316.1 | Bacteria | WNCB01000002.1 | transposase | Parasutterella | |
| | | | | | | excrementihominis | |
| 3078 | — | MBR1414453.1 | Bacteria | JAFUTT010000014.1 | transposase | Prevotella sp. | |
| 3079 | — | MBR1919305.1 | Bacteria | JAFVDU010000080.1 | transposase | Spirochaetales bacterium | |
| 3080 | — | MCC9261330.1 | Archaea | JAJJVP010000066.1 | transposase | Methanobrevibacter woesei | |
| 3081 | — | MBO8427051.1 | Bacteria | JADIMY010000012.1 | transposase | Firmicutes bacterium | |
| 3082 | — | MCR4660913.1 | Bacteria | JAIKVY010000086.1 | transposase | Clostridia bacterium | |
| 3083 | — | MBF0298381.1 | Bacteria | JADGAM010000037.1 | transposase | Oligoflexia bacterium | |
| 3084 | — | DAJ68074.1 | Viruses | BK043792.1 | endonuclease | Myoviridae sp. | |
| 3085 | — | DAD62403.1 | Viruses | BK016771.1 | endonuclease | Myoviridae sp. | |
| 3086 | — | DAS49822.1 | Viruses | BK041721.1 | endonuclease | Myoviridae sp. | |
| 3087 | — | YP_009006799.1 | Viruses | NC_023573.1 | transposase | Staphylococcus phage | |
| | | | | | | phiSA12 | |
| 3088 | — | WP_152319429.1 | Bacteria | NZ_CP045180.1 | RNA-guided endonuclease | Schleiferilactobacillus | |
| | | | | | TnpB family protein | harbinensis | |
| 3089 | — | DAF42626.1 | Viruses | BK032497.1 | endonuclease | Siphoviridae sp. ctHip2 | |
| 3090 | — | WP_022859377.1 | Bacteria | NZ_ATVE01000001.1 | RNA-guided endonuclease | Bifidobacterium magnum | |
| | | | | | TnpB family protein | | |
| 3091 | — | RYQ46668.1 | Bacteria | RYVD01000016.1 | transposase | Bifidobacterium | |
| | | | | | | pseudolongum subsp. | |
| | | | | | | globosum | |
| 3092 | — | MCL2814221.1 | Bacteria | WQXD01000063.1 | transposase | Oscillospiraceae bacterium | |
| 3093 | — | MCL5066207.1 | Bacteria | JAMCVM010000208.1 | transposase | Firmicutes bacterium | |
| 3094 | — | WP_226885228.1 | Bacteria | NA | NA | Megasphaera elsdenii | |
| 3095 | — | WP_217748582.1 | Bacteria | NZ_JAHOEC010000108.1 | RNA-guided endonuclease | Catenibacterium mitsuokai | |
| | | | | | TnpB family protein | | |
| 3096 | — | WP_057961417.1 | Bacteria | NZ_BDGB01000032.1 | RNA-guided endonuclease | Lentilactobacillus | |
| | | | | | TnpB family protein | parakefiri | |
| 3097 | — | OLU43507.1 | Bacteria | MPJY01000002.1 | hypothetical protein | Erysipelotrichaceae | |
| | | | | | | bacterium NYU-BL-E8 | |
| 3098 | — | MBO5463619.1 | Bacteria | JAGAJB010000036.1 | transposase | Clostridia bacterium | |
| 3099 | — | MBR6289154.1 | Bacteria | JAFYCO010000280.1 | transposase | Acholeplasmatales | |
| | | | | | | bacterium | |
| 3100 | — | DAR38297.1 | Viruses | BK057331.1 | endonuclease | Myoviridae sp. | |
| 3101 | — | DAR38289.1 | Viruses | BK057331.1 | endonuclease | Myoviridae sp. | |
| 3102 | — | DAN11161.1 | Viruses | BK053323.1 | endonuclease | Herelleviridae sp. | |
| 3103 | — | MCF2640170.1 | Bacteria | JADYUE010000031.1 | transposase | Fusobacterium varium | |
| 3104 | — | WP_206459438.1 | Bacteria | NZ_JADQTL010000009.1 | RNA-guided endonuclease | Anaerovorax sp. IOR16 | |
| | | | | | TnpB family protein | | |
| 3105 | — | MCR5631967.1 | Bacteria | JAILOB010000013.1 | transposase | Eubacterium sp. | |
| 3106 | — | WP_169759905.1 | Bacteria | NZ_JABCUF010000002.1 | RNA-guided endonuclease | Mobiluncus curtisii | |
| | | | | | TnpB family protein | | |
| 3107 | — | MCR5236234.1 | Bacteria | JAILHN010000073.1 | transposase | Lachnospiraceae bacterium | |
| 3108 | — | MBS4458759.1 | Bacteria | JAGYWN010000025.1 | transposase | Aerococcaceae bacterium | |
| | | | | | | zg-BR33 | |
| 3109 | — | MBR1373585.1 | Bacteria | JAFUTF010000258.1 | transposase | bacterium | |
| 3110 | — | DAE79807.1 | Viruses | BK019728.1 | endonuclease | Myoviridae sp. | |
| 3111 | — | RKW35523.1 | Bacteria | RBKD01000056.1 | transposase | Leptotrichia sp. | |
| 3112 | — | PFH63948.1 | Bacteria | NUUT01000092.1 | transposase | Bacillus thuringiensis | |
| 3113 | — | MBD3950134.1 | Bacteria | JACXZV010000039.1 | IS200/IS605 family element | Aerococcaceae bacterium | |
| | | | | | transposase accessory protein | zg-1292 | |
| | | | | | TnpB | | |
| 3114 | — | HCR74349.1 | Bacteria | DQHD01000248.1 | transposase | Ruminococcus sp. | |
| 3115 | — | WP_015957564.1 | Bacteria | NA | NA | Clostridium botulinum | |
| 3116 | — | WP_158558809.1 | Bacteria | NZ_QRVW01000063.1 | RNA-guided endonuclease | Mitsuokella sp. AF21-1AC | |
| | | | | | TnpB family protein | | |
| 3117 | — | MCL1988592.1 | Bacteria | WRKG01000271.1 | transposase | Firmicutes bacterium | |
| 3118 | — | YP_007677512.1 | Viruses | NC_020877.1 | transposase | Staphylococcus phage | |
| | | | | | | vB_SauM_Romulus | |
| 3119 | — | UVD42549.1 | Viruses | ON814134.1 | mobile element protein | Staphylococcus phage | |
| | | | | | | vB_SauM-VISA19 | |
| 3120 | — | DAE81505.1 | Viruses | BK019764.1 | endonuclease | Siphoviridae sp. | |
| 3121 | — | MBR4981947.1 | Bacteria | JAFZGJ010000070.1 | transposase | Lachnospiraceae bacterium | |
| 3122 | — | DAU29303.1 | Viruses | BK050883.1 | endonuclease | Siphoviridae sp. | |
| 3123 | — | MCL2815632.1 | Bacteria | WQXD01000246.1 | transposase | Oscillospiraceae bacterium | |
| 3124 | — | MBR0202802.1 | Bacteria | JAFSNN010000027.1 | transposase | Synergistaceae bacterium | |
| 3125 | — | HBT18641.1 | Bacteria | DOKV01000040.1 | transposase | Clostridiaceae bacterium | |
| 3126 | — | WP_094546563.1 | Bacteria | NZ_NPML01000004.1 | RNA-guided endonuclease | Petroclostridium | |
| | | | | | TnpB family protein | xylanilyticum | |
| 3127 | — | DAH32600.1 | Viruses | BK018970.1 | endonuclease | Myoviridae sp. | |
| 3128 | — | MCR5423121.1 | Bacteria | JAILKP010000256.1 | transposase | Bacilli bacterium | |
| 3129 | — | MBR6288792.1 | Bacteria | JAFYCO010000201.1 | transposase | Acholeplasmatales | |
| | | | | | | bacterium | |
| 3130 | — | MCI5952430.1 | Bacteria | JALEIV010000093.1 | RNA-guided endonuclease | Anaerostipes sp. | |
| | | | | | TnpB family protein | | |
| 3131 | — | BBM88322.1 | Bacteria | AP019861.1 | hypothetical protein | Spirochaetes bacterium | |
| 3132 | — | BBM88586.1 | Bacteria | AP019861.1 | hypothetical protein | Spirochaetes bacterium | |
| 3133 | — | WP_157997897.1 | Bacteria | NZ_AFMN01000002.1 | RNA-guided endonuclease | Ligilactobacillus salivarius | |
| | | | | | TnpB family protein | | |
| 3134 | — | WP_172586041.1 | Bacteria | NZ_BLAN01000073.1 | RNA-guided endonuclease | Ligilactobacillus agilis | |
| | | | | | TnpB family protein | | |
| 3135 | — | CDA37512.1 | Bacteria | CBBS010000067.1 | transposase IS605 OrfB family | Clostridium sp. CAG:568 | |
| 3136 | — | MBP5342971.1 | Bacteria | JAGCYY010000019.1 | transposase | bacterium | |
| 3137 | — | MBR4237677.1 | Bacteria | JAFXYB010000027.1 | transposase | bacterium | |
| 3138 | — | MCD8201371.1 | Bacteria | JAJQAK010000126.1 | transposase | Clostridia bacterium | |
| 3139 | — | MBQ2493927.1 | Bacteria | JAFPIQ010000127.1 | transposase | Bacilli bacterium | |
| 3140 | — | MBQ9457997.1 | Bacteria | JAFTDF010000036.1 | transposase | Bacilli bacterium | |
| 3141 | — | MBR5007283.1 | Bacteria | JAFZDA010000470.1 | transposase | Clostridia bacterium | |
| 3142 | — | WP_204650645.1 | Bacteria | NZ_JACJKP010000053.1 | RNA-guided endonuclease | Gemmiger formicilis | |
| | | | | | TnpB family protein | | |
| 3143 | — | PWM74394.1 | Bacteria | QAKE01000024.1 | hypothetical protein | Firmicutes bacterium | |
| 3144 | — | HIX90145.1 | Bacteria | DXEF01000032.1 | transposase | Candidatus Agathobaculum | |
| | | | | | | pullicola | |
| 3145 | — | MBQ4255261.1 | Bacteria | JAFPQJ010000229.1 | transposase | Bacilli bacterium | |
| 3146 | — | RKY43038.1 | Bacteria | QNCM01000003.1 | hypothetical protein | Candidatus Omnitrophica | |
| | | | | | | bacterium | |
| 3147 | — | MCR4562174.1 | Bacteria | JAIKYF010000067.1 | transposase | Bacilli bacterium | |
| 3148 | — | MCI5669886.1 | Bacteria | JALEOJ010000035.1 | transposase | Bacilli bacterium | |
| 3149 | — | WP_077587866.1 | Bacteria | NZ_CP019640.1 | RNA-guided endonuclease | Planococcus lenghuensis | |
| | | | | | TnpB family protein | | |
| 3150 | — | WP_082832124.1 | Bacteria | NZ_FQXL01000030.1 | RNA-guided endonuclease | Clostridium magnum | |
| | | | | | TnpB family protein | | |
| 3151 | — | WP_003329838.1 | Bacteria | NZ_AJLR01000037.1 | RNA-guided endonuclease | Schinkia azotoformans | |
| | | | | | TnpB family protein | | |
| 3152 | — | WP_203225733.1 | Bacteria | NZ_CP014334.2 | IS200/IS605 family element | Fervidobacterium | |
| | | | | | RNA-guided endonuclease | islandicum | |
| | | | | | TnpB | | |
| 3153 | — | MCI5835724.1 | Bacteria | JALELF010000051.1 | transposase | Firmicutes bacterium | |
| 3154 | — | DAT93679.1 | Viruses | BK047115.1 | endonuclease | Siphoviridae sp. | |
| 3155 | — | AFV24041.1 | Archaea | CP003083.1 | transposase, IS605 OrfB family | Methanolobus | |
| | | | | | | psychrophilus R15 | |
| 3156 | — | DAR90387.1 | Viruses | BK033829.1 | endonuclease | Siphoviridae sp. | |
| 3157 | — | MBT3298737.1 | Archaea | JABGQO010000019.1 | IS200/IS605 family element | archaeon | |
| | | | | | transposase accessory protein | | |
| | | | | | TnpB | | |
| 3158 | — | AZU97638.1 | Viruses | MK257744.1 | IS200/IS605 family transposase | Thermus phage YS40_Isch | |
| | | | | | ISCsa5 | | |
| 3159 | — | HIS87246.1 | Bacteria | DVJF01000044.1 | transposase | Candidatus Caccenecus | |
| | | | | | | avistercoris | |
| 3160 | — | MBQ8234539.1 | Bacteria | JAFTVJ010000131.1 | transposase | Bacilli bacterium | |
| 3161 | — | CDB91857.1 | Bacteria | CBEJ010000032.1 | putative uncharacterized protein | Clostridium sp. CAG:302 | |
| 3162 | — | MBQ8472851.1 | Bacteria | JAFURC010000040.1 | transposase | Bacilli bacterium | |
| 3163 | — | MBR2707979.1 | Bacteria | JAFWHG010000006.1 | transposase | Bacilli bacterium | |
| 3164 | — | MCI5701572.1 | Bacteria | JALENV010000027.1 | transposase | Erysipelotrichaceae | |
| | | | | | | bacterium | |
| 3165 | — | CDF20481.1 | Bacteria | CBKL010000029.1 | transposase IS605 OrfB family | Clostridium sp. CAG:609 | |
| 3166 | — | DAT76883.1 | Viruses | BK046802.1 | endonuclease | Myoviridae sp. | |
| 3167 | — | MBE6493499.1 | Archaea | SUTP01000012.1 | transposase | Methanosphaera | |
| | | | | | | stadtmanae | |
| 3168 | — | MBE6494168.1 | Archaea | SUTP01000045.1 | transposase | Methanosphaera | |
| | | | | | | stadtmanae | |
| 3169 | — | MCH3966385.1 | Bacteria | JAKVOC010000004.1 | transposase | Bacilli bacterium | |
| 3170 | — | MBQ9071566.1 | Bacteria | JAFTRC010000006.1 | transposase | Bacilli bacterium | |
| 3171 | — | RAP48309.1 | Archaea | MUZZ01000145.1 | hypothetical protein | Methanosphaera sp. | |
| | | | | | | rholeuAM74 | |
| 3172 | — | WP_112149759.1 | Archaea | NZ_NGJK01000091.1 | RNA-guided endonuclease | Methanosphaera | |
| | | | | | TnpB family protein | stadtmanae | |
| 3173 | — | RAP43963.1 | Archaea | MVJK01000040.1 | hypothetical protein | Methanosphaera sp. | |
| | | | | | | SHI1033 | |
| 3174 | — | MBQ6218343.1 | Archaea | JAFRMD010000023.1 | transposase | Methanosphaera sp. | |
| 3175 | — | HIJ15014.1 | Archaea | DUHK01000035.1 | IS200/IS605 family element | Methanosphaera sp. | |
| | | | | | transposase accessory protein | | |
| | | | | | TnpB | | |
| 3176 | — | PTI38988.1 | Bacteria | PZFO01000114.1 | transposase | Staphylococcus succinus | |
| 3177 | — | WP_240100902.1 | Bacteria | NZ_WKNV01000012.1 | transposase | Ligilactobacillus ruminis | |
| 3178 | — | WP_152260269.1 | Bacteria | NZ_CP045143.1 | RNA-guided endonuclease | Schleiferilactobacillus | |
| | | | | | TnpB family protein | harbinensis | |
| 3179 | — | WP_228407534.1 | Bacteria | NZ_BLLH01000011.1 | transposase | Lactococcus insecticola | |
| 3180 | — | MBO8440932.1 | Bacteria | JADIMP010000011.1 | transposase | Firmicutes bacterium | |
| 3181 | — | MSB51704.1 | Bacteria | WKNV01000002.1 | IS200/IS605 family element | Ligilactobacillus ruminis | |
| | | | | | transposase accessory protein | | |
| | | | | | TnpB | | |
| 3182 | — | WP_258365280.1 | Bacteria | NZ_QJOO01000076.1 | RNA-guided endonuclease | Lactobacillus helveticus | |
| | | | | | TnpB family protein | | |
| 3183 | — | WP_201736315.1 | Bacteria | NZ_BLYW01000185.1 | RNA-guided endonuclease | Lactobacillus helveticus | |
| | | | | | TnpB family protein | | |
| 3184 | — | EEW67659.1 | Bacteria | ACLM01000122.1 | transposase, IS605 OrfB family | Lactobacillus helveticus | |
| | | | | | | DSM 20075 = CGMCC | |
| | | | | | | 1.1877 | |
| 3185 | — | TPR15003.1 | Bacteria | QUAN01000005.1 | hypothetical protein | Apilactobacillus | |
| | | | | | | timberlakei | |
| 3186 | — | WP_133441795.1 | Bacteria | NZ_CP034726.1 | RNA-guided endonuclease | Acetilactobacillus | |
| | | | | | TnpB family protein | jinshanensis | |
| 3187 | — | WP_069825575.1 | Bacteria | NZ_DF970691.1 | RNA-guided endonuclease | Pediococcus pentosaceus | |
| | | | | | TnpB family protein | | |
| 3188 | — | WP_028273173.1 | Bacteria | NZ_AUCD01000002.1 | RNA-guided endonuclease | Atopococcus tabaci | |
| | | | | | TnpB family protein | | |
| 3189 | — | NLR08416.1 | Bacteria | JAAVSC010000001.1 | IS200/IS605 family element | Lactobacillus sp. | |
| | | | | | transposase accessory protein | HBUAS51381 | |
| | | | | | TnpB | | |
| 3190 | — | NLC06091.1 | Bacteria | JAAZEF010000094.1 | IS200/IS605 family element | Erysipelothrix sp. | |
| | | | | | transposase accessory protein | | |
| | | | | | TnpB | | |
| 3191 | — | WP_079690638.1 | Bacteria | NZ_LT799838.1 | IS200/IS605 family element | Psychrobacter sp. | |
| | | | | | RNA-guided endonuclease | DAB_AL43B | |
| | | | | | TnpB | | |
| 3192 | — | WP_087908316.1 | Bacteria | NZ_CP021790.1 | glycine -- tRNA ligase subunit | Limosilactobacillus | |
| | | | | | alpha | fermentum | |
| 3193 | — | MCD7873115.1 | Bacteria | JAJQFL010000223.1 | transposase | Clostridiales bacterium | |
| 3194 | — | MBQ6518762.1 | Bacteria | JAFRHA010000106.1 | transposase | Anaerolineaceae bacterium | |
| 3195 | — | PWM20655.1 | Bacteria | QALK01000033.1 | transposase | Collinsella tanakaei | |
| 3196 | — | MCI6696469.1 | Bacteria | JALETW010000019.1 | transposase | Solobacterium sp. | |
| 3197 | — | WP_118176908.1 | Bacteria | NZ_JAQEAO010000017.1 | RNA-guided endonuclease | Mitsuokella multacida | |
| | | | | | TnpB family protein | | |
| 3198 | — | WP_133442150.1 | Bacteria | NZ_CP034726.1 | RNA-guided endonuclease | Acetilactobacillus | |
| | | | | | TnpB family protein | jinshanensis | |
| 3199 | — | WP_164508743.1 | Bacteria | NZ_RHNY01000008.1 | RNA-guided endonuclease | Levilactobacillus | |
| | | | | | TnpB family protein | tongjiangensis | |
| 3200 | — | WP_014082561.1 | Bacteria | NC_015979.1 | RNA-guided endonuclease | Fructilactobacillus | |
| | | | | | TnpB family protein | sanfranciscensis | |
| 3201 | — | WP_229282650.1 | Bacteria | NZ_JAJGUN010000066.1 | transposase | Limosilactobacillus reuteri | |
| 3202 | — | MCL8206184.1 | Bacteria | JAMGEC010000003.1 | transposase | Ligilactobacillus agilis | |
| 3203 | — | WP_054716545.1 | Bacteria | NZ_BBAH01000040.1 | RNA-guided endonuclease | Lacticaseibacillus | |
| | | | | | TnpB family protein | manihotivorans | |
| 3204 | — | WP_162260881.1 | Bacteria | NZ_AYZM01000042.1 | RNA-guided endonuclease | Secundilactobacillus similis | |
| | | | | | TnpB family protein | | |
| 3205 | — | TSO26319.1 | Bacteria | VLLR01000001.1 | IS200/IS605 family element | Lactobacillus sp. LL6 | |
| | | | | | transposase accessory protein | | |
| | | | | | TnpB | | |
| 3206 | — | WP_028983493.1 | Bacteria | NZ_JAQS01000035.1 | RNA-guided endonuclease | Sporolactobacillus terrae | |
| | | | | | TnpB family protein | | |
| 3207 | — | RKV88873.1 | Bacteria | RBKM01001879.1 | transposase | Streptococcus sp. | |
| 3208 | — | GFH41442.1 | Bacteria | BLLH01000020.1 | transposase | Lactococcus insecticola | |
| 3209 | — | WP_161691519.1 | Bacteria | NZ_JAAAMQ010000026.1 | RNA-guided endonuclease | Weissella confusa | |
| | | | | | TnpB family protein | | |
| 3210 | — | WP_195640735.1 | Bacteria | NZ_JADMRN010000003.1 | RNA-guided endonuclease | Enterococcus durans | |
| | | | | | TnpB family protein | | |
| 3211 | — | PAV11581.1 | Bacteria | NHNG01000010.1 | hypothetical protein | Arsenophonus sp. ENCA | |
| 3212 | — | HHT97712.1 | Bacteria | DUQJ01000149.1 | IS200/IS605 family element | Clostridiales bacterium | |
| | | | | | transposase accessory protein | | |
| | | | | | TnpB | | |
| 3213 | — | WP_243121340.1 | Bacteria | NZ_SPHT01000029.1 | transposase | Dorea longicatena | |
| 3214 | — | WP_195513007.1 | Bacteria | NZ_JADNMG010000014.1 | RNA-guided endonuclease | Dorea longicatena | |
| | | | | | TnpB family protein | | |
| 3215 | — | MCQ2502017.1 | Bacteria | JAKSRN010000516.1 | transposase | Lachnospiraceae bacterium | |
| 3216 | — | MZT43071.1 | Bacteria | WWVL01000067.1 | IS200/IS605 family element | Blautia wexlerae | |
| | | | | | transposase accessory protein | | |
| | | | | | TnpB | | |
| 3217 | — | MBQ0070402.1 | Bacteria | JAGHTT010000060.1 | transposase | Spirochaetales bacterium | |
| 3218 | — | WP_022738073.1 | Bacteria | NC_022567.1 | RNA-guided endonuclease | Adlercreutzia equolifaciens | |
| | | | | | TnpB family protein | | |
| 3219 | — | HJB99259.1 | Bacteria | DWXF01000013.1 | transposase | Candidatus Flavonifractor | |
| | | | | | | merdavium | |
| 3220 | — | WP_243419082.1 | Bacteria | NZ_JACJJE010000069.1 | transposase | Pseudoflavonifractor | |
| | | | | | | capillosus | |
| 3221 | — | NBI11994.1 | Bacteria | QWKG01000139.1 | transposase | Colidextribacter sp. OB.20 | |
| 3222 | — | HAP15731.1 | Bacteria | DMSZ01000249.1 | transposase | Lactococcus sp. | |
| 3223 | — | MBQ9329273.1 | Bacteria | JAFUGM010000084.1 | transposase | Solobacterium sp. | |
| 3224 | — | HHY83834.1 | Bacteria | DUSN01000113.1 | IS200/IS605 family element | Clostridiales bacterium | |
| | | | | | transposase accessory protein | | |
| | | | | | TnpB | | |
| 3225 | — | HIV15462.1 | Bacteria | DVOQ01000052.1 | transposase | Candidatus | |
| | | | | | | Avisuccinivibrio pullicola | |
| 3226 | — | MBR1858429.1 | Bacteria | JAFVCM010000113.1 | transposase | Selenomonadaceae | |
| | | | | | | bacterium | |
| 3227 | — | SCI79596.1 | Bacteria | FMFW01000012.1 | Transposase and inactivated | uncultured Eubacterium sp. | |
| | | | | | derivatives | | |
| 3228 | — | RGZ76744.1 | Bacteria | QSEP01000182.1 | transposase | Anaerobutyricum hallii | |
| 3229 | | MCI6089047.1 | Bacteria | JALFCS010000007.1 | transposase | Solobacterium sp. | |
| 3230 | — | MBR4471332.1 | Bacteria | JAFYHT010000066.1 | transposase | Erysipelotrichaceae | |
| | | | | | | bacterium | |
| 3231 | — | MCR5095964.1 | Bacteria | JAILEK010000031.1 | transposase | Erysipelotrichaceae | |
| | | | | | | bacterium | |
| 3232 | — | MBQ0036038.1 | Bacteria | JAGHUL010000046.1 | transposase | Firmicutes bacterium | |
| 3233 | — | MBQ1476579.1 | Bacteria | JAFOMB010000007.1 | transposase | Erysipelotrichaceae | |
| | | | | | | bacterium | |
| 3234 | — | MBS7353982.1 | Bacteria | JAHAYA010000245.1 | transposase | Erysipelotrichaceae | |
| | | | | | | bacterium | |
| 3235 | — | HAW12521.1 | Bacteria | DMZN01000065.1 | transposase | Erysipelotrichaceae | |
| | | | | | | bacterium | |
| 3236 | — | MBR0417883.1 | Bacteria | JAFRJA010000026.1 | transposase | Erysipelotrichaceae | |
| | | | | | | bacterium | |
| 3237 | — | MCR4805735.1 | Bacteria | JAIKZT010000290.1 | transposase | Clostridia bacterium | |
| 3238 | — | MBQ6857206.1 | Bacteria | JAFSEE010000539.1 | transposase | Lachnospiraceae bacterium | |
| 3239 | — | MCI7733003.1 | Bacteria | JALFVG010000183.1 | transposase | Solobacterium sp. | |
| 3240 | — | MBQ8926548.1 | Bacteria | JAFTZU010000188.1 | transposase | Clostridia bacterium | |
| 3241 | — | MBR4237255.1 | Bacteria | JAFXYB010000016.1 | transposase | bacterium | |
| 3242 | — | MBP3732063.1 | Bacteria | JAGAYY010000023.1 | transposase | Bacilli bacterium | |
| 3243 | — | WP_258877452.1 | Bacteria | NZ_CP048914.1 | transposase | Xianfuyuplasma | |
| | | | | | | coldseepsis | |
| 3244 | — | CDC80694.1 | Bacteria | CBFY010000067.1 | transposase | Clostridium sp. CAG:465 | |
| 3245 | — | MBR5296388.1 | Bacteria | JAFYOM010000014.1 | transposase | Parabacteroides sp. | |
| 3246 | — | WP_198038564.1 | Bacteria | NZ_CP019640.1 | RNA-guided endonuclease | Planococcus lenghuensis | |
| | | | | | TnpB family protein | | |
| 3247 | — | WP_235762362.1 | Bacteria | NZ_JAKGBW010000007.1 | transposase | Oceanobacillus sp. APA J- | |
| | | | | | | 2(6-2) | |
| 3248 | — | WP_106063962.1 | Bacteria | NZ_PVXO01000051.1 | RNA-guided endonuclease | Clostridium liquoris | |
| | | | | | TnpB family protein | | |
| 3249 | — | HHT97410.1 | Bacteria | DUQJ01000121.1 | transposase | Clostridiales bacterium | |
| 3250 | — | MCL1794082.1 | Bacteria | WRJC01000028.1 | transposase | Oscillospiraceae bacterium | |
| 3251 | — | DAV04591.1 | Viruses | BK055293.1 | endonuclease | Myoviridae sp. | |
| 3252 | — | MBP5724951.1 | Bacteria | JAGCRD010000334.1 | transposase | Bacteroidales bacterium | |
| 3253 | — | DAR50325.1 | Viruses | BK057556.1 | endonuclease | Herelleviridae sp. | |
| 3254 | — | MBO7691842.1 | Archaea | JAGCBE010000102.1 | transposase | Methanobrevibacter sp. | |
| 3255 | — | MBQ2077624.1 | Bacteria | JAFPGT010000542.1 | transposase | Bacteroidales bacterium | |
| 3256 | — | MBO7691778.1 | Archaea | JAGCBE010000102.1 | transposase | Methanobrevibacter sp. | |
| 3257 | — | GDZ57328.1 | Bacteria | BJJJ01000001.1 | transposase | Bifidobacteriaceae | |
| | | | | | | bacterium MCC01967 | |
| 3258 | — | WP_131211899.1 | Bacteria | NZ_SHQU01000024.1 | zinc ribbon domain-containing | Bifidobacterium longum | |
| | | | | | protein | | |
| 3259 | — | WP_002705582.1 | Bacteria | NZ_AGRW01000051.1 | RNA-guided endonuclease | Treponema saccharophilum | |
| | | | | | TnpB family protein | | |
| 3260 | — | MBP7022441.1 | Bacteria | JAGOMP010000101.1 | transposase | Planctomycetes bacterium | |
| 3261 | — | NCD01338.1 | Bacteria | RZYL01000039.1 | transposase | bacterium | |
| 3262 | — | WP_112123379.1 | Archaea | NZ_CP014213.1 | RNA-guided endonuclease | Methanosphaera sp. BMS | |
| | | | | | TnpB family protein | | |
| 3263 | — | MBO7719869.1 | Archaea | JAGCAP010000316.1 | transposase | Methanosphaera sp. | |
| 3264 | — | PYU00416.1 | Bacteria | QHYK01000048.1 | hypothetical protein | Acidobacteria bacterium | |
| 3265 | — | EUA17529.1 | Bacteria | JAOB01000076.1 | putative transposase family | Mycobacterium xenopi | |
| | | | | | protein | 4042 | |
| 3266 | — | MYG27085.1 | Bacteria | VYFN01000286.1 | transposase | Boseongicola sp. | |
| | | | | | | SB0677 bin 26 | |
| 3267 | — | WP_194729616.1 | Bacteria | NZ_CP064187.1 | transposase | Rhizobium sp. 007 | |
| 3268 | — | WP_246275584.1 | Bacteria | NZ_QMEB01000070.1 | RNA-guided endonuclease | Brasilonema bromeliae | |
| | | | | | TnpB family protein | | |
| 3269 | — | WP_242460739.1 | Bacteria | NZ_BLKX01000003.1 | transposase | Mycobacterium | |
| | | | | | | paragordonae | |
| 3270 | — | MCP4117230.1 | Bacteria | JAAEMK010000682.1 | transposase | Desulfobacteraceae | |
| | | | | | | bacterium | |
| 3271 | — | WP_189009513.1 | Bacteria | NZ_BMOD01000054.1 | RNA-guided endonuclease | Deinococcus roseus | |
| | | | | | TnpB family protein | | |
| 3272 | — | WP_046278043.1 | Bacteria | NZ_LATL02000298.1 | RNA-guided endonuclease | Limnoraphis robusta | |
| | | | | | TnpB family protein | | |
| 3273 | — | WP_017659290.1 | Bacteria | NZ_KB235958.1 | RNA-guided endonuclease | Baaleninema simplex | |
| | | | | | TnpB family protein | | |
| 3274 | — | WP_231516797.1 | Bacteria | NZ_LR735025.1 | RNA-guided endonuclease | Planktothrix | |
| | | | | | TnpB family protein | paucivesiculata | |
| 3275 | — | MBK4730540.1 | Bacteria | JAEOXH010000001.1 | transposase | Oxynema sp. CENA135 | |
| 3276 | — | WP_023171751.1 | Bacteria | NC_022600.1 | RNA-guided endonuclease | Gloeobacter kilaueensis | |
| | | | | | TnpB family protein | | |
| 3277 | — | GCE51428.1 | Bacteria | BIFX01000003.1 | hypothetical protein | Thermosporothrix | |
| | | | | | | hazakensis | |
| 3278 | — | WP_014072533.1 | Bacteria | NC_015970.1 | RNA-guided endonuclease | Rhodothermus marinus | |
| | | | | | TnpB family protein | | |
| 3279 | — | WP_117510008.1 | Bacteria | NZ_QTUL01000007.1 | RNA-guided endonuclease | Blautia sp. AM23-13AC | |
| | | | | | TnpB family protein | | |
| 3280 | — | MBQ4255510.1 | Bacteria | JAFPQJ010000290.1 | transposase | Bacilli bacterium | |
| 3281 | — | NLM15870.1 | Bacteria | JAAYNF010000147.1 | IS200/IS605 family element | Clostridiaceae bacterium | |
| | | | | | transposase accessory protein | | |
| | | | | | TnpB | | |
| 3282 | — | NLV47829.1 | Bacteria | JAAYBY010000119.1 | IS200/IS605 family element | Clostridiaceae bacterium | |
| | | | | | transposase accessory protein | | |
| | | | | | TnpB | | |
| 3283 | — | NLM78279.1 | Bacteria | JAAYLM010000281.1 | IS200/IS605 family element | Oscillospiraceae bacterium | |
| | | | | | transposase accessory protein | | |
| | | | | | TnpB | | |
| 3284 | — | MBQ8420488.1 | Bacteria | JAFTRO010000112.1 | transposase | Clostridia bacterium | |
| 3285 | — | WP_182447934.1 | Bacteria | NZ_QUCP01000001.1 | RNA-guided endonuclease | Ruminococcus sp. AM18- | |
| | | | | | TnpB family protein | 44 | |
| 3286 | — | SCX79138.1 | Bacteria | FMUV01000001.1 | Probable transposase | Ruminococcus bromii | |
| 3287 | — | MCF0138474.1 | Bacteria | JABUSQ010000211.1 | transposase | Oscillospiraceae bacterium | |
| 3288 | — | MBR3353866.1 | Bacteria | JAFWNH010000002.1 | transposase | Oscillospiraceae bacterium | |
| 3289 | — | DAZ23597.1 | Viruses | BK026140.1 | endonuclease | Siphoviridae sp. | |
| 3290 | — | MCH3966554.1 | Bacteria | JAKVOC010000006.1 | transposase | Bacilli bacterium | |
| 3291 | — | MCI1735160.1 | Bacteria | JALCLG010000001.1 | transposase | Bacilli bacterium | |
| 3292 | — | MCI1734607.1 | Bacteria | JALCLG010000001.1 | transposase | Bacilli bacterium | |
| 3293 | — | WP_180234931.1 | Bacteria | NZ_NUFZ01000035.1 | RNA-guided endonuclease | Priestia megaterium | |
| | | | | | TnpB family protein | | |
| 3294 | — | QST02325.1 | Bacteria | CP062975.1 | IS200/IS605 family element | Pontibacillus sp. ALD SL1 | |
| | | | | | transposase accessory protein | | |
| | | | | | TnpB | | |
| 3295 | — | MCK2000629.1 | Bacteria | JAKXEB010000001.1 | transposase | Peribacillus frigoritolerans | |
| 3296 | — | WP_063260107.1 | Bacteria | NZ_LJKE01000020.1 | RNA-guided endonuclease | Bacillus cereus | |
| | | | | | TnpB family protein | | |
| 3297 | — | WP_139994090.1 | Bacteria | NZ_HE578959.1 | zinc ribbon domain-containing | Kurthia sp. Dielmo | |
| | | | | | protein | | |
| 3298 | — | WP_052736945.1 | Bacteria | NZ_FONN01000001.1 | thioredoxin domain-containing | Paenibacillus | |
| | | | | | protein | algorifonticola | |
| 3299 | — | MBB6000643.1 | Bacteria | JACHLY010000001.1 | hypothetical protein | Streptomonospora salina | |
| 3300 | — | GEL20656.1 | Bacteria | BJVI01000082.1 | hypothetical protein | Pseudonocardia | |
| | | | | | | asaccharolytica DSM | |
| | | | | | | 44247 = NBRC 16224 | |
| 3301 | — | MCI6524391.1 | Bacteria | JALESX010000011.1 | transposase | Bacilli bacterium | |
| 3302 | — | WP_254149880.1 | Bacteria | NZ_CAAJNG010000007.1 | RNA-guided endonuclease | Clostridioides difficile | |
| | | | | | TnpB family protein | | |
| 3303 | — | MBH8104056.1 | Bacteria | JADVXX010000005.1 | transposase | Clostridioides difficile | |
| 3304 | — | VHR88608.1 | Bacteria | CAAJOL010000017.1 | transposase-like protein b | Clostridioides difficile | |
| 3305 | | VFD66953.1 | Bacteria | CAADAX010000002.1 | peptidase, M20 family, | Clostridioides difficile | |
| | | | | | peptidase V related | | |
| 3306 | — | VFD68822.1 | Bacteria | CAADAX010000005.1 | ABC transporter permease | Clostridioides difficile | |
| 3307 | — | VHO86940.1 | Bacteria | CAAJLV010000014.1 | membrane bound O-acyl | Clostridioides difficile | |
| | | | | | transferase MBOAT family | | |
| | | | | | protein | | |
| 3308 | — | MCQ4774350.1 | Bacteria | JANFYK010000012.1 | RNA-guided endonuclease | Lacrimispora saccharolytica | |
| | | | | | TnpB family protein | | |
| 3309 | — | MCI8509331.1 | Bacteria | JAAWBV010000081.1 | transposase | Lachnospiraceae bacterium | |
| 3310 | — | MBO6031921.1 | Bacteria | JAGBQF010000196.1 | transposase | Prevotella sp. | |
| 3311 | — | MBQ7223714.1 | Bacteria | JAFSUN010000011.1 | transposase | Erysipelotrichaceae | |
| | | | | | | bacterium | |
| 3312 | — | TXT64889.1 | Archaea | SHMU01000050.1 | transposase | Candidatus Lokiarchaeota | |
| | | | | | | archaeon | |
| 3313 | — | MBI9095789.1 | Bacteria | JAEINL010000056.1 | transposase | Sphaerochaeta sp. | |
| 3314 | — | WP_118287140.1 | Bacteria | NZ_QRMX01000023.1 | RNA-guided endonuclease | Acidaminococcus sp. | |
| | | | | | TnpB family protein | AM05-11 | |
| 3315 | — | WP_040203019.1 | Bacteria | NZ_CP010312.1 | RNA-guided endonuclease | Geoalkalibacter | |
| | | | | | TnpB family protein | subterraneus | |
| 3316 | — | MBV7334536.1 | Bacteria | JAHBNG010000057.1 | transposase | Chloroflexi bacterium TSY | |
| 3317 | — | WP_011403412.1 | Bacteria | NC_007677.1 | RNA-guided endonuclease | Salinibacter ruber | |
| | | | | | TnpB family protein | | |
| 3318 | — | NLG48611.1 | Bacteria | JAAYXX010000017.1 | transposase | Chloroflexi bacterium | |
| 3319 | — | PIS01350.1 | Bacteria | PFAC01000018.1 | hypothetical protein | Chlamydiae bacterium | |
| | | | | | | CG10_big_fil_rev_8_21_ | |
| | | | | | | 14_0_10_35_9 | |
| 3320 | — | RKU06323.1 | Bacteria | PYIY01000210.1 | transposase | Candidatus Poribacteria | |
| | | | | | | bacterium | |
| 3321 | — | RKU12564.1 | Bacteria | PYIY01000156.1 | transposase | Candidatus Poribacteria | |
| | | | | | | bacterium | |
| 3322 | — | MCD8207540.1 | Bacteria | JAJQAQ010000243.1 | transposase | Bacteroidales bacterium | |
| 3323 | — | MCL5995049.1 | Bacteria | JAMDDR010000071.1 | transposase | Chloroflexi bacterium | |
| 3324 | — | NCU40090.1 | Bacteria | RZYR01000105.1 | transposase | Candidatus Falkowbacteria | |
| | | | | | | bacterium | |
| 3325 | — | MBQ8713035.1 | Bacteria | JAFUTA010000216.1 | transposase | Prevotella sp. | |
| 3326 | — | MCE2434911.1 | Bacteria | JAGWBW010000143.1 | transposase | Candidatus Latescibacteria | |
| | | | | | | bacterium | |
| 3327 | — | NLC84816.1 | Bacteria | JAAZDC010000312.1 | transposase | Oscillospiraceae bacterium | |
| 3328 | — | NRB11537.1 | Bacteria | JABSSF010000157.1 | transposase | Rickettsiaceae bacterium | |
| 3329 | — | MBR0203360.1 | Bacteria | JAFSNN010000174.1 | transposase | Synergistaceae bacterium | |
| 3330 | — | MBQ5525535.1 | Bacteria | JAFNRN010000057.1 | transposase | Succinivibrionaceae | |
| | | | | | | bacterium | |
| 3331 | — | MBR6000003.1 | Bacteria | JAFZNW010000110.1 | transposase | Oxalobacter sp. | |
| 3332 | — | MBR4407544.1 | Bacteria | JAFYKO010000134.1 | transposase | Clostridia bacterium | |
| 3333 | — | PVY94514.1 | Bacteria | QEKV01000004.1 | IS605 OrfB family transposase | Ezakiella coagulans | |
| 3334 | — | MBR6141485.1 | Bacteria | JAFXZK010000082.1 | transposase | Bacteroidaceae bacterium | |
| 3335 | — | MBO5625854.1 | Bacteria | JAGAFZ010000178.1 | transposase | Prevotella sp. | |
| 3336 | — | WP_026086328.1 | Bacteria | NZ_NGZS01000027.1 | transposase | Fischerella thermalis | |
| 3337 | — | NCC69235.1 | Bacteria | RZZG01000589.1 | transposase | Clostridia bacterium | |
| 3338 | — | MCR5372523.1 | Bacteria | JAILJK010000056.1 | IS200/IS605 family element | Solobacterium sp. | |
| | | | | | transposase accessory protein | | |
| | | | | | TnpB | | |
| 3339 | — | WP_019413386.1 | Bacteria | NZ_ALJG01000240.1 | RNA-guided endonuclease | Paenisporosarcina sp. TG20 | |
| | | | | | TnpB family protein | | |
| 3340 | — | WP_207531206.1 | Bacteria | NZ_CP062975.1 | IS200/IS605 family element | Pontibacillus sp. ALD SL1 | |
| | | | | | RNA-guided endonuclease | | |
| | | | | | TnpB | | |
| 3341 | — | WP_195755225.1 | Bacteria | NZ_JADNYS010000018.1 | RNA-guided endonuclease | Bacillus toyonensis | |
| | | | | | TnpB family protein | | |
| 3342 | — | WP_036146199.1 | Bacteria | NZ_JPUW01000038.1 | RNA-guided endonuclease | Lysinibacillus sp. BF-4 | |
| | | | | | TnpB family protein | | |
| 3343 | — | WP_040108992.1 | Bacteria | NZ_CP009417.1 | RNA-guided endonuclease | Jeotgalibacillus | |
| | | | | | TnpB family protein | malaysiensis | |
| 3344 | — | MBR8836064.1 | Bacteria | JADQBA010000043.1 | transposase | Stigonema ocellatum SAG | |
| | | | | | | 48.90 = DSM 106950 | |
| 3345 | — | MBC6430855.1 | Bacteria | VJOX01000124.1 | transposase | Nostoc sp. HG1 | |
| 3346 | — | WP_201800664.1 | Bacteria | NZ_RSCL01000001.1 | RNA-guided endonuclease | Dulcicalothrix desertica | |
| | | | | | TnpB family protein | | |
| 3347 | — | WP_096655392.1 | Bacteria | NZ_AP018227.1 | RNA-guided endonuclease | Calothrix parasitica | |
| | | | | | TnpB family protein | | |
| 3348 | — | OWY64959.1 | Bacteria | KZ262983.1 | transposase | cyanobacterium TDX16 | |
| 3349 | — | WP_036486883.1 | Bacteria | NZ_JRFE01000034.1 | RNA-guided endonuclease | Myxosarcina sp. GI1 | |
| | | | | | TnpB family protein | | |
| 3350 | — | MCA6372136.1 | Bacteria | JADBYS010000067.1 | transposase | Cytophagales bacterium | |
| 3351 | — | HAO48381.1 | Bacteria | DMRS01000070.1 | transposase | Runella sp. | |
| 3352 | — | QNS40201.1 | Bacteria | CP060203.1 | IS200/IS605 family element | Chryseobacterium | |
| | | | | | transposase accessory protein | manosquense | |
| | | | | | TnpB | | |
| 3353 | — | MAX51483.1 | Bacteria | PAJP01000008.1 | hypothetical protein | Methylophaga sp. | |
| 3354 | — | MSQ79969.1 | Bacteria | SHWZ01000073.1 | transposase | Flavobacteriaceae | |
| | | | | | | bacterium | |
| 3355 | — | MBE7649021.1 | Bacteria | WXYD01000014.1 | transposase | Tenacibaculum | |
| | | | | | | finnmarkense genomovar | |
| | | | | | | ulcerans | |
| 3356 | — | MCB0614505.1 | Bacteria | JAGQXM010000442.1 | transposase | Phaeodactylibacter sp. | |
| 3357 | — | MCK5921651.1 | Bacteria | JAGLBV010001138.1 | transposase | Methylococcales bacterium | |
| 3358 | — | WP_026128098.1 | Bacteria | NZ_ANBC01000765.1 | RNA-guided endonuclease | Nocardiopsis lucentensis | |
| | | | | | TnpB family protein | | |
| 3359 | — | EFC83978.1 | Bacteria | ADGX01000039.1 | hypothetical protein | Frankia sp. EUN1f | |
| 3360 | — | WP_198961778.1 | Bacteria | NZ_NKYF01000018.1 | RNA-guided endonuclease | Pseudonocardia sp. MH-G8 | |
| | | | | | TnpB family protein | | |
| 3361 | — | MCB0966269.1 | Bacteria | JAGQSS010000040.1 | transposase | Ilumatobacter sp. | |
| 3362 | — | MBV9205330.1 | Bacteria | JAFASP010000201.1 | transposase | Actinomycetia bacterium | |
| 3363 | — | TXH08344.1 | Bacteria | SSEG01000079.1 | transposase | Spirochaetes bacterium | |
| 3364 | — | WP_255726954.1 | Bacteria | NZ_JAKRNA010000004.1 | transposase | Corynebacterium sp. | |
| | | | | | | ACRPE | |
| 3365 | — | WP_171620214.1 | Bacteria | NZ_JABFOM010000019.1 | RNA-guided endonuclease | unclassified Arthrobacter | |
| | | | | | TnpB family protein | | |
| 3366 | — | WP_242608036.1 | Bacteria | NZ_SGWX01000001.1 | transposase | Xylanibacterium ulmi | |
| 3367 | — | WP_148797397.1 | Bacteria | NZ_JAPDPG010000004.1 | RNA-guided endonuclease | Micromonospora sp. MP36 | |
| | | | | | TnpB family protein | | |
| 3368 | — | MBB4922654.1 | Bacteria | JACHJV010000001.1 | putative transposase | Kitasatospora kifunensis | |
| 3369 | — | KUO16381.1 | Bacteria | KQ949106.1 | hypothetical protein | Streptomyces dysideae | |
| 3370 | — | REK91561.1 | Bacteria | QUAC01000021.1 | transposase | Streptomyces inhibens | |
| 3371 | — | MBT2530211.1 | Bacteria | JAGGPC010000085.1 | transposase | Streptomyces sp. ISL-99 | |
| 3372 | — | WP_211287883.1 | Bacteria | NZ_LQPP01000046.1 | RNA-guided endonuclease | Mycolicibacterium | |
| | | | | | TnpB family protein | peregrinum | |
| 3373 | — | WP_007269771.1 | Bacteria | NZ_AOCK01000001.1 | RNA-guided endonuclease | Paeniglutamicibacter | |
| | | | | | TnpB family protein | gangotriensis | |
| 3374 | — | WP_143060830.1 | Bacteria | NZ_FNOK01000001.1 | RNA-guided endonuclease | Saccharopolyspora | |
| | | | | | TnpB family protein | shandongensis | |
| 3375 | — | WP_235883318.1 | Bacteria | NZ_SMKW01000003.1 | transposase | Saccharopolyspora elongata | |
| 3376 | — | MBV9195229.1 | Bacteria | JAFAQF010000198.1 | transposase | Solirubrobacterales | |
| | | | | | | bacterium | |
| 3377 | — | WP_193124747.1 | Bacteria | NZ_JADBGI010000035.1 | RNA-guided endonuclease | Nocardiopsis coralli | |
| | | | | | TnpB family protein | | |
| 3378 | — | WP_225292137.1 | Bacteria | NA | NA | Nonomuraea aurantiaca | |
| 3379 | — | MCL4446005.1 | Bacteria | JAMCPR010000038.1 | transposase | Actinobacteria bacterium | |
| 3380 | — | APH54679.1 | Bacteria | CP018191.1 | Transposase | Granulibacter bethesdensis | |
| 3381 | — | RAK68762.1 | Bacteria | QFYS01000001.1 | transposase | Phenylobacterium | |
| | | | | | | kunshanense | |
| 3382 | — | WP_142493738.1 | Bacteria | NZ_FXTO01000015.1 | RNA-guided endonuclease | Thalassobius litoralis | |
| | | | | | TnpB family protein | | |
| 3383 | — | WP_213177139.1 | Bacteria | NZ_JAHCBF010000011.1 | RNA-guided endonuclease | Croceicoccus | |
| | | | | | TnpB family protein | gelatinilyticus | |
| 3384 | — | WP_152709003.1 | Bacteria | NZ_VOSJ01000007.1 | RNA-guided endonuclease | Microvirga tunisiensis | |
| | | | | | TnpB family protein | | |
| 3385 | — | NBQ58160.1 | Bacteria | RGAX01000091.1 | transposase | Opitutaceae bacterium | |
| 3386 | — | QRM32335.1 | Bacteria | CP069355.1 | transposase | Microvirga sp. VF16 | |
| 3387 | — | MCQ3804688.1 | Bacteria | JAHQYL010000028.1 | transposase | Acidimicrobiia bacterium | |
| 3388 | — | MCE2530758.1 | Bacteria | JAGWAN010000065.1 | CDGSH iron-sulfur domain- | Acidimicrobiia bacterium | |
| | | | | | containing protein | | |
| 3389 | — | MXV89567.1 | Bacteria | VXXM01000020.1 | transposase | Acidimicrobiia bacterium | |
| 3390 | — | WP_251868652.1 | Bacteria | NZ_CAKMBB010000004. | RNA-guided endonuclease | Bifidobacterium breve | |
| | | | | — | TnpB family protein | | |
| 3391 | — | PWG62077.1 | Bacteria | QFFM01000041.1 | transposase | Bifidobacterium | |
| | | | | | | callitrichidarum | |
| 3392 | — | KAA8828202.1 | Bacteria | RZUH01000004.1 | transposase | Bifidobacterium myosotis | |
| 3393 | — | WP_190972612.1 | Bacteria | NZ_RZUI01000001.1 | RNA-guided endonuclease | Bifidobacterium tissieri | |
| | | | | | TnpB family protein | | |
| 3394 | — | OFP74597.1 | Bacteria | KV816983.1 | hypothetical protein | Actinomyces sp. | |
| | | | | | | HMSC065F12 | |
| 3395 | — | KFI60078.1 | Bacteria | JGYW01000001.1 | transposase | Bifidobacterium gallicum | |
| | | | | | | DSM 20093 = LMG 11596 | |
| 3396 | — | WP_214379425.1 | Bacteria | NZ_JAFEJV010000013.1 | RNA-guided endonuclease | Bifidobacterium felsineum | |
| | | | | | TnpB family protein | | |
| 3397 | — | MBT1162576.1 | Bacteria | JAFEJR010000018.1 | transposase | Bifidobacterium sp. SO1 | |
| 3398 | — | WP_239280942.1 | Bacteria | NZ_JAKRNA010000004.1 | transposase | Corynebacterium sp. | |
| | | | | | | ACRPE | |
| 3399 | — | WP_084020278.1 | Bacteria | NZ_BDMX01000083.1 | RNA-guided endonuclease | Mycobacterium avium | |
| | | | | | TnpB family protein | | |
| 3400 | — | TXH08353.1 | Bacteria | SSEG01000079.1 | transposase | Spirochaetes bacterium | |
| 3401 | — | PPG02701.1 | Bacteria | PSYA01000010.1 | transposase | Pseudoclavibacter sp. | |
| | | | | | | RFBI5 | |
| 3402 | — | MCF7688754.1 | Bacteria | JAIPKA010000041.1 | transposase | Cephaloticoccus sp. | |
| 3403 | — | MBP23863.1 | Bacteria | PBSF01000014.1 | hypothetical protein | Methylophaga sp. | |
| 3404 | — | NIJ40577.1 | Bacteria | JAASQO010000002.1 | putative transposase | Parvibaculum indicum | |
| 3405 | — | WP_111068399.1 | Bacteria | NZ_CP029830.1 | RNA-guided endonuclease | Azospirillum ramasamyi | |
| | | | | | TnpB family protein | | |
| 3406 | — | MBP33172.1 | Bacteria | PBTN01000058.1 | transposase | Methylobacterium sp. | |
| 3407 | — | WP_085084915.1 | Bacteria | NZ_FXAK01000004.1 | RNA-guided endonuclease | Azospirillum oryzae | |
| | | | | | TnpB family protein | | |
| 3408 | — | NTW86377.1 | Bacteria | JAAXXS010000091.1 | transposase | Holophagaceae bacterium | |
| 3409 | — | MBX9793929.1 | Bacteria | JAIESO010000293.1 | transposase | Burkholderiaceae bacterium | |
| 3410 | — | ODS94696.1 | Bacteria | MEDW01000107.1 | hypothetical protein | Erythrobacter sp. SCN 62- | |
| | | | | | | 14 | |
| 3411 | — | MBS0306439.1 | Bacteria | JAFECX010000193.1 | transposase | Proteobacteria bacterium | |
| 3412 | — | WP_045585464.1 | Bacteria | NZ_CP012407.1 | RNA-guided endonuclease | Azospirillum thiophilum | |
| | | | | | TnpB family protein | | |
| 3413 | — | MBT9177574.1 | Bacteria | QLUS01000204.1 | hypothetical protein | Firmicutes bacterium | |
| 3414 | — | MBI5515009.1 | Bacteria | JACRDB010000079.1 | transposase | Deltaproteobacteria | |
| | | | | | | bacterium | |
| 3415 | — | RYZ14581.1 | Bacteria | SECM01000556.1 | transposase | Myxococcaceae bacterium | |
| 3416 | — | MBI2154337.1 | Bacteria | JACPCF010000102.1 | transposase | Candidatus Rokubacteria | |
| | | | | | | bacterium | |
| 3417 | — | MYE54541.1 | Bacteria | VXNC01000224.1 | IS200/IS605 family element | Chloroflexi bacterium | |
| | | | | | transposase accessory protein | | |
| | | | | | TnpB | | |
| 3418 | — | WP_206240397.1 | Bacteria | NZ_JABVZR010000001.1 | RNA-guided endonuclease | Novosphingobium sp. | |
| | | | | | TnpB family protein | GeG2 | |
| 3419 | — | MYC07133.1 | Bacteria | VXNZ01000026.1 | IS200/IS605 family element | Chloroflexi bacterium | |
| | | | | | transposase accessory protein | | |
| | | | | | TnpB | | |
| 3420 | — | PZR59429.1 | Bacteria | QHBJ01000007.1 | hypothetical protein | Candidatus | |
| | | | | | | Eremiobacteraeota | |
| | | | | | | bacterium | |
| 3421 | — | MBV9648397.1 | Bacteria | JAFAXE010000215.1 | transposase | Candidatus | |
| | | | | | | Eremiobacteraeota | |
| | | | | | | bacterium | |
| 3422 | — | BCW52026.1 | Bacteria | AP024649.1 | transposase | Arthrobacter sp. | |
| | | | | | | StoSoilB13 | |
| 3423 | — | WP_141928251.1 | Bacteria | NZ_VFMO01000001.1 | RNA-guided endonuclease | Yimella lutea | |
| | | | | | TnpB family protein | | |
| 3424 | — | MCE0539850.1 | Bacteria | JAJSOH010000032.1 | transposase | Kineosporia rhizophila | |
| 3425 | — | OJV25285.1 | Bacteria | MKSW01000031.1 | hypothetical protein | Actinobacteria bacterium | |
| | | | | | | 69-20 | |
| 3426 | — | MBV8305360.1 | Bacteria | JAFAJN010000617.1 | transposase | Acidimicrobiia bacterium | |
| 3427 | — | TMK60946.1 | Bacteria | VAYW01000197.1 | transposase | Actinobacteria bacterium | |
| 3428 | — | WP_245898723.1 | Bacteria | NZ_KZ559466.1 | RNA-guided endonuclease | Nonomuraea indica | |
| | | | | | TnpB family protein | | |
| 3429 | — | WP_245653280.1 | Bacteria | NZ_BBXC01000019.1 | zinc ribbon domain-containing | Herbidospora sakaeratensis | |
| | | | | | protein | | |
| 3430 | — | WP_235854475.1 | Bacteria | NZ_POUD01000059.1 | transposase | Nonomuraea aridisoli | |
| 3431 | — | GEL19179.1 | Bacteria | BJVI01000032.1 | putative transposase | Pseudonocardia | |
| | | | | | | asaccharolytica DSM | |
| | | | | | | 44247 = NBRC 16224 | |
| 3432 | — | EFL15261.1 | Bacteria | GG657750.1 | predicted protein | Streptomyces sp. C | |
| 3433 | — | WP_043458552.1 | Bacteria | NZ_AUMO01000064.1 | RNA-guided endonuclease | Azohydromonas australica | |
| | | | | | TnpB family protein | | |
| 3434 | — | MBE7540564.1 | Bacteria | JABTUS010000012.1 | IS200/IS605 family element | Opitutaceae bacterium | |
| | | | | | transposase accessory protein | | |
| | | | | | TnpB | | |
| 3435 | — | MBI5792703.1 | Bacteria | JACRIY010000097.1 | transposase | Rhodocyclales bacterium | |
| 3436 | — | WP_082568254.1 | Bacteria | NZ_LMDI01000001.1 | RNA-guided endonuclease | Rhizobacter sp. Root1221 | |
| | | | | | TnpB family protein | | |
| 3437 | — | MCH4565117.1 | Bacteria | JAKVPY010000029.1 | transposase | Halomonas sp. EGI 63088 | |
| 3438 | — | OLD81299.1 | Bacteria | MNIJ01000124.1 | hypothetical protein | Acidobacteria bacterium | |
| | | | | | | 13_1_20CM_58_21 | |
| 3439 | — | PYX81868.1 | Bacteria | QIAT01000258.1 | hypothetical protein | Acidobacteria bacterium | |
| 3440 | — | WP_171680850.1 | Bacteria | NZ_JABGBN010000007.1 | RNA-guided endonuclease | Pelistega suis | |
| | | | | | TnpB family protein | | |
| 3441 | — | PYU63089.1 | Bacteria | QHYW01000024.1 | hypothetical protein | Acidobacteria bacterium | |
| 3442 | — | MBI2569201.1 | Bacteria | JACPHN010000120.1 | transposase | Candidatus | |
| | | | | | | Schekmanbacteria | |
| | | | | | | bacterium | |
| 3443 | — | MCH8313586.1 | Bacteria | JADFGI010000262.1 | transposase | Nitrospinae bacterium | |
| 3444 | — | NAD28756.1 | Bacteria | WXNX01000029.1 | MFS transporter | Escherichia coli | |
| 3445 | — | ECK8875194.1 | Bacteria | AAJDXU010000056.1 | IS200/IS605 family element | Salmonella enterica subsp. | |
| | | | | | transposase accessory protein | enterica | |
| | | | | | TnpB | | |
| 3446 | — | SQO14990.1 | Bacteria | UCXM01000001.1 | RhsE core protein | Escherichia coli | |
| 3447 | — | SQQ41016.1 | Bacteria | UCZN01000001.1 | putative protein rhsD | Escherichia coli | |
| 3448 | — | WP_000160102.1 | Bacteria | NZ_KE136820.1 | RNA-guided endonuclease | Escherichia coli | |
| | | | | | TnpB family protein | | |
| 3449 | — | EHA9087623.1 | Bacteria | AAYUQE010000014.1 | IS4 family transposase | Escherichia coli | |
| 3450 | — | SJA35750.1 | Bacteria | FTUW01000164.1 | IS600 ORF2 | Shigella sonnei | |
| 3451 | — | CAD6036705.1 | Bacteria | CAJGVM010000002.1 | flagellin | Escherichia coli | |
| 3452 | — | SRA11597.1 | Bacteria | UDHK01000018.1 | transposase | Escherichia coli | |
| 3453 | — | MXZ05491.1 | Bacteria | VXTC01000355.1 | transposase | Rhodothermaceae | |
| | | | | | | bacterium | |
| 3454 | — | MYC62678.1 | Bacteria | VXMJ01000042.1 | transposase | Caldilineaceae bacterium | |
| | | | | | | SB0661_bin_34 | |
| 3455 | — | MCE2468642.1 | Bacteria | JAGWBH010000050.1 | transposase | Caldilineaceae bacterium | |
| 3456 | — | MXZ24578.1 | Bacteria | VXSS01000065.1 | IS200/IS605 family element | Caldilineaceae bacterium | |
| | | | | | transposase accessory protein | SB0665_bin_21 | |
| | | | | | TnpB | | |
| 3457 | — | MXZ48766.1 | Bacteria | VXTZ01000025.1 | transposase | Candidatus Dadabacteria | |
| | | | | | | bacterium | |
| 3458 | — | MYG12998.1 | Bacteria | VYDX01000223.1 | transposase | Gammaproteobacteria | |
| | | | | | | bacterium | |
| 3459 | — | MYF70286.1 | Bacteria | VYEH01000261.1 | transposase | Proteobacteria bacterium | |
| 3460 | — | MCE2520068.1 | Bacteria | JAGWAP010000042.1 | transposase | Alphaproteobacteria | |
| | | | | | | bacterium | |
| 3461 | — | MYF45507.1 | Bacteria | VYFX01000019.1 | IS200/IS605 family element | Rhodobacteraceae | |
| | | | | | transposase accessory protein | bacterium | |
| | | | | | TnpB | | |
| 3462 | — | MXZ56459.1 | Bacteria | VXUA01000075.1 | transposase | Gammaproteobacteria | |
| | | | | | | bacterium | |
| 3463 | — | MXY14270.1 | Bacteria | VXRR01000033.1 | transposase | Proteobacteria bacterium | |
| 3464 | — | MYF11804.1 | Bacteria | VYGD01000220.1 | transposase | Gammaproteobacteria | |
| | | | | | | bacterium | |
| 3465 | — | MYD55820.1 | Bacteria | VYGU01000021.1 | transposase | Rhodothermaceae | |
| | | | | | | bacterium | |
| 3466 | — | MYG63398.1 | Bacteria | VYDK01000040.1 | transposase | Synechococcus sp. | |
| | | | | | | SB0675_bin_7 | |
| 3467 | — | MYH04070.1 | Archaea | VYCS01000023.1 | transposase | Cenarchaeum sp. | |
| | | | | | | SB0675_bin_21 | |
| 3468 | — | REJ97736.1 | Bacteria | QQVB01000009.1 | transposase | Planctomycetes bacterium | |
| 3469 | — | HIV14405.1 | Bacteria | DVOQ01000006.1 | transposase | Candidatus | |
| | | | | | | Avisuccinivibrio pullicola | |
| 3470 | — | WP_132325850.1 | Bacteria | NZ_FWZT01000036.1 | RNA-guided endonuclease | Pseudobacteriovorax | |
| | | | | | TnpB family protein | antillogorgiicola | |
| 3471 | — | MCP4914522.1 | Bacteria | JAAEST010000104.1 | transposase | Oligoflexia bacterium | |
| 3472 | — | MBF0205278.1 | Bacteria | JADGBS010000001.1 | transposase | Oligoflexia bacterium | |
| 3473 | — | MCB9063493.1 | Bacteria | JACKAK010000021.1 | transposase | Halobacteriovoraceae | |
| | | | | | | bacterium | |
| 3474 | — | HCJ8468607.1 | Bacteria | DAIURP010000013.1 | transposase | Escherichia coli | |
| 3475 | — | HCJ8468503.1 | Bacteria | DAIURP010000013.1 | transposase | Escherichia coli | |
| 3476 | — | HIV15915.1 | Bacteria | DVOQ01000075.1 | transposase | Candidatus | |
| | | | | | | Avisuccinivibrio pullicola | |
| 3477 | — | MCL1603076.1 | Bacteria | JAMBLQ010000016.1 | transposase | Succinatimonas hippei | |
| 3478 | — | WP_013008876.1 | Bacteria | NC_013940.1 | RNA-guided endonuclease | Deferribacter desulfuricans | |
| | | | | | TnpB family protein | | |
| 3479 | — | OED35024.1 | Bacteria | MDKZ01000304.1 | hypothetical protein | Flavobacteriaceae | |
| | | | | | | bacterium (ex Bugula | |
| | | | | | | neritina AB1) | |
| 3480 | — | MBM25135.1 | Bacteria | PBMB01000012.1 | transposase | Chloroflexi bacterium | |
| 3481 | — | RLE46600.1 | Archaea | QMQU01000078.1 | transposase | Candidatus | |
| | | | | | | Woesearchaeota archaeon | |
| 3482 | — | EES53861.1 | Bacteria | GG693853.1 | transposase, IS605 OrfB family | Leptospirillum | |
| | | | | | | ferrodiazotrophum | |
| 3483 | — | MBM6929228.1 | Bacteria | JACJKX010000017.1 | transposase | Parasutterella secunda | |
| 3484 | — | OGT89432.1 | Bacteria | MGZB01000032.1 | hypothetical protein | Gammaproteobacteria | |
| | | | | | | bacterium | |
| | | | | | | RIFOXYD12_ FULL_61_ | |
| | | | | | | 37 | |
| 3485 | — | TAM85836.1 | Bacteria | SCQX01000237.1 | transposase | Candidimonas sp. | |
| 3486 | — | WP_254729437.1 | Bacteria | NZ_CP101111.1 | transposase | unclassified Moraxella | |
| 3487 | — | TCM66559.1 | Bacteria | SLVJ01000012.1 | putative transposase | Acinetobacter calcoaceticus | |
| 3488 | — | MCB9061834.1 | Bacteria | JACKAK010000005.1 | transposase | Halobacteriovoraceae | |
| | | | | | | bacterium | |
| 3489 | — | MBC7532717.1 | Bacteria | JACMPP010000107.1 | transposase | Oligoflexus sp. | |
| 3490 | — | WP_135955690.1 | Bacteria | NZ_JABCKY010000008.1 | RNA-guided endonuclease | Marinobacter orientalis | |
| | | | | | TnpB family protein | | |
| 3491 | — | WP_075878650.1 | Bacteria | NZ_LT699744.1 | RNA-guided endonuclease | Halomonas massiliensis | |
| | | | | | TnpB family protein | | |
| 3492 | — | KAF8818046.1 | Bacteria | JADAQY010000010.1 | hypothetical protein | Rickettsia endosymbiont of | |
| | | | | | | Cardiosporidium cionae | |
| 3493 | — | WP_138392515.1 | Bacteria | NZ_VCHT01000001.1 | RNA-guided endonuclease | Rhizobium sp. MHM7A | |
| | | | | | TnpB family protein | | |
| 3494 | — | HEB28727.1 | Bacteria | DRHD01000325.1 | transposase | Porticoccus sp. | |
| 3495 | — | MBI4746961.1 | Bacteria | JACQXX010000003.1 | transposase | Acidobacteria bacterium | |
| 3496 | — | MBS1808598.1 | Bacteria | JAFDVL010000030.1 | transposase | Acidobacteria bacterium | |
| 3497 | — | MBB4861269.1 | Bacteria | JACHLI010000001.1 | putative transposase | Pseudomonas | |
| | | | | | | nitritireducens | |
| 3498 | — | MBW1987670.1 | Bacteria | JAFDHX010000059.1 | transposase | Deltaproteobacteria | |
| | | | | | | bacterium | |
| 3499 | — | MCF8169247.1 | Bacteria | JAIPDB010000295.1 | transposase | Rhodoferax sp. | |
| 3500 | — | TDN67249.1 | Bacteria | SNWA01000001.1 | putative transposase | Paraburkholderia sp. | |
| | | | | | | BL10I2N1 | |
| 3501 | — | WP_122834643.1 | Bacteria | NZ_UVMT01000011.1 | RNA-guided endonuclease | Burkholderia pseudomallei | |
| | | | | | TnpB family protein | | |
| 3502 | — | WP_172843863.1 | Bacteria | NA | NA | Variovorax sp. HW608 | |
| 3503 | — | MCK9172461.1 | Bacteria | JALNVQ010000049.1 | transposase | Desulfuromonas thiophila | |
| 3504 | — | MCL5980739.1 | Bacteria | JAMDDU010000086.1 | transposase | Gammaproteobacteria | |
| | | | | | | bacterium | |
| 3505 | — | BBF23400.1 | Bacteria | AP018786.1 | hypothetical protein | Sutterella | |
| | | | | | | megalosphaeroides | |
| 3506 | — | WP_240912909.1 | Bacteria | NZ_JAANYC010000052.1 | RNA-guided endonuclease | Sutterella wadsworthensis | |
| | | | | | TnpB family protein | | |
| 3507 | — | HJD07836.1 | Bacteria | DWVF01000237.1 | transposase | Candidatus Sutterella | |
| | | | | | | merdavium | |
| 3508 | — | HCR08976.1 | Bacteria | DQEV01000050.1 | transposase | Sutterellaceae bacterium | |
| 3509 | — | HAO34444.1 | Bacteria | DMQI01000313.1 | transposase | Candidatus | |
| | | | | | | Competibacteraceae | |
| | | | | | | bacterium | |
| 3510 | — | WP_087460886.1 | Bacteria | NZ_CP021425.1 | RNA-guided endonuclease | Oleiphilus messinensis | |
| | | | | | TnpB family protein | | |
| 3511 | — | MBP7547792.1 | Bacteria | JAGOCY010000218.1 | transposase | Corallincola sp. | |
| 3512 | — | WP_018403154.1 | Bacteria | NZ_KB889870.1 | RNA-guided endonuclease | Marinobacter gelidimuriae | |
| | | | | | TnpB family protein | | |
| 3513 | — | WP_143428867.1 | Bacteria | NZ_MUPM01000211.1 | RNA-guided endonuclease | Helicobacter pylori | |
| | | | | | TnpB family protein | | |
| 3514 | — | WP_105912995.1 | Bacteria | NZ_NXGD01000002.1 | RNA-guided endonuclease | Aliarcobacter cryaerophilus | |
| | | | | | TnpB family protein | | |
| 3515 | — | WP_052955959.1 | Bacteria | NZ_JZSN01000029.1 | RNA-guided endonuclease | Photobacterium angustum | |
| | | | | | TnpB family protein | | |
| 3516 | — | HIF59279.1 | Bacteria | DUBF01000096.1 | hypothetical protein | Rhodospirillales bacterium | |
| 3517 | — | MAI59297.1 | Bacteria | NZGI01000149.1 | hypothetical protein | Rhodobacteraceae | |
| | | | | | | bacterium | |
| 3518 | — | PXX82125.1 | Bacteria | QJKI01000001.1 | putative transposase | Rivicola pingtungensis | |
| 3519 | — | DAW04144.1 | Viruses | BK029582.1 | endonuclease | Myoviridae sp. | |
| 3520 | — | MBR5950371.1 | Bacteria | JAFZJY010000120.1 | transposase | Actinomycetaceae | |
| | | | | | | bacterium | |
| 3521 | — | WP_044600325.1 | Bacteria | NZ_CABKSS010000008.1 | RNA-guided endonuclease | Candidatus Stoquefichus | |
| | | | | | TnpB family protein | massiliensis | |
| 3522 | — | MBQ6220243.1 | Archaea | JAFRMD010000130.1 | transposase | Methanosphaera sp. | |
| 3523 | — | MBE6498743.1 | Archaea | SUTM01000030.1 | transposase | Methanobrevibacter sp. | |
| 3524 | — | MBR0270501.1 | Archaea | JAFSNZ010000009.1 | transposase | Methanobrevibacter sp. | |
| 3525 | — | MBQ2653816.1 | Archaea | JAFQXD010000047.1 | transposase | Methanobrevibacter sp. | |
| 3526 | — | MBO6123808.1 | Archaea | JAGBOD010000089.1 | transposase | Methanobrevibacter sp. | |
| 3527 | — | BBL60969.1 | Archaea | AP019779.1 | transposase | Methanobrevibacter | |
| | | | | | | arboriphilus | |
| 3528 | — | MBR2666412.1 | Archaea | JAFWEU010000098.1 | transposase | Methanobrevibacter sp. | |
| 3529 | — | MBE6489412.1 | Archaea | SUTO01000001.1 | transposase | Methanobrevibacter sp. | |
| 3530 | — | MBQ8993392.1 | Bacteria | JAFUBC010000289.1 | transposase | Turicibacter sp. | |
| 3531 | — | WP_010886824.1 | Bacteria | NC_001263.1 | IS200/IS605 family element | Deinococcus radiodurans | |
| | | | | | RNA-guided endonuclease | | |
| | | | | | TnpB | | |
| 3532 | — | WP_208491959.1 | Bacteria | NZ_JADEXR010000003.1 | IS200/IS605 family element | aff. Roholtiella sp. LEGE | |
| | | | | | RNA-guided endonuclease | 12411 | |
| | | | | | TnpB | | |
| 3533 | — | WP_220095182.1 | Bacteria | NZ_VATK01000020.1 | IS200/IS605 family element | Bacillus sp. 03113 | |
| | | | | | RNA-guided endonuclease | | |
| | | | | | TnpB | | |
| 3534 | — | MBE6060655.1 | Bacteria | SVCM01000124.1 | transposase | Clostridium sulfidigenes | |
| 3535 | — | ADL36102.1 | Bacteria | CP001812.1 | transposase IS200/IS605 family | Butyrivibrio proteoclasticus | |
| | | | | | | B316 | |
| 3536 | — | MBR3518288.1 | Bacteria | JAFXQR010000201.1 | IS200/IS605 family element | Lachnospiraceae bacterium | |
| | | | | | transposase accessory protein | | |
| | | | | | TnpB | | |
| 3537 | — | MBR3160096.1 | Bacteria | JAFWIE010000072.1 | IS200/IS605 family element | Atopobiaceae bacterium | |
| | | | | | transposase accessory protein | | |
| | | | | | TnpB | | |
| 3538 | — | WP_060920198.1 | Bacteria | NZ_KQ960682.1 | RNA-guided endonuclease | Varibaculum cambriense | |
| | | | | | TnpB family protein | | |
| 3539 | — | HIS79477.1 | Bacteria | DVJM01000188.1 | transposase | Candidatus Caccousia | |
| | | | | | | stercoris | |
| 3540 | — | WP_208071055.1 | Bacteria | NZ_JABFCH010000015.1 | RNA-guided endonuclease | Extibacter sp. GGCC_0201 | |
| | | | | | TnpB family protein | | |
| 3541 | — | MBR6797030.1 | Bacteria | JAFXKQ010000175.1 | transposase | Clostridia bacterium | |
| 3542 | — | MBQ7818613.1 | Bacteria | JAFUKY010000015.1 | transposase | Bacteroidales bacterium | |
| 3543 | — | MCL1793935.1 | Bacteria | WRJC01000024.1 | IS200/IS605 family element | Oscillospiraceae bacterium | |
| | | | | | RNA-guided endonuclease | | |
| | | | | | TnpB | | |
| 3544 | — | MCI8510513.1 | Bacteria | JAAWBW010000011.1 | IS200/IS605 family element | Lachnospiraceae bacterium | |
| | | | | | transposase accessory protein | | |
| | | | | | TnpB | | |
| 3545 | — | UOF79888.1 | Viruses | MW202647.1 | endonuclease | Podoviridae sp. | |
| 3546 | — | DAG55029.1 | Viruses | BK018267.1 | endonuclease | Myoviridae sp. | |
| 3547 | — | KIM06083.1 | Bacteria | JQIP01000001.1 | hypothetical protein | Sulfurovum sp. AS07-7 | |
| 3548 | — | WP_226926872.1 | Bacteria | NZ_CP033843.1 | RNA-guided endonuclease | Pseudomonas aeruginosa | |
| | | | | | TnpB family protein | | |
| 3549 | — | MCK5616002.1 | Archaea | JAGLHJ010002370.1 | transposase | Candidatus Pacearchaeota | |
| | | | | | | archaeon | |
| 3550 | — | MBP9682100.1 | Bacteria | JAGOVS010000114.1 | transposase | Bacteriovorax sp. | |
| 3551 | — | WP_118838282.1 | Bacteria | NZ_CP030356.1 | RNA-guided endonuclease | Salinibacter ruber | |
| | | | | | TnpB family protein | | |
| 3552 | — | OZB72149.1 | Bacteria | NCKK01000336.1 | transposase | Thiomonas sp. 14-64-326 | |
| 3553 | — | WP_198667651.1 | Bacteria | NZ_QFRW01000313.1 | RNA-guided endonuclease | Glycomyces dulcitolivorans | |
| | | | | | TnpB family protein | | |
| 3554 | — | BAH53801.1 | Bacteria | AP011115.1 | putative transposase | Rhodococcus opacus B4 | |
| 3555 | — | WP_229705657.1 | Bacteria | NZ_BMNB01000002.1 | transposase | Verrucosispora sonchi | |
| 3556 | — | GIM64085.1 | Bacteria | BOQL01000006.1 | transposase | Actinoplanes auranticolor | |
| 3557 | — | WP_226851938.1 | Bacteria | NZ_CP079232.1 | transposase | Bifidobacterium | |
| | | | | | | pseudocatenulatum | |
| 3558 | — | ABE95013.1 | Bacteria | CP000303.1 | Transposase | Bifidobacterium breve | |
| | | | | | | UCC2003 | |
| 3559 | — | WP_214375081.1 | Bacteria | NZ_JAFEJR010000026.1 | RNA-guided endonuclease | Bifidobacterium sp. SO1 | |
| | | | | | TnpB family protein | | |
| 3560 | — | MBT1161764.1 | Bacteria | JAFEJR010000008.1 | transposase | Bifidobacterium sp. SO1 | |
| 3561 | — | WP_052824523.1 | Bacteria | NZ_AWFN01000003.1 | RNA-guided endonuclease | Bifidobacterium animalis | |
| | | | | | TnpB family protein | | |
| 3562 | — | BCN70227.1 | Bacteria | AP024192.1 | transposase | Rhodococcus equi | |
| 3563 | — | WP_221205964.1 | Bacteria | NZ_JACIBT010000001.1 | RNA-guided endonuclease | Garicola koreensis | |
| | | | | | TnpB family protein | | |
| 3564 | — | TXH09682.1 | Bacteria | SSEG01000043.1 | transposase | Spirochaetes bacterium | |
| 3565 | — | WP_125196430.1 | Bacteria | NZ_PQNJ01000001.1 | RNA-guided endonuclease | Corynebacterium bovis | |
| | | | | | TnpB family protein | | |
| 3566 | — | OAH50282.1 | Bacteria | LSTV01000002.1 | hypothetical protein | Microbacterium oleivorans | |
| 3567 | — | KQR23192.1 | Bacteria | LMOR01000003.1 | hypothetical protein | Microbacterium sp. | |
| | | | | | | Leaf151 | |
| 3568 | — | WP_121148794.1 | Bacteria | NZ_RBXJ01000001.1 | RNA-guided endonuclease | Microbacterium sp. | |
| | | | | | TnpB family protein | AG1240 | |
| 3569 | — | MCR2800216.1 | Bacteria | JANJFI010000002.1 | transposase | Microbacterium sp. | |
| | | | | | | zg. Y818 | |
| 3570 | — | AIY00042.1 | Bacteria | CP007595.1 | hypothetical protein | Arthrobacter sp. PAMC | |
| | | | | | | 25486 | |
| 3571 | — | EQM74884.1 | Bacteria | ATAO01000206.1 | hypothetical protein | Microbacterium | |
| | | | | | | maritypicum MF109 | |
| 3572 | — | WP_254755531.1 | Bacteria | NZ_JANCOC010000001.1 | transposase | Rothia sp. P3C3.S176 | |
| 3573 | — | MCG2624627.1 | Bacteria | JAKLTQ010000028.1 | RNA-guided endonuclease | Arthrobacter sp. 12-34 | |
| | | | | | TnpB family protein | | |
| 3574 | — | WP_203781174.1 | Bacteria | NZ_BOMV01000021.1 | transposase | Actinoplanes rishiriensis | |
| 3575 | — | WP_232292734.1 | Bacteria | NZ_ABFV01000090.1 | transposase | Saccharopolyspora | |
| | | | | | | erythraea | |
| 3576 | — | WP_197430602.1 | Bacteria | NZ_LSIX01000618.1 | RNA-guided endonuclease | Methylobacterium sp. | |
| | | | | | TnpB family protein | CCH5-D2 | |
| 3577 | — | MCH8960587.1 | Bacteria | JACZTJ010000152.1 | IS200/IS605 family element | Bacteroidetes bacterium | |
| | | | | | transposase accessory protein | | |
| | | | | | TnpB | | |
| 3578 | — | WP_249021264.1 | Bacteria | NZ_CP097127.1 | transposase | Conexibacter sp. S30A1 | |
| 3579 | — | WP_251073896.1 | Bacteria | NZ_JAGGOM010000019.1 | transposase | Streptomyces sp. ISL-111 | |
| 3580 | — | WP_237725554.1 | Bacteria | NZ_AGSW01000020.1 | transposase | Streptomyces sp. W007 | |
| 3581 | — | WP_100446026.1 | Bacteria | NZ_PGGV01000027.1 | RNA-guided endonuclease | Glycomyces xiaoerkulensis | |
| | | | | | TnpB family protein | | |
| 3582 | — | TDD71098.1 | Bacteria | SMKY01000225.1 | transposase | Actinomadura | |
| | | | | | | darangshiensis | |
| 3583 | — | WP_235987211.1 | Bacteria | NZ_JACGWZ010000002.1 | transposase | Halosaccharopolyspora | |
| | | | | | | lacisalsi | |
| 3584 | — | KAH8391704.1 | Eukaryota | JAJJHZ010005042.1 | hypothetical protein | Drosophila sulfurigaster | |
| 3585 | | WP_237189575.1 | Bacteria | NZ_CAKMSC010000002. | transposase | Rothia nasimurium | |
| | | | | — | | | |
| 3586 | — | WP_165977369.1 | Bacteria | NZ_SMKP01000050.1 | RNA-guided endonuclease | Nonomuraea diastatica | |
| | | | | | TnpB family protein | | |
| 3587 | — | SOE32692.1 | Bacteria | OCQN01000001.1 | hypothetical protein | Streptomyces sp. OK228 | |
| 3588 | — | ANZ35752.1 | Bacteria | CP016793. | hypothetical protein | Lentzea guizhouensis | |
| 3589 | — | WP_051849325.1 | Bacteria | NZ_JPOE01000005.1 | RNA-guided endonuclease | Thiomonas sp. FB-Cd | |
| | | | | | TnpB family protein | | |
| 3590 | — | MBA3600246.1 | Bacteria | JACDDB010000122.1 | IS200/IS605 family element | Acidobacteria bacterium | |
| | | | | | transposase accessory protein | | |
| | | | | | TnpB | | |
| 3591 | — | WP_238620257.1 | Bacteria | NZ_JAJOZD010000017.1 | transposase | Ectothiorhodospira mobilis | |
| 3592 | — | EEF4509786.1 | Bacteria | AAPMOA010000192.1 | IS200/IS605 family element | Salmonella enterica | |
| | | | | | transposase accessory protein | | |
| | | | | | TnpB | | |
| 3593 | — | EKD89718.1 | Bacteria | AMFJ01012297.1 | hypothetical protein | uncultured bacterium | |
| 3594 | — | MCK9529128.1 | Bacteria | JALOAT010000001.1 | transposase | Gammaproteobacteria | |
| | | | | | | bacterium | |
| 3595 | — | EKD22673.1 | Bacteria | AMFJ01036997.1 | hypothetical protein | uncultured bacterium | |
| 3596 | — | EKD89713.1 | Bacteria | AMFJ01012297.1 | hypothetical protein | uncultured bacterium | |
| 3597 | — | NGX28100.1 | Bacteria | JAAKFJ010000009.1 | hypothetical protein | Candidatus | |
| | | | | | | Anoxychlamydiales | |
| | | | | | | bacterium | |
| 3598 | — | ULG01476.1 | Viruses | OM033134.1 | transposase | Aeromonas phage phiA009 | |
| 3599 | — | CAD5236229.1 | Viruses | LR881104.1 | putative transposase | Klebsiella phage vB_KvM- | |
| | | | | | | Eowyn | |
| 3600 | — | YP_418070.1 | Viruses | NC_007623.1 | transposase | Pseudomonas phage EL | |
| 3601 | — | MBQ8069880.1 | Bacteria | JAFUFP010000018.1 | transposase | Bacteroidales bacterium | |
| 3602 | — | MBR6881396.1 | Bacteria | JAFXMR010000006.1 | transposase | Bacteroidales bacterium | |
| 3603 | — | DAT13559.1 | Viruses | BK043022.1 | endonuclease | Herelleviridae sp. | |
| 3604 | — | NBU23953.1 | Bacteria | RFTL01000147.1 | transposase | Actinomycetia bacterium | |
| 3605 | — | MBW4052981.1 | Bacteria | JABBNZ010000090.1 | transposase | Proteobacteria bacterium | |
| 3606 | — | MBT4450441.1 | Bacteria | JABHZK010000129.1 | IS200/IS605 family element | Gammaproteobacteria | |
| | | | | | transposase accessory protein | bacterium | |
| | | | | | TnpB | | |
| 3607 | — | RMD65450.1 | Bacteria | RFLS01000239.1 | transposase | Candidatus Parcubacteria | |
| | | | | | | bacterium | |
| 3608 | — | TVQ94642.1 | Bacteria | REDK01000033.1 | transposase | Chromatiaceae bacterium | |
| 3609 | — | MBN2701115.1 | Bacteria | JAFGWX010000180.1 | transposase | Methylothermaceae | |
| | | | | | | bacterium | |
| 3610 | — | WP_036501468.1 | Bacteria | NZ_JPFN01000081.1 | RNA-guided endonuclease | Nitrosococcus oceani | |
| | | | | | TnpB family protein | | |
| 3611 | — | EDZ67123.1 | Bacteria | DS995300.1 | Putative transposase DNA- | Nitrosococcus oceani | |
| | | | | | binding domain family | AFC27 | |
| 3612 | — | TQE99210.1 | Bacteria | VIFK01000083.1 | IS200/IS605 family element | Spiribacter salinus | |
| | | | | | transposase accessory protein | | |
| | | | | | TnpB | | |
| 3613 | — | WP_159657623.1 | Bacteria | NZ_WUTY02000002.1 | RNA-guided endonuclease | Methylicorpusculum | |
| | | | | | TnpB family protein | oleiharenae | |
| 3614 | — | NCW28399.1 | Bacteria | RGGS01000329.1 | transposase | Verrucomicrobia bacterium | |
| 3615 | — | TSA03182.1 | Bacteria | QYQA01000059.1 | transposase | Methylococcus sp. | |
| 3616 | — | WP_020042880.1 | Bacteria | NZ_KE557281.1 | RNA-guided endonuclease | Salipiger mucosus | |
| | | | | | TnpB family protein | | |
| 3617 | — | WP_226462285.1 | Bacteria | NZ_CP075183.1 | transposase | Hydrogenophaga | |
| | | | | | | taeniospiralis | |
| 3618 | — | MYH50426.1 | Bacteria | VYDD01000364.1 | transposase | Gammaproteobacteria | |
| | | | | | | bacterium | |
| 3619 | — | MCB1885951.1 | Bacteria | JAGRGG010000288.1 | transposase | Geminicoccaceae bacterium | |
| 3620 | — | MAM84288.1 | Bacteria | NZNJ01000068.1 | hypothetical protein | Acidobacteria bacterium | |
| 3621 | — | MCB1885426.1 | Bacteria | JAGRGG010000190.1 | transposase | Geminicoccaceae bacterium | |
| 3622 | — | MBR2305678.1 | Bacteria | JAFVQG010000002.1 | transposase | Fibrobacter sp. | |
| 3623 | — | RKU26404.1 | Bacteria | PYJE01000200.1 | transposase | Candidatus Poribacteria | |
| | | | | | | bacterium | |
| 3624 | — | MYE54458.1 | Bacteria | VXNC01000204.1 | IS200/IS605 family element | Chloroflexi bacterium | |
| | | | | | transposase accessory protein | | |
| | | | | | TnpB | | |
| 3625 | — | MXZ41218.1 | Bacteria | VXUE01000093.1 | IS200/IS605 family element | Caldilineaceae bacterium | |
| | | | | | transposase accessory protein | SB0666 bin 21 | |
| | | | | | TnpB | | |
| 3626 | — | MCQ3808691.1 | Bacteria | JAHQYN010000176.1 | transposase | Acidimicrobiia bacterium | |
| 3627 | — | MBO0703021.1 | Bacteria | JAFMRQ010000436.1 | transposase | Candidatus | |
| | | | | | | Dormibacteraeota | |
| | | | | | | bacterium | |
| 3628 | — | TMB86712.1 | Bacteria | VBJN01000153.1 | IS200/IS605 family element | Chloroflexi bacterium | |
| | | | | | transposase accessory protein | | |
| | | | | | TnpB | | |
| 3629 | — | WP_165963929.1 | Bacteria | NZ_SMJX01000008.1 | RNA-guided endonuclease | Actinomadura sp. KC216 | |
| | | | | | TnpB family protein | | |
| 3630 | — | MBV9195225.1 | Bacteria | JAFAQF010000198.1 | transposase | Solirubrobacterales | |
| | | | | | | bacterium | |
| 3631 | — | WP_154800705.1 | Bacteria | NZ_CP052758.1 | RNA-guided endonuclease | Cellulosimicrobium sp. | |
| | | | | | TnpB family protein | BI34T | |
| 3632 | — | WP_194165024.1 | Bacteria | NZ_WHMT01000007.1 | RNA-guided endonuclease | Pseudactinotalea sp. | |
| | | | | | TnpB family protein | HY160 | |
| 3633 | — | WP_159096615.1 | Bacteria | NZ_CP029050.1 | RNA-guided endonuclease | Miniimonas sp. S16 | |
| | | | | | TnpB family protein | | |
| 3634 | — | SHR23131.1 | Bacteria | FRYU01000013.1 | transposase | Mycobacteroides abscessus | |
| | | | | | | subsp. abscessus | |
| 3635 | — | AIK86462.1 | Bacteria | CP007725.1 | hypothetical protein | Corynebacterium | |
| | | | | | | glutamicum | |
| 3636 | — | WP_251715579.1 | Bacteria | NZ_JAMAVY010000018.1 | transposase | Kocuria palustris | |
| 3637 | — | MCG5105506.1 | Bacteria | JAKNRZ010000001.1 | transposase | Candidatus | |
| | | | | | | Saccharibacteria bacterium | |
| 3638 | — | WP_197914292.1 | Bacteria | NZ_CP065628.1 | RNA-guided endonuclease | Corynebacterium | |
| | | | | | TnpB family protein | amycolatum | |
| 3639 | — | WP_136787117.1 | Bacteria | NZ_SUKC01000015.1 | RNA-guided endonuclease | Arthrobacter sp. CAU 1506 | |
| | | | | | TnpB family protein | | |
| 3640 | — | WP_160161519.1 | Bacteria | NZ_BIFH01000022.1 | RNA-guided endonuclease | Embleya hyalina | |
| | | | | | TnpB family protein | | |
| 3641 | — | WP_184926488.1 | Bacteria | NZ_BMSQ01000046.1 | RNA-guided endonuclease | Streptomyces spectabilis | |
| | | | | | TnpB family protein | | |
| 3642 | — | WP_249402339.1 | Bacteria | NA | NA | Streptomyces sp. YIM | |
| | | | | | | 121038 | |
| 3643 | — | MBV1850028.1 | Bacteria | JAHRCY010000003.1 | transposase | Catellatospora tritici | |
| 3644 | — | WP_158718059.1 | Bacteria | NZ_JOFX01000101.1 | RNA-guided endonuclease | Streptomyces sp. NRRL F- | |
| | | | | | TnpB family protein | 2664 | |
| 3645 | — | WP_081722676.1 | Bacteria | NZ_AYJW01000091.1 | RNA-guided endonuclease | Saccharopolyspora | |
| | | | | | TnpB family protein | rectivirgula | |
| 3646 | — | WP_056865466.1 | Bacteria | NZ_LMNH01000005.1 | RNA-guided endonuclease | Nocardioides sp. Leaf285 | |
| | | | | | TnpB family protein | | |
| 3647 | — | WP_073919363.1 | Bacteria | NZ_LIVV01000018.1 | RNA-guided endonuclease | Streptomyces sp. CB02009 | |
| | | | | | TnpB family protein | | |
| 3648 | — | MBX6383759.1 | Bacteria | JADGHC010000139.1 | transposase | Microbispora sp. | |
| 3649 | — | MBK5249433.1 | Bacteria | JAENWO010000160.1 | transposase | Actinomycetales bacterium | |
| 3650 | — | WP_201732728.1 | Bacteria | NZ_CAJHCI020000001.1 | RNA-guided endonuclease | Acidithrix sp. C25 | |
| | | | | | TnpB family protein | | |
| 3651 | — | CKM91148.1 | Bacteria | CNCC01000009.1 | transposase | Mycobacterium | |
| | | | | | | tuberculosis | |
| 3652 | — | COW23552.1 | Bacteria | CSAM01000144.1 | transposase | Mycobacterium | |
| | | | | | | tuberculosis | |
| 3653 | — | QFS94653.1 | Bacteria | CP045326.1 | Putative transposase DNA- | Mycobacterium sp. | |
| | | | | | binding domain protein | THAF192 | |
| 3654 | — | CMO32992.1 | Bacteria | CPFD01000011.1 | PE-PGRS family protein | Mycobacterium | |
| | | | | | | tuberculosis | |
| 3655 | — | WP_249938582.1 | Bacteria | NZ_CP074102.1 | IS607 family element RNA- | Streptomyces mirabilis | |
| | | | | | guided endonuclease TnpB | | |
| 3656 | — | MCA1843111.1 | Bacteria | JAIVGM010000423.1 | transposase | Actinomycetia bacterium | |
| 3657 | — | MCH3926044.1 | Bacteria | JAKVOX010000009.1 | IS607 family element RNA- | Atopobiaceae bacterium | |
| | | | | | guided endonuclease TnpB | | |
| 3658 | — | WP_033510639.1 | Bacteria | NZ_ATVE01000002.1 | IS607 family element RNA- | Bifidobacterium magnum | |
| | | | | | guided endonuclease TnpB | | |
| 3659 | — | WP_094730640.1 | Bacteria | NZ_MWWY01000047.1 | RNA-guided endonuclease | Bifidobacterium hapali | |
| | | | | | TnpB family protein | | |
| 3660 | — | OYV64949.1 | Bacteria | NCBD01000084.1 | hypothetical protein | Actinobacteria bacterium | |
| | | | | | | 21-64-8 | |
| 3661 | — | MCL5445215.1 | Bacteria | JAMCVJ010000041.1 | transposase | Actinobacteria bacterium | |
| 3662 | — | WP_002543763.1 | Bacteria | NZ_GL384574.1 | IS607 family element RNA- | Cutibacterium acnes | |
| | | | | | guided endonuclease TnpB | | |
| 3663 | — | TXH08350.1 | Bacteria | SSEG01000079.1 | transposase | Spirochaetes bacterium | |
| 3664 | — | NLE80359.1 | Bacteria | JAAZAD010000277.1 | IS200/IS605 family element | Rhodococcus sp. | |
| | | | | | transposase accessory protein | | |
| | | | | | TnpB | | |
| 3665 | — | MBE1608405.1 | Bacteria | JADBEM010000001.1 | IS605 OrfB family transposase | Actinopolymorpha | |
| | | | | | | pittospori | |
| 3666 | — | AHH15381.1 | Bacteria | CP006850.1 | putative transposase | Nocardia nova SH22a | |
| 3667 | — | TMA27199.1 | Bacteria | VBLL01000341.1 | transposase | Deltaproteobacteria | |
| | | | | | | bacterium | |
| 3668 | — | MBV8528370.1 | Bacteria | JAFALX010000249.1 | IS607 family element | Candidatus | |
| | | | | | transposase accessory protein | Dormibacteraeota | |
| | | | | | TnpB | bacterium | |
| 3669 | — | MBK5305186.1 | Bacteria | JAENVS010000002.1 | transposase | Frankiaceae bacterium | |
| 3670 | — | TQN43367.1 | Bacteria | VFQE01000001.1 | putative transposase | Blastococcus colisei | |
| 3671 | — | WP_168076855.1 | Bacteria | NZ_BONU01000008.1 | RNA-guided endonuclease | Planosporangium | |
| | | | | | TnpB family protein | flavigriseum | |
| 3672 | — | RYF11980.1 | Bacteria | SECT01000862.1 | transposase | Oxalobacteraceae | |
| | | | | | | bacterium | |
| 3673 | — | RYF20367.1 | Bacteria | SECT01000258.1 | transposase | Oxalobacteraceae | |
| | | | | | | bacterium | |
| 3674 | — | WP_217924892.1 | Bacteria | NZ_CP064357.1 | RNA-guided endonuclease | Miltoncostaea oceani | |
| | | | | | TnpB family protein | | |
| 3675 | — | MBX2803411.1 | Bacteria | JAHQVJ010000229.1 | transposase | Myxococcales bacterium | |
| 3676 | — | WP_169811088.1 | Bacteria | NZ_BDBA01000116.1 | RNA-guided endonuclease | Nocardia amamiensis | |
| | | | | | TnpB family protein | | |
| 3677 | — | NEW31973.1 | Bacteria | JAAGVB010000006.1 | IS200/IS605 family element | Nocardia cyriacigeorgica | |
| | | | | | transposase accessory protein | | |
| | | | | | TnpB | | |
| 3678 | — | WP_157431790.1 | Bacteria | NZ_BCRO01000070.1 | RNA-guided endonuclease | Actinomadura hibisca | |
| | | | | | TnpB family protein | | |
| 3679 | — | MCC7077908.1 | Bacteria | JADZDR010000061.1 | transposase | Acidimicrobiia bacterium | |
| 3680 | — | GBD07993.1 | Bacteria | BEHY01000003.1 | hypothetical protein | Candidatus Thermoflexus | |
| | | | | | | japonica | |
| 3681 | — | MCK9428506.1 | Bacteria | JALNZI010000001.1 | transposase | Candidatus Omnitrophica | |
| | | | | | | bacterium | |
| 3682 | — | WP_201384864.1 | Bacteria | NZ_BNJI01000001.1 | RNA-guided endonuclease | Ktedonobacter sp. SOSP1- | |
| | | | | | TnpB family protein | 85 | |
| 3683 | — | MBT9173893.1 | Bacteria | QLUR01000035.1 | hypothetical protein | Syntrophomonadaceae | |
| | | | | | | bacterium | |
| 3684 | — | RLI55304.1 | Archaea | QMYS01000028.1 | transposase | Candidatus Thorarchaeota | |
| | | | | | | archaeon | |
| 3685 | — | MCO5191373.1 | Bacteria | JAMLHY010000196.1 | transposase | Anaerolineae bacterium | |
| 3686 | — | RYF38583.1 | Bacteria | SEBG01002199.1 | transposase | Cytophagaceae bacterium | |
| 3687 | — | MBL7988914.1 | Bacteria | JAEUSP010000101.1 | transposase | Chlorobi bacterium | |
| 3688 | — | RJQ26735.1 | Bacteria | QZIP01000019.1 | transposase | Candidatus Parcubacteria | |
| | | | | | | bacterium | |
| 3689 | — | TLY10458.1 | Archaea | VBPE01000283.1 | IS200/IS605 family element | Thaumarchaeota archaeon | |
| | | | | | transposase accessory protein | | |
| | | | | | TnpB | | |
| 3690 | — | MBS3968094.1 | Bacteria | JAGXSJ010000155.1 | AAA family ATPase | Truepera sp. | |
| 3691 | — | MBW4580660.1 | Bacteria | JAHHIG010000007.1 | transposase | Tildeniella nuda | |
| | | | | | | ZEHNDER 1965/U140 | |
| 3692 | — | MBW4476588.1 | Bacteria | JAHHIJ010000006.1 | transposase | Tolypothrix brevis GSE- | |
| | | | | | | NOS-MK-07-07A | |
| 3693 | — | MCC3404118.1 | Bacteria | JAEQCG010000001.1 | transposase | Microcoleus sp. | |
| | | | | | | PH2017_10_PVI_O_A | |
| 3694 | — | CBN58625.1 | Bacteria | CACA01000348.1 | Putative transposase | Kamptonema sp. PCC 6506 | |
| 3695 | — | MCP4262707.1 | Bacteria | JAAENU010001020.1 | IS200/IS605 family element | Planctomycetes bacterium | |
| | | | | | transposase accessory protein | | |
| | | | | | TnpB | | |
| 3696 | — | WP_249960868.1 | Bacteria | NZ_JAHSQM010000001.1 | transposase | Histophilus somni | |
| 3697 | — | ETR67898.1 | Bacteria | ATBP01001165.1 | Transposase, IS605 OrfB family | Candidatus Magnetoglobus | |
| | | | | | | multicellularis str. | |
| | | | | | | Araruama | |
| 3698 | — | MBO1351887.1 | Bacteria | RFFC02000048.1 | transposase | Hormoscilla sp. GUM202 | |
| 3699 | — | MYE41332.1 | Bacteria | VXMV01000297.1 | transposase | Chloroflexi bacterium | |
| 3700 | — | MCF7917330.1 | Bacteria | JAIPGL010000102.1 | transposase | Candidatus Omnitrophica | |
| | | | | | | bacterium | |
| 3701 | — | MCK9289525.1 | Bacteria | JALNXM010000012.1 | transposase | Acholeplasmataceae | |
| | | | | | | bacterium | |
| 3702 | — | KAB7204993.1 | Bacteria | WDTZ01000009.1 | IS200/IS605 family element | Bifidobacterium longum | |
| | | | | | transposase accessory protein | | |
| | | | | | TnpB | | |
| 3703 | — | NJP07487.1 | Bacteria | JAAURD010000228.1 | IS200/IS605 family element | Chloroflexaceae bacterium | |
| | | | | | transposase accessory protein | | |
| | | | | | TnpB | | |
| 3704 | — | MCG3208616.1 | Bacteria | JAJVIM010000011.1 | IS607 family transposase | Anaerolineae bacterium | |
| | | | | | ISCARN56 | | |
| 3705 | — | MCB9161645.1 | Bacteria | JACKBF010000048.1 | transposase | Caldilineaceae bacterium | |
| 3706 | — | MBO0797137.1 | Bacteria | JAFMRO010002369.1 | transposase | Ktedonobacteraceae | |
| | | | | | | bacterium | |
| 3707 | — | MBT9140945.1 | Bacteria | QLUI01000208.1 | hypothetical protein | Dehalococcoidia bacterium | |
| 3708 | — | GHO76744.1 | Bacteria | BNJI01000001.1 | transposase | Ktedonobacter sp. SOSP1- | |
| | | | | | | 85 | |
| 3709 | — | NJM39672.1 | Bacteria | JAAURT010000038.1 | transposase | Anaerolineae bacterium | |
| 3710 | — | MBP5458748.1 | Bacteria | JAGCWL010000042.1 | transposase | Clostridia bacterium | |
| 3711 | — | MBR5606671.1 | Bacteria | JAFYXT010000553.1 | transposase | Verrucomicrobia bacterium | |
| 3712 | — | MBQ3342430.1 | Bacteria | JAFRBA010000118.1 | transposase | Kiritimatiellae bacterium | |
| 3713 | — | MBF0377789.1 | Bacteria | JADFZQ010000011.1 | transposase | Desulfamplus sp. | |
| 3714 | — | ACL25892.1 | Bacteria | CP001337.1 | putative transposase | Chloroflexus aggregans | |
| | | | | | IS891/IS1136/IS1341 family | DSM 9485 | |
| 3715 | — | UIT42014.1 | Bacteria | CP090510.1 | RNA-guided endonuclease | Xylella fastidiosa subsp. | |
| | | | | | TnpB family protein | multiplex | |
| 3716 | — | WP_242522416.1 | Bacteria | NZ_CP065956.1 | transposase | Methylacidiphilum sp. IT5 | |
| 3717 | — | NBS53538.1 | Bacteria | RFVR01000411.1 | transposase | Spartobacteria bacterium | |
| 3718 | — | WP_023829013.1 | Bacteria | NZ_AYXD01000007.1 | RNA-guided endonuclease | Mesorhizobium sp. | |
| | | | | | TnpB family protein | L103C120A0 | |
| 3719 | — | MXZ22831.1 | Bacteria | VXSW01000348.1 | IS200/IS605 family element | Caldilineaceae bacterium | |
| | | | | | transposase accessory protein | SB0665_bin_25 | |
| | | | | | TnpB | | |
| 3720 | — | WP_174502039.1 | Bacteria | NZ_CACTIA010000004.1 | RNA-guided endonuclease | Acidiphilium | |
| | | | | | TnpB family protein | | |
| 3721 | — | MBV8314374.1 | Bacteria | JAFAJO010000266.1 | transposase | Planctomycetaceae | |
| | | | | | | bacterium | |
| 3722 | — | MBL4653835.1 | Bacteria | JAESTK010000298.1 | transposase | Flavobacteriales bacterium | |
| 3723 | — | GGR30891.1 | Bacteria | BMQL01000051.1 | transposase | Deinococcus ruber | |
| 3724 | — | MBC7416469.1 | Bacteria | JACMRD010000315.1 | transposase | Herminiimonas sp. | |
| 3725 | — | SAL83562.1 | Bacteria | FCON02000140.1 | transposase | Caballeronia choica | |
| 3726 | — | NCX55835.1 | Bacteria | RGKS01000012.1 | transposase | Burkholderiaceae bacterium | |
| 3727 | — | NLI97323.1 | Bacteria | JAAYVC010000012.1 | IS200/IS605 family element | bacterium | |
| | | | | | transposase accessory protein | | |
| | | | | | TnpB | | |
| 3728 | — | MYA89726.1 | Bacteria | VXPN01000482.1 | IS200/IS605 family element | Boseongicola sp. | |
| | | | | | transposase accessory protein | SB0662 bin 57 | |
| | | | | | TnpB | | |
| 3729 | — | AUR94149.1 | Viruses | MG592562.1 | coil containing protein | Vibrio phage 1.193.O._10N.286.52.C6 | |
| 3730 | — | HHB94511.1 | Bacteria | DRRX01000370.1 | transposase | Campylobacterales | |
| | | | | | | bacterium | |
| 3731 | — | ABA56927.1 | Bacteria | CP000127.1 | Transposase | Nitrosococcus oceani | |
| | | | | | | ATCC 19707 | |
| 3732 | — | MCL4729498.1 | Bacteria | JAHDXQ010000033.1 | transposase | Planctomycetes bacterium | |
| 3733 | — | MCC7509685.1 | Bacteria | JADZFR010000039.1 | transposase | Planctomycetes bacterium | |
| 3734 | — | MBI4639958.1 | Bacteria | JACQWG010000202.1 | transposase | Candidatus Tectomicrobia | |
| | | | | | | bacterium | |
| 3735 | — | MCL5064290.1 | Bacteria | JAMCVM010000066.1 | transposase | Firmicutes bacterium | |
| 3736 | — | PSR20578.1 | Bacteria | PXYV01000057.1 | transposase | Sulfobacillus acidophilus | |
| 3737 | — | MBL8130243.1 | Bacteria | JAEURA010000002.1 | transposase | Anaerolineae bacterium | |
| 3738 | — | MCA1598530.1 | Bacteria | JAIVJW010000488.1 | transposase | Chloroflexi bacterium | |
| 3739 | — | WP_016482958.1 | Bacteria | NC_021487.1 | RNA-guided endonuclease | Chthonomonas calidirosea | |
| | | | | | TnpB family protein | | |
| 3740 | — | MBU4392250.1 | Bacteria | JAHINM010000073.1 | transposase | Actinomycetia bacterium | |
| 3741 | — | MBA3954981.1 | Bacteria | JACDHA010000042.1 | IS200/IS605 family element | Candidatus Dependentiae | |
| | | | | | transposase accessory protein | bacterium | |
| | | | | | TnpB | | |
| 3742 | — | MBU6383816.1 | Bacteria | JAGWZL010000019.1 | transposase | Verrucomicrobia bacterium | |
| 3743 | — | RLE58251.1 | Archaea | QMRE01000200.1 | hypothetical protein | Thermoprotei archaeon | |
| 3744 | — | OZA44473.1 | Bacteria | NCIS01000031.1 | phosphoribosylformylglycinamidine | Sulfurovum sp. 17-42-90 | |
| | | | | | synthase II | | |
| 3745 | — | MBC7476147.1 | Bacteria | JACMQJ010000681.1 | transposase | Candidatus | |
| | | | | | | Sericytochromatia | |
| | | | | | | bacterium | |
| 3746 | — | TAE34138.1 | Bacteria | RDXM01000011.1 | transposase | Candidatus Kapabacteria | |
| | | | | | | bacterium | |
| 3747 | — | MBB3726541.1 | Bacteria | JACIBV010000001.1 | IS605 OrfB family transposase | Nonomuraea dietziae | |
| 3748 | — | MBR2305922.1 | Bacteria | JAFVQG010000002.1 | transposase | Fibrobacter sp. | |
| 3749 | — | MYD60112.1 | Bacteria | VXLK01000027.1 | IS200/IS605 family element | Gemmatimonadetes | |
| | | | | | transposase accessory protein | bacterium | |
| | | | | | TnpB | | |
| 3750 | — | MCK9520115.1 | Bacteria | JALOAP010000273.1 | transposase | Dehalococcoidia bacterium | |
| 3751 | — | WP_139688187.1 | Bacteria | NZ_CP040882.1 | RNA-guided endonuclease | Sutterella faecalis | |
| | | | | | TnpB family protein | | |
| 3752 | — | HBJ0442079.1 | Bacteria | DAEWEK010000054.1 | transposase | Escherichia coli | |
| 3753 | — | CRL62417.1 | Bacteria | CVRY01000004.1 | putative transposase | Proteus penneri | |
| 3754 | — | SEQ49072.1 | Bacteria | FOFO01000036.1 | Putative transposase DNA- | Ectothiorhodospira magna | |
| | | | | | binding domain-containing | | |
| | | | | | protein | | |
| 3755 | — | TXG83546.1 | Bacteria | SSDU01000078.1 | transposase | Spirochaetes bacterium | |
| 3756 | — | WP_108620373.1 | Bacteria | NZ_CP028901.1 | RNA-guided endonuclease | Orrella marina | |
| | | | | | TnpB family protein | | |
| 3757 | — | MBA3954832.1 | Bacteria | JACDHA010000027.1 | IS200/IS605 family element | Candidatus Dependentiae | |
| | | | | | transposase accessory protein | bacterium | |
| | | | | | TnpB | | |
| 3758 | — | UNU23664.1 | Bacteria | CP031705.1 | transposase | Microcoleus vaginatus | |
| | | | | | | HSN003 | |
| 3759 | — | MCF4969249.1 | Bacteria | PJIZ01000069.1 | transposase | Nostoc sp. CMAA1605 | |
| 3760 | — | MYC25750.1 | Bacteria | VXNY01000029.1 | IS200/IS605 family element | Gammaproteobacteria | |
| | | | | | transposase accessory protein | bacterium | |
| | | | | | TnpB | | |
| 3761 | — | MXZ55878.1 | Bacteria | VXUA01000057.1 | IS200/IS605 family element | Gammaproteobacteria | |
| | | | | | transposase accessory protein | bacterium | |
| | | | | | TnpB | | |
| 3762 | — | HAT61083.1 | Bacteria | DMYZ01000031.1 | transposase | Prevotella sp. | |
| 3763 | — | MCK9435160.1 | Bacteria | JALNZP010000149.1 | transposase | Candidatus Cloacimonetes | |
| | | | | | | bacterium | |
| 3764 | — | CVK34159.1 | Archaea | LT158599.1 | conserved protein of unknown | Methanoculleus bourgensis | |
| | | | | | function | | |
| 3765 | — | MCE5338499.1 | Archaea | JAJFVJ010000044.1 | IS200/IS605 family element | Methanomicrobiaceae | |
| | | | | | RNA-guided endonuclease | archaeon | |
| | | | | | TnpB | | |
| 3766 | — | AKB50768.1 | Archaea | CP009526.1 | Mobile element protein | Methanosarcina barkeri str. | |
| | | | | | | Wiesmoor | |
| 3767 | — | DAG95583.1 | Viruses | BK035359.1 | endonuclease | CrAss-like virus sp. | |
| 3768 | — | MBW6484394.1 | Bacteria | JAHYJH010000183.1 | transposase | Vicingaceae bacterium | |
| 3769 | — | MCK9567760.1 | Archaea | JALOBN010000001.1 | transposase | Candidatus Pacearchaeota | |
| | | | | | | archaeon | |
| 3770 | — | DAH14297.1 | Viruses | BK018629.1 | endonuclease | Myoviridae sp. | |
| 3771 | — | DAD63936.1 | Viruses | BK016810.1 | endonuclease | Bacteriophage sp. | |
| 3772 | — | DAP35766.1 | Viruses | BK044501.1 | endonuclease | Bacteriophage sp. | |
| 3773 | — | MCL5420126.1 | Archaea | JAMCZJ010000001.1 | transposase | Candidatus Parvarchaeota | |
| | | | | | | archaeon | |
| 3774 | — | EQB72023.1 | Archaea | ATMF01000014.1 | hypothetical protein | Thermoplasmatales | |
| | | | | | | archaeon A-plasma | |
| 3775 | — | MBP3438317.1 | Bacteria | JAGBFJ010000033.1 | transposase | Sutterella sp. | |
| 3776 | — | HIT96764.1 | Bacteria | DVLZ01000025.1 | transposase | Candidatus Aphodousia | |
| | | | | | | faecavium | |
| 3777 | — | KDN94666.1 | Bacteria | JMIU01000002.1 | hypothetical protein | Hydrogenovibrio marinus | |
| 3778 | — | OQB17658.1 | Bacteria | MWCR01000020.1 | putative transposase | Parcubacteria group | |
| | | | | | | bacterium ADurb.Bin192 | |
| 3779 | — | MBR4299599.1 | Bacteria | JAFYLU010000083.1 | transposase | Bacteroidales bacterium | |
| 3780 | — | WP_229688843.1 | Bacteria | NZ_BMJC01000002.1 | transposase | Puia dinghuensis | |
| 3781 | — | MBZ4673393.1 | Bacteria | JAIMZO010000019.1 | transposase | Spirochaeta sp. | |
| 3782 | — | NLY06723.1 | Bacteria | JAAYFO010000016.1 | IS200/IS605 family element | Spirochaetales bacterium | |
| | | | | | transposase accessory protein | | |
| | | | | | TnpB | | |
| 3783 | — | MBV4177350.1 | Bacteria | JAHOMZ010000012.1 | transposase | Prevotella copri | |
| 3784 | — | ADR19969.1 | Bacteria | CP002348.1 | transposase, IS605 OrfB family | Calditerrivibrio | |
| | | | | | | nitroreducens DSM 19672 | |
| 3785 | — | MCK4265419.1 | Bacteria | JAGMEA010000030.1 | transposase | Candidatus Babeliales | |
| | | | | | | bacterium | |
| 3786 | — | MBU4313844.1 | Bacteria | JAHILP010000107.1 | transposase | Actinomycetia bacterium | |
| 3787 | — | NDD52914.1 | Bacteria | RGUK01000017.1 | transposase | bacterium | |
| 3788 | — | WP_082632311.1 | Bacteria | NZ_LMXN01000008.1 | RNA-guided endonuclease | Algoriphagus resistens | |
| | | | | | TnpB family protein | | |
| 3789 | — | NIQ15694.1 | Bacteria | WVYU01000617.1 | IS200/IS605 family element | Candidatus Dadabacteria | |
| | | | | | transposase accessory protein | bacterium | |
| | | | | | TnpB | | |
| 3790 | — | RLG43052.1 | Archaea | QMVV01000199.1 | hypothetical protein | Candidatus Korarchaeota | |
| | | | | | | archaeon | |
| 3791 | — | WP_157243542.1 | Bacteria | NZ_LMXN01000014.1 | RNA-guided endonuclease | Algoriphagus resistens | |
| | | | | | TnpB family protein | | |
| 3792 | — | WP_224068215.1 | Bacteria | NZ_CP083387.1 | RNA-guided endonuclease | Arachidicoccus terrestris | |
| | | | | | TnpB family protein | | |
| 3793 | — | OGN59670.1 | Bacteria | MGLU01000080.1 | hypothetical protein | Chlamydiae bacterium | |
| | | | | | | RIFCSPHIGHO2_12_FULL_ | |
| | | | | | | 27_8 | |
| 3794 | — | MCL4546676.1 | Bacteria | JAMCTF010000122.1 | transposase | Deltaproteobacteria | |
| | | | | | | bacterium | |
| 3795 | — | MCQ2759550.1 | Bacteria | JAHHCQ010000027.1 | transposase | Helicobacter pylori | |
| 3796 | — | AEA33640.1 | Bacteria | CP002606.1 | transposase, IS605 OrfB family | Hippea maritima DSM | |
| | | | | | | 10411 | |
| 3797 | — | NCO11876.1 | Archaea | JAACVT010000041.1 | IS200/IS605 family element | Candidatus Pacearchaeota | |
| | | | | | transposase accessory protein | archaeon | |
| | | | | | TnpB | | |
| 3798 | — | MBK7456101.1 | Bacteria | JADJNA010000055.1 | transposase | Anaerolineales bacterium | |
| 3799 | — | MCL4303504.1 | Bacteria | JAHDWA010000117.1 | transposase | Anaerolineae bacterium | |
| 3800 | — | MCI0713466.1 | Bacteria | JAKEEQ010000450.1 | transposase | Chloroflexi bacterium | |
| 3801 | — | MCH9055422.1 | Bacteria | JAKLTU010000008.1 | transposase | Synechococcus sp. PCC | |
| | | | | | | 6716 | |
| 3802 | — | QMP82921.1 | Viruses | MT773554.1 | putative transposase | Myoviridae sp. | |
| 3803 | — | MCA9495566.1 | Archaea | JAGQJV010000040.1 | transposase | Nanoarchaeota archaeon | |
| 3804 | — | WP_198589107.1 | Bacteria | NZ_MCYZ01000095.1 | RNA-guided endonuclease | Vibrio breoganii | |
| | | | | | TnpB family protein | | |
| 3805 | — | MCB1712036.1 | Bacteria | JAGRHS010000083.1 | transposase | Candidatus Riesia sp. | |
| 3806 | — | KFZ27703.1 | Bacteria | JRFF01000002.1 | putative transposase | Candidatus Izimaplasma | |
| | | | | | | bacterium HR2 | |
| 3807 | — | MBK9038591.1 | Bacteria | JADJVA010000006.1 | transposase | Bdellovibrionales | |
| | | | | | | bacterium | |
| 3808 | — | WP_140473885.1 | Bacteria | NZ_RCZD01000008.1 | RNA-guided endonuclease | Ewingella americana | |
| | | | | | TnpB family protein | | |
| 3809 | — | WP_140473763.1 | Bacteria | NZ_RCZD01000008.1 | RNA-guided endonuclease | Ewingella americana | |
| | | | | | TnpB family protein | | |
| 3810 | — | WP_246661288.1 | Bacteria | NZ_VCHT01000001.1 | transposase | Rhizobium sp. MHM7A | |
| 3811 | — | NJO61096.1 | Bacteria | JAAURC010000093.1 | IS200/IS605 family element | Richelia sp. RM2_1_2 | |
| | | | | | transposase accessory protein | | |
| | | | | | TnpB | | |
| 3812 | — | MBU2440102.1 | Bacteria | JAHJUY010000177.1 | IS200/IS605 family element | bacterium | |
| | | | | | transposase accessory protein | | |
| | | | | | TnpB | | |
| 3813 | — | MBU0693774.1 | Bacteria | JAHIZL010000103.1 | transposase | Candidatus Omnitrophica | |
| | | | | | | bacterium | |
| 3814 | — | RDD48694.1 | Bacteria | LMUB01000043.1 | transposase | Aeromonas sp. ARM81 | |
| 3815 | — | NJL70686.1 | Bacteria | JAAUTC010000022.1 | IS200/IS605 family element | Candidatus | |
| | | | | | transposase accessory protein | Competibacteraceae | |
| | | | | | TnpB | bacterium | |
| 3816 | — | TAK97667.1 | Bacteria | SCTM01000338.1 | transposase | Rhodospirillaceae | |
| | | | | | | bacterium | |
| 3817 | — | WP_240842374.1 | Bacteria | NZ_VANV01000020.1 | transposase | Acidaminobacter sp. JC074 | |
| 3818 | — | MCK5867691.1 | Bacteria | JAGLCO010000280.1 | transposase | Mycoplasmataceae | |
| | | | | | | bacterium | |
| 3819 | — | WP_126222398.1 | Bacteria | NZ_PQZI01000011.1 | RNA-guided endonuclease | Campylobacter jejuni | |
| | | | | | TnpB family protein | | |
| 3820 | — | MCI0490646.1 | Bacteria | JAKEHD010000718.1 | transposase | Blastocatellia bacterium | |
| 3821 | — | EFY06737.1 | Bacteria | AEVO01000084.1 | transposase, IS605 OrfB family | Succinatimonas hippei YIT | |
| | | | | | | 12066 | |
| 3822 | — | MBU3827075.1 | Bacteria | JAHLFG010000066.1 | transposase | Candidatus | |
| | | | | | | Anaerobiospirillum | |
| | | | | | | merdipullorum | |
| 3823 | — | MCQ2087454.1 | Bacteria | JAKSHZ010000011.1 | transposase | Bacilli bacterium | |
| 3824 | — | OQC45945.1 | Bacteria | MWEU01000024.1 | putative transposase | Bacteroidetes bacterium | |
| | | | | | | ADurb.Bin028 | |
| 3825 | — | MCD8008696.1 | Bacteria | JAJQDS010000309.1 | transposase | Clostridiales bacterium | |
| 3826 | — | AUR92323.1 | Viruses | MG592537.1 | putative transposase | Vibrio phage | |
| | | | | | | 1.170.O._10N.261.52.C3 | |
| 3827 | — | WP_129032860.1 | Bacteria | NZ_QXIL01000016.1 | RNA-guided endonuclease | Levilactobacillus suantsaii | |
| | | | | | TnpB family protein | | |
| 3828 | — | YP_009814557.1 | Viruses | NC_048085.1 | transposase | Lactobacillus phage | |
| | | | | | | Bromius | |
| 3829 | — | MBQ8206469.1 | Bacteria | JAFTWY010000048.1 | transposase | Bacilli bacterium | |
| 3830 | — | MBR4237512.1 | Bacteria | JAFXYB010000022.1 | transposase | bacterium | |
| 3831 | — | MCR5586737.1 | Bacteria | JAILNN010000109.1 | transposase | Lachnospiraceae bacterium | |
| 3832 | — | NWK66519.1 | Bacteria | JACBFI010000020.1 | transposase | Sediminibacterium sp. | |
| | | | | | | Gen4 | |
| 3833 | — | QMP83086.1 | Viruses | MT773554.1 | putative transposase | Myoviridae sp. | |
| 3834 | — | DAW48010.1 | Viruses | BK036701.1 | endonuclease | Myoviridae sp. | |
| 3835 | — | NBK99691.1 | Bacteria | SAAR01000364.1 | hypothetical protein | Erysipelotrichia bacterium | |
| 3836 | — | EMG33423.1 | Bacteria | AORU01000002.1 | transposase | Streptococcus oralis subsp. | |
| | | | | | | tigurinus AZ_3a | |
| 3837 | — | DAW32762.1 | Viruses | BK036400.1 | endonuclease | Myoviridae sp. | |
| 3838 | — | DAT40494.1 | Viruses | BK046086.1 | endonuclease | Myoviridae sp. | |
| 3839 | — | DAY74050.1 | Viruses | BK027269.1 | endonuclease | Myoviridae sp. | |

Structural architecture of Fz and TnpB

[1418] Applicant next compared the structural architecture of TnpB from the IS200/1S605 transposon family of Deinococcus radiodurans (ISDra2 TnpB)⁸, Cas12a from Acidanmanococcus sp. (AsCas12a)⁹ a relative of TnpB from CRISPR-Cas class 2 type V-A systems, two Fz1 orthologs from the soil fungus Spizellomyces punctatus (S. punctatus, SpuFz1) and the algae Guillardia theta (G. theta, GtFz1), and two Fz2 orthologs from Percolozoa Naegleria lovaniensis (N. lovaniensis, NlovFz2) and a multicellular eukaryote—the marine mollusk Mercenaria mercenaria (M. mercenaria, MmeFz2) (FIG. 62B). Despite the strong divergence in sequence and size in these systems, applicant found that they share a similar core domain architecture that includes a WED region and a RuvC region. Fz encompasses a RuvC domain, which has a predicted active catalytic site formed by positively charged residues. This site is found within the comprehensive RuvC region in proteins such as AsCas12a, ISDra2 TnpB, SpuFz1, GtFz1, NlovFz2 and MmeFz2. The core regions of these proteins have various insertions that are specific to each family. The largest of these proteins, AsCas12a, has an ˜900 amino acid (aa) insertion in the WED region, known as the REC region, which forms a channel that protects the spacer-target hybrid region and is likely involved in R-loop formation¹⁰. In ISDra2 TnpB, NlovFz2 and MmeFz2, this REC region is reduced to three helices (˜100 aa), which likely serve as a minimal structure to achieve the same function. SpuFz1 has these three helices and an additional insertion of 150 aa that forms a globular extension that interacts with another extension inserted within the RuvC domain, contributing to a channel shape that, although smaller, is similar to the REC region of AsCas12a (FIG. 69). Although NlovFz2 and MmeFz2 bear resemblances to ISDra2 TnpB, each harbors a unique N-terminal disordered region, with NlovFz2 featuring a 96-aa segment and MmeFz2 having a 61-aa segment. The structural differences between ISDra2 TnpB, Fz1 and Fz2 suggest selection of distinct features related to the mechanisms and/or functions of these systems, but the conservation of the core region and predicted active catalytic sites suggests that Fz may be able to perform RNA-guided targeting.

Identification of ωRNA from Fz Loci

[1419] To test RNA-guided endonuclease activity of Fz, applicant focused on SpuFz1, given its larger REC domain relative to Fz2. SpuFz1 is encoded in a ˜2.1-kbp long locus containing a single open reading frame (ORF) flanked by well-conserved, non-degraded transposon inverted repeat (IR) structures (left end (LE) and right end (RE)). Within the sequenced genome of S. punctatus DAOM BR117, applicant identified 42 loci containing full-length (19) or partial Fz genes and 134 loci containing two regions homologous to the IRs surrounding the Fz gene but lacking the Fz ORF (applicant refers to the latter hereafter as ghost Spu-1 elements) (FIG. 70A-70B, Table 21 and Example 16). SpuFz1 proteins are extremely well conserved. sharing around 82% sequence identity, including the catalytic sites, suggesting recent duplication or strong selection. The complete Fz genes are surrounded by 30-nt IRs with 2 additional conserved nts, CA, upstream of the 5′ (also referred to as LE⁶) IR (FIG. 70A). Applicant identified eleven Fz loci that contain additional genes embedded by the IRs, including Gypsy/Ty3 inserted upstream, downstream or within the Fz gene, although the latter is suggestive of a past transposition of Ty3 instead of an association with Fz (FIG. 70A). The ghost loci encode a conserved region of ˜550 nt flanked by 30-nt conserved IRs, although the sequence differs from that of the Fz loci IRs at 7 positions (FIG. 70A). Ghost loci also have the conserved CA motif upstream of the 5′ IR (FIG. 70A). The 75-nt region encompassing the 3′ (also referred to as RE) IR shares similarity to the region in FT loci found between the stop codon and the 3′ IR (FIG. 70C). To determine if the 80-nt region in Fz loci encodes a ncRNA, applicant performed small RNA-seq on S. punctatus. The small RNA-seq showed expression of an 88-90-nt long ncRNA species downstream of Fz in 4 of these loci (FIG. 70D). Applicant observed that the transcripts consistently extended 14-15 nt beyond the conserved 75-nt region at the 3′ end, and that these extensions contained variable sequences. The conserved ncRNA spanning the 1R and the variable extension is suggestive of an ωRNA with a 75-nt scaffold and 14-15-nt guide region. To confirm the interaction between SpuFz1 and the ncRNA, applicant heterologously expressed 10×His-maltose-binding protein (MBP) tagged SpuFz1 with downstream IRs of representative Spu-1 elements in Saccharomyces cerevisiae and performed pull-down experiments followed by small RNA-seq. Applicant found the RNP complex contained the same ncRNA species observed in the native organism, indicating that SpuFz1 binds to the ncRNA transcribed from the 3′ IR, indicating it is an ωRNA (FIG. 62C). Applicant noted the ωRNA coding sequence of GtFz1 overlaps with 17 aa of the C-terminal protein coding sequence, similar to, although smaller, than the overlap observed for the ωRNA of ISDra2 TnpB^{8,11}. Using the same workflow, applicant confirmed the expression of the ωRNA for 20 Fz loci from 10 organisms (FIG. 71, Tables 16-18), including an Fz1 locus from G. theta, four Fz2 loci from N. lovaniensis, and two Fz2 loci from M. mercenaria (FIG. 62C and FIG. 71). Secondary structure prediction of these ωRNAs revealed a stem loop structure, which contains the flanking DNA sequence (FIG. 62C).

TABLE 16
Plasmids used

| | | | | FZID1 |
|---|---|---|---|---|
| Plasmid | | | | 6 point |
| name | Plasmid description | Plasmid DNA sequence | Used in: | mutations |
| pMJ43 | S. cerevisiae expression vector for FZID14 native guide | SEQ ID NO: 3906 | FIG. 62 | |
| pMJ45 | S. cerevisiae expression vector for FZID16 (SpuFz1) native guide | SEQ ID NO: 3907 | FIG. 62 and 63 | |
| pMJ46 | S. cerevisiae expression vector for FZID19 native guide | SEQ ID NO: 3908 | FIG. 62 | |
| pMJ48 | S. cerevisiae expression vector for FZID20 native guide | SEQ ID NO: 3909 | FIG. 62 | |
| pMJ51 | S. cerevisiae expression vector for FZID23 native guide | SEQ ID NO: 3910 | FIG. 62 | |
| pMJ100 | S. cerevisiae expression vector for FZID28 native guide | SEQ ID NO: 3911 | FIG. 62 | |
| pMJ106 | S. cerevisiae expression vector for FZID35 (NlovFz2) native guide | SEQ ID NO: 3912 | FIG. 62 | |
| pMJ107 | S. cerevisiae expression vector for FZID36 native guide | SEQ ID NO: 3913 | FIG. 62 | |
| pMJ108 | S. cerevisiae expression vector for FZID37 native guide | SEQ ID NO: 3914 | FIG. 62 | |
| pMJ109 | S. cerevisiae expression vector for FZID38 native guide | SEQ ID NO: 3915 | FIG. 62 | |
| pMJ139 | S. cerevisiae expression vector for FZID55 native guide | SEQ ID NO: 3916 | FIG. 62 | |
| pMSSM1 | S. cerevisiae expression vector for FZID58 native guide | SEQ ID NO: 3917 | FIG. 62 | |
| pMSSM2 | S. cerevisiae expression vector for FZID59 native guide | SEQ ID NO: 3918 | FIG. 62 | |
| pMSSM6 | S. cerevisiae expression vector for FZID62 native guide | SEQ ID NO: 3919 | FIG. 62 | |
| pMJ235 | S. cerevisiae expression vector for FZID83 (GtFz1) native guide | SEQ ID NO: 3920 | FIG. 62 | |
| pMJ237 | S. cerevisiae expression vector for FZID85 native guide | SEQ ID NO: 3921 | FIG. 62 | |
| pMJ240 | S. cerevisiae expression vector for FZID88 (MmeFz2) native guide | SEQ ID NO: 3922 | FIG. 62 | |
| pMJ241 | S. cerevisiae expression vector for FZID89 native guide | SEQ ID NO: 3923 | FIG. 62 | |
| pMJ248 | S. cerevisiae expression vector for FZID96 native guide | SEQ ID NO: 3924 | FIG. 62 | |
| pMJ249 | S. cerevisiae expression vector for FZID97 native guide | SEQ ID NO: 3925 | FIG. 62 | |
| pMJ123 | S. cerevisiae expression vector for FZID16 reprogrammed guide | SEQ ID NO: 3926 | FIG. 2 | |
| | (targeting PSP1) | | | |
| pMJ127 | S. cerevisiae expression vector for FZID35 reprogrammed guide | SEQ ID NO: 3927 | FIG. 2 | |
| | (targeting PSP1) | | | |
| pMJ273 | S. cerevisiae expression vector for FZID83 reprogrammed guide | SEQ ID NO: 3928 | FIG. 2 | |
| | (targeting PSP1) | | | |
| pMJ276 | S. cerevisiae expression vector for FZID88 reprogrammed guide | SEQ ID NO: 3929 | FIG. 2 | |
| | (targeting PSP1) | | | |
| pUC19_tam_{—} | TAM library plasmid containing 8N + PSP1 | SEQ ID NO: 3930 | FIG. 2 | |
| library_{—} | | | | |
| left | | | | |
| pMJ183 | Target for FZID16 (CATA + PSP1) | SEQ ID NO: 3931 | FIG. 2 | |
| pMJ323 | Target for FZID35 (CCG + PSP1) | SEQ ID NO: 3932 | FIG. 2 | |
| pMJ324 | Target for FZID83 (TTAAG + PSP1) | SEQ ID NO: 3933 | FIG. 2 | |
| pMJ335 | Target for FZID88 (TAG + PSP1) | SEQ ID NO: 3934 | FIG. 2 | |
| pMSSM24 | Human expression vector for human codon optimized FZID16 | SEQ ID NO: 3935 | FIG. 64 | |
| pMJ162 | Human expression vector for FZID16 omegaRNA 75-nt scaffold (BbsI | SEQ ID NO: 3936 | FIG. 64 | |
| | guide entry site) | | | |
| pMJ311 | Human expression vector for human codon optimized FZID35 | SEQ ID NO: 3937 | FIG. 64 | |
| pMSSM151 | Human expression vector for FZID35 omegaRNA (BsmBI guide entry | SEQ ID NO: 3938 | FIG. 64 | |
| | site) | | | |
| pMJ326 | Human expression vector for human codon optimized FZID83 | SEQ ID NO: 3939 | FIG. 64 | |
| pMJ332 | Human expression vector for FZID83 omegaRNA (BbsI guide entry | SEQ ID NO: 3940 | FIG. 64 | |
| | site) | | | |
| pMJ329 | Human expression vector for human codon optimized FZID88 | SEQ ID NO: 3941 | FIG. 64 | |
| pMJ333 | Human expression vector for FZID88 omegaRNA (BbsI guide entry | SEQ ID NO: 3942 | FIG. 64 | |
| | site) | | | |
| pMJ169 | Human expression vector for FZID16 omegaRNA 5′ + 87 nt extended | SEQ ID NO: 3943 | FIG. 64 | |
| | scaffold (BbsI guide entry site) | | | |
| pMJ170 | Human expression vector for FZID16 omegaRNA 5′ + 126 nt extended | SEQ ID NO: 3944 | FIG. 64 | |
| | scaffold (BbsI guide entry site) | | | |
| pMJ171 | Human expression vector for FZID16 omegaRNA 5′ + 201 nt extended | SEQ ID NO: 3945 | FIG. 64 | |
| | scaffold (BbsI guide entry site) | | | |
| pMJ204 | Human expression vector for FZID16 omegaRNA 5′ + 275 nt extended | SEQ ID NO: 3946 | FIG. 64 | |
| | scaffold (BbsI guide entry site) | | | |
| pMJ205 | Human expression vector for FZID16 omegaRNA 5′ + 350 nt extended | SEQ ID NO: 3947 | FIG. 64 | |
| | scaffold (BbsI guide entry site) | | | |
| pMJ206 | Human expression vector for FZID16 omegaRNA 5′ + 425 nt extended | SEQ ID NO: 3948 | FIG. 64 | |
| | scaffold (BbsI guide entry site) | | | |
| pMJ548 | Human expression vector for FZID16 omegaRNA 75-nt scaffold + 5′ | SEQ ID NO: 3949 | FIG. 64 | |
| | MS2- (BbsI guide entry site) | | | |
| pMJ549 | Human expression vector for FZID16 omegaRNA 75-nt scaffold + 5′ | SEQ ID NO: 3950 | FIG. 64 | |
| | Csy4-(BbsI guide entry site) | | | |
| pMJ168 | Human expression vector for FZID16 omegaRNA 75-nt scaffold + 3′ | SEQ ID NO: 3951 | FIG. 64 | |
| | HDV-(BbsI guide entry site) | | | |
| pMJ452 | Human expression vector for FZID16 Ghost1 omegaRNA 75-nt | SEQ ID NO: 3952 | FIG. 64 | |
| | scaffold (guideID97) | | | |
| pMJ454 | Human expression vector for FZID16 Ghost2 omegaRNA 75-nt | SEQ ID NO: 3953 | FIG. 64 | |
| | scaffold (guideID97) | | | |
| pMJ451 | Human expression vector for FZID16 Ghost3 omegaRNA 75-nt | SEQ ID NO: 3954 | FIG. 64 | |
| | scaffold (guideID97) | | | |
| pMJ455 | Human expression vector for FZID16 Ghost4 omegaRNA 75-nt | SEQ ID NO: 3955 | FIG. 64 | |
| | scaffold (guideID97) | | | |
| pMSSM16 | Human expression vector for human codon optimized N-terminal | SEQ ID NO: 3956 | FIG. 64 | |
| | NLS-tagged FZID16 | | | |
| pMSSM59 | Human expression vector for human codon optimized N-terminal | SEQ ID NO: 3957 | FIG. 64 | D300R |
| | NLS-tagged FZID16 point mutant | | | |
| pMSSM57 | Human expression vector for human codon optimized N-terminal | SEQ ID NO: 3958 | FIG. 64 | C310R |
| | NLS-tagged FZID16 point mutant | | | |
| pMSSM58 | Human expression vector for human codon optimized N-terminal | SEQ ID NO: 3959 | FIG. 64 | D487K |
| | NLS-tagged FZID16 point mutant | | | |
| pMSSM97 | Human expression vector for human codon optimized N-terminal | SEQ ID NO: 3960 | FIG. 64 | E498R |
| | NLS-tagged FZID16 point mutant | | | |
| pMSSM105 | Human expression vector for human codon optimized N-terminal | SEQ ID NO: 3961 | FIG. 64 | T513K |
| | NLS-tagged FZID16 point mutant | | | |
| pMSSM61 | Human expression vector for human codon optimized N-terminal | SEQ ID NO: 3962 | FIG. 64 | C310R + |
| | NLS-tagged FZID16 double mutant | | | D300R |
| pMSSM80 | Human expression vector for human codon optimized N-terminal | SEQ ID NO: 3963 | FIG. 64 | D300R + |
| | NLS-tagged FZID16 double mutant | | | D487K |
| pMSSM100 | Human expression vector for human codon optimized N-terminal | SEQ ID NO: 3964 | FIG. 64 | D300R + |
| | NLS-tagged FZID16 double mutant | | | E498R |
| pMSSM108 | Human expression vector for human codon optimized N-terminal | SEQ ID NO: 3965 | FIG. 64 | D300R + |
| | NLS-tagged FZID16 double mutant | | | T513K |
| pMSSM60 | Human expression vector for human codon optimized N-terminal | SEQ ID NO: 3966 | FIG. 64 | C310R + |
| | NLS-tagged FZID16 double mutant | | | D487K |
| pMSSM98 | Human expression vector for human codon optimized N-terminal | SEQ ID NO: 3967 | FIG. 64 | C310R + |
| | NLS-tagged FZID16 double mutant | | | E498R |
| pMSSM106 | Human expression vector for human codon optimized N-terminal | SEQ ID NO: 3968 | FIG. 64 | C310R + |
| | NLS-tagged FZID16 double mutant | | | T513K |
| pMSSM99 | Human expression vector for human codon optimized N-terminal | SEQ ID NO: 3969 | FIG. 64 | D487K + |
| | NLS-tagged FZID16 double mutant | | | E498R |
| pMSSM107 | Human expression vector for human codon optimized N-terminal | SEQ ID NO: 3970 | FIG. 64 | D487K + |
| | NLS-tagged FZID16 double mutant | | | T513K |
| pMSSM109 | Human expression vector for human codon optimized N-terminal | SEQ ID NO: 3971 | FIG. 64 | E498R + |
| | NLS-tagged FZID16 double mutant | | | T513K |
| pMSSM62 | Human expression vector for human codon optimized N-terminal | SEQ ID NO: 3972 | FIG. 64 | C310R + |
| | NLS-tagged FZID16 triple mutant | | | D487K + |
| | | | | D300R |
| pMSSM102 | Human expression vector for human codon optimized N-terminal | SEQ ID NO: 3973 | FIG. 64 | C310R + |
| | NLS-tagged FZID16 triple mutant | | | D300R + |
| | | | | E498R |
| pMSSM111 | Human expression vector for human codon optimized N-terminal | SEQ ID NO: 3974 | FIG. 64 | C310R + |
| | NLS-tagged FZID16 triple mutant | | | D300R + |
| | | | | T513K |
| pMSSM103 | Human expression vector for human codon optimized N-terminal | SEQ ID NO: 3975 | FIG. 64 | D487K + |
| | NLS-tagged FZID16 triple mutant | | | D300R + |
| | | | | E498R |
| pMSSM113 | Human expression vector for human codon optimized N-terminal | SEQ ID NO: 3976 | FIG. 64 | D487K + |
| | NLS-tagged FZID16 triple mutant | | | D300R + |
| | | | | T513K |
| pMSSM115 | Human expression vector for human codon optimized N-terminal | SEQ ID NO: 3977 | FIG. 64 | D300R + |
| | NLS-tagged FZID16 triple mutant | | | E498R + |
| | | | | T513K |
| pMSSM101 | Human expression vector for human codon optimized N-terminal | SEQ ID NO: 3978 | FIG. 64 | C310R + |
| | NLS-tagged FZID16 triple mutant | | | D487K + |
| | | | | E498R |
| pMSSM110 | Human expression vector for human codon optimized N-terminal | SEQ ID NO: 3979 | FIG. 64 | C310R + |
| | NLS-tagged FZID16 triple mutant | | | D487K + |
| | | | | T513K |
| pMSSM112 | Human expression vector for human codon optimized N-terminal | SEQ ID NO: 3980 | FIG. 64 | C310R + |
| | NLS-tagged FZID16 triple mutant | | | E498R + |
| | | | | T513K |
| pMSSM114 | Human expression vector for human codon optimized N-terminal | SEQ ID NO: 3981 | FIG. 64 | D487K + |
| | NLS-tagged FZID16 triple mutant | | | E498R + |
| | | | | T513K |
| pMSSM104 | Human expression vector for human codon optimized N-terminal | SEQ ID NO: 3982 | FIG. 64 | C310R + |
| | NLS-tagged FZID16 quadruple mutant | | | D300R + |
| | | | | D487K + |
| | | | | E498R |
| pMSSM116 | Human expression vector for human codon optimized N-terminal | SEQ ID NO: 3983 | FIG. 64 | C310R + |
| | NLS-tagged FZID16 quadruple mutant | | | D300R + |
| | | | | D487K + |
| | | | | T513K |
| pMSSM118 | Human expression vector for human codon optimized N-terminal | SEQ ID NO: 3984 | FIG. 64 | C310R + |
| | NLS-tagged FZID16 quadruple mutant | | | D300R + |
| | | | | E498R + |
| | | | | T513K |
| pMSSM119 | Human expression vector for human codon optimized N-terminal | SEQ ID NO: 3985 | FIG. 64 | D300R + |
| | NLS-tagged FZID16 quadruple mutant | | | D487K + |
| | | | | E498R + |
| | | | | T513K |
| pMSSM117 | Human expression vector for human codon optimized N-terminal | SEQ ID NO: 3986 | FIG. 64 | C310R + |
| | NLS-tagged FZID16 quadruple mutant | | | D487K + |
| | | | | E498R + |
| | | | | T513K |
| pMSSM120 | Human expression vector for human codon optimized N-terminal | SEQ ID NO: 3987 | FIG. 64 | C310R + |
| | NLS-tagged FZID16 quintuple mutant | | | D300R + |
| | | | | D487K + |
| | | | | E498R + |
| | | | | T513K |
| pHS1288 | Human expression vector for human codon optimized C-terminal | SEQ ID NO: 3988 | FIG. 72 | |
| | NLS-tagged ISDra2 TnpB | | | |
| pSN856 | Human expression vector for ISDra2 TnpB omegaRNA scaffold (BbsI | SEQ ID NO: 3989 | FIG. 72 | |
| | guide entry site) | | | |
| C136 | S. cerevisiae expression vector for FZID16 (SpuFz1) native guide - | SEQ ID NO: 3990 | FIG. 65 | |
| | short linker | | | |
| pMJ529 | Human expression vector for FZID16 omegaRNA 75-nt scaffold + 5′ | SEQ ID NO: 3991 | FIG. 65 | |
| | MS2- (FZID16_guide1) | | | |
| pMJ528 | Human expression vector for FZID16 omegaRNA 73-nt scaffold + 5′ | SEQ ID NO: 3992 | FIG. 65 | |
| | MS2- (FZID16_guide1) | | | |
| pMJ527 | Human expression vector for FZID16 omegaRNA 71-nt scaffold + 5′ | SEQ ID NO: 3993 | FIG. 65 | |
| | MS2- (FZID16 guide1) | | | |
| pMJ526 | Human expression vector for FZID16 omegaRNA 69-nt scaffold + 5′ | SEQ ID NO: 3994 | FIG. 65 | |
| | MS2- (FZID16_guide1) | | | |
| pMJ525 | Human expression vector for FZID16 omegaRNA 67-nt scaffold + 5′ | SEQ ID NO: 3995 | FIG. 65 | |
| | MS2- (FZID16_guide1) | | | |
| pMJ524 | Human expression vector for FZID16 omegaRNA 65-nt scaffold + 5′ | SEQ ID NO: 3996 | FIG. 65 | |
| | MS2- (FZID16 guide1) | | | |
| pMJ523 | Human expression vector for FZID16 omegaRNA 63-nt scaffold + 5′ | SEQ ID NO: 3997 | FIG. 65 | |
| | MS2- (FZID16_guide1) | | | |
| pMJ522 | Human expression vector for FZID16 omegaRNA 60-nt scaffold + 5′ | SEQ ID NO: 3998 | FIG. 65 | |
| | MS2- (FZID16_guide1) | | | |
| pMJ521 | Human expression vector for FZID16 omegaRNA 58-nt scaffold + 5′ | SEQ ID NO: 3999 | FIG. 65 | |
| | MS2- (FZID16_guide1) | | | |
| pMJ520 | Human expression vector for FZID16 omegaRNA 56-nt scaffold + 5′ | SEQ ID NO: 4000 | FIG. 65 | |
| | MS2- (FZID16_guide1) | | | |
| pMJ519 | Human expression vector for FZID16 omegaRNA 54-nt scaffold + 5′ | SEQ ID NO: 4001 | FIG. 65 | |
| | MS2- (FZID16_guide1) | | | |
| pMJ518 | Human expression vector for FZID16 omegaRNA 52-nt scaffold + 5′ | SEQ ID NO: 4002 | FIG. 65 | |
| | MS2- (FZID16_guide1) | | | |
| pMJ517 | Human expression vector for FZID16 omegaRNA 50-nt scaffold + 5′ | SEQ ID NO: 4003 | FIG. 65 | |
| | MS2- (FZID16_guide1) | | | |
| pMJ516 | Human expression vector for FZID16 omegaRNA 48-nt scaffold + 5′ | SEQ ID NO: 4004 | FIG. 65 | |
| | MS2- (FZID16_guide1) | | | |
| pMJ515 | Human expression vector for FZID16 omegaRNA 46-nt scaffold + 5′ | SEQ ID NO: 4005 | FIG. 65 | |
| | MS2- (FZID16_guide1) | | | |
| pMJ514 | Human expression vector for FZID16 omegaRNA 44-nt scaffold + 5′ | SEQ ID NO: 4006 | FIG. 65 | |
| | MS2- (FZID16_guide1) | | | |

TABLE 17
HG targeting guides and primers

| Guide ID | Locus | Guide | NGS Read1 primer | NGS Read2 primer |
|---|---|---|---|---|
| FZID16 | B2M | gcattccttaaca | CTTTCCCTACACGACGCTCTTC | GACTGGAGTTCAGACGTGTGCTCTTC |
| _guide1 | | catcact (SEQ | CGATCTgcagtatcttctgtcactggagattg | CGATCTggaaggggtggaaacagagtac (SEQ ID |
| | | ID NO: | (SEQ ID NO: 4008) | NO: 4009) |
| | | 4007) | | |
| FZID16 | CXCR4 | aatgtacaaacg | CTTTCCCTACACGACGCTCTTC | GACTGGAGTTCAGACGTGTGCTCTTC |
| _guide2 | | tttgaact | CGATCTagcaaagtgacgccgagggc | CGATCTtcacagagaaaaagattccaatcctgc (SEQ |
| | | (SEQ ID | (SEQ ID NO: 4011) | ID NO: 4012) |
| | | NO: 4010) | | |
| FZID16 | VEGFA | ccccttccaagg | CTTTCCCTACACGACGCTCTTC | GACTGGAGTTCAGACGTGTGCTCTTC |
| _guide3 | | ccagggag | CGATCTtcagccccctcacccattccc | CGATCTgcaagttcctcagaccctggcac (SEQ ID |
| | | (SEQ ID | (SEQ ID NO: 4014) | NO: 4015) |
| | | NO: 4013) | | |
| FZID16 | CA2 | tccattaaaaagt | CTTTCCCTACACGACGCTCTTC | GACTGGAGTTCAGACGTGTGCTCTTC |
| _guide4 | | atatctt (SEQ | CGATCTcaaaaggtgcaaagtcccctegc | CGATCTtcaaaacatgctgccatctttatcacac (SEQ |
| | | ID NO: | (SEQ ID NO: 4017) | ID NO: 4018) |
| | | 4016) | | |
| FZID16 | KRAS | gtataaaaatag | CTTTCCCTACACGACGCTCTTC | GACTGGAGTTCAGACGTGTGCTCTTC |
| _guide5 | | gctggccg | CGATCTtggcaaatattttctgtaaagggcca | CGATCTgtagagacggggtttcaaccacgttg (SEQ |
| | | (SEQ ID | ag (SEQ ID NO: 4020) | ID NO: 4021) |
| | | NO: 4019) | | |
| FZID16 | DYRK1 | aaatcaaatataa | CTTTCCCTACACGACGCTCTTC | GACTGGAGTTCAGACGTGTGCTCTTC |
| _guide6 | A | ataaatt (SEQ | CGATCTgcctgtgattaaccataggcgtatg | CGATCTgcccccttccagtcaatcccaac (SEQ ID |
| | | ID NO: | gtc (SEQ ID NO: 4023) | NO: 4024) |
| | | 4022) | | |
| FZID16 | HPRT1 | actccctaataaa | CTTTCCCTACACGACGCTCTTC | GACTGGAGTTCAGACGTGTGCTCTTC |
| _guide7 | | atgtgca | CGATCTgcatgtttctogagtgtagtctgttag | CGATCTtggccctcagcaagcagtaag (SEQ ID |
| | | (SEQ ID | cc (SEQ ID NO: 4026) | NO: 4027) |
| | | NO: 4025) | | |
| FZID16 | DMD | tcgacacactga | CTTTCCCTACACGACGCTCTTC | GACTGGAGTTCAGACGTGTGCTCTTC |
| _guide8 | | attctgcc | CGATCTgcaaggcggggattaaaggtagtg | CGATCTgagaattcgacatactttcttctctgc (SEQ |
| | | (SEQ ID | c (SEQ ID NO: 4029) | ID NO: 4030) |
| | | NO: 4028) | | |
| FZID16 | EMX1 | tatttacacacgc | CTTTCCCTACACGACGCTCTTC | GACTGGAGTTCAGACGTGTGCTCTTC |
| _guide9 | | ccatgca | CGATCTgtgggagctgagtccctatgctg | CGATCTtcccaacacacacactggagactcc (SEQ |
| | | (SEQ ID | (SEQ ID NO: 4032) | ID NO: 4033) |
| | | NO: 4031) | | |
| FZID16 | MSTN | atatgaacaaac | CTTTCCCTACACGACGCTCTTC | GACTGGAGTTCAGACGTGTGCTCTTC |
| _guide10 | | aatagtgg | CGATCTttagatgagaatggtcatgatcttgc | CGATCTagagtatcaagggagtgtttcatagg (SEQ |
| | | (SEQ ID | tg (SEQ ID NO: 4035) | ID NO: 4036) |
| | | NO: 4034) | | |
| FZID16 | GRIN2 | taaagagagata | CTTTCCCTACACGACGCTCTTC | GACTGGAGTTCAGACGTGTGCTCTTC |
| _guide11 | B | gaggtggt | CGATCTtcatcttgaattatttgggtgggccc | CGATCTtaaggctgcagaagactcgggggc (SEQ |
| | | (SEQ ID | (SEQ ID NO: 4038) | ID NO: 4039) |
| | | NO: 4037) | | |
| FZID16 | IFNG | tgatggaaattct | CTTTCCCTACACGACGCTCTTC | GACTGGAGTTCAGACGTGTGCTCTTC |
| _guide12 | | cttactt (SEQ | CGATCTgcaaagccagtaagagaatcgctg | CGATCTcagttccttggtggctgagttgggag (SEQ |
| | | ID NO: | aag (SEQ ID NO: 4041) | ID NO: 4042) |
| | | 4040) | | |
| FZID35 | B2M | tcacctgtctcca | CTTTCCCTACACGACGCTCTTC | GACTGGAGTTCAGACGTGTGCTCTTC |
| _guide1 | | agccagc | CGATCTgatagcctccaggccagaaag | CGATCTacccagtctagtgcatgccttc (SEQ ID |
| | | (SEQ ID | (SEQ ID NO: 4044) | NO: 4045) |
| | | NO: 4043) | | |
| FZID35 | CXCR4 | aaaggagttttct | CTTTCCCTACACGACGCTCTTC | GACTGGAGTTCAGACGTGTGCTCTTC |
| _guide2 | | tgaccat | CGATCTcaaacgtttgaacttagagcgcagc | CGATCTtacgtttgcaaacagegtgcaag (SEQ ID |
| | | (SEQ ID | (SEQ ID NO: 4047) | NO: 4048) |
| | | NO: 4046) | | |
| FZID35 | VEGFA | gcccaacccatg | CTTTCCCTACACGACGCTCTTC | GACTGGAGTTCAGACGTGTGCTCTTC |
| _guide3 | | gcacccac | CGATCTgaatgactggaggcagcttgctga | CGATCTgctaaagtagggtgtgatggg (SEQ ID |
| | | (SEQ ID | atg (SEQ ID NO: 4050) | NO: 4051) |
| | | NO: 4049) | | |
| FZID35 | CA2 | ggccttcagaaa | CTTTCCCTACACGACGCTCTTC | GACTGGAGTTCAGACGTGTGCTCTTC |
| _guide4 | | gttgttga | CGATCTctggtacagtaccaactgggtg | CGATCTgctagcattaggatcaactttgttg (SEQ ID |
| | | (SEQ ID | (SEQ ID NO: 4053) | NO: 4054) |
| | | NO: 4052) | | |
| FZID35 | KRAS | cctgaaatagac | CTTTCCCTACACGACGCTCTTC | GACTGGAGTTCAGACGTGTGCTCTTC |
| _guide5 | | ttaaacat | CGATCTcccctegtctcttttatactaccctc | CGATCTggaggtttcagtgagccgataccgc (SEQ |
| | | (SEQ ID | (SEQ ID NO: 4056) | ID NO: 4057) |
| | | NO: 4055) | | |
| FZID35 | DYRK1 | tagacagegcc | CTTTCCCTACACGACGCTCTTC | GACTGGAGTTCAGACGTGTGCTCTTC |
| _guide6 | A | agaccttca | CGATCTgaaagttgcggagggtgggag | CGATCTgceggccccattttettaac (SEQ ID NO: |
| | | (SEQ ID | (SEQ ID NO: 4059) | 4060) |
| | | NO: 4058) | | |
| FZID35 | HPRT1 | ccgtaactctag | CTTTCCCTACACGACGCTCTTC | GACTGGAGTTCAGACGTGTGCTCTTC |
| _guide7 | | cacttagc | CGATCTggccagttaaatatgctttagcctg | CGATCTccgttaatagcactgctetttacc (SEQ ID |
| | | (SEQ ID | (SEQ ID NO: 4062) | NO: 4063) |
| | | NO: 4061) | | |
| FZID35 | DMD | agctcttcaaact | CTTTCCCTACACGACGCTCTTC | GACTGGAGTTCAGACGTGTGCTCTTC |
| _guide8 | | ctgcaaa | CGATCTgctggccatgacaaagcatatg | CGATCTctgtctgaatatgccaatacatcaatc (SEQ |
| | | (SEQ ID | (SEQ ID NO: 4065) | ID NO: 4066) |
| | | NO: 4064) | | |
| FZID88 | B2M | agtctcgtgatgt | CTTTCCCTACACGACGCTCTTC | GACTGGAGTTCAGACGTGTGCTCTTC |
| _guide1 | | ttaagaa | CGATCTccacttatattaaacgcgtgcccag | CGATCTaagtcctagaatgagcgcccggtgtc (SEQ |
| | | (SEQ ID | c (SEQ ID NO: 4068) | ID NO: 4069) |
| | | NO: 4067) | | |
| FZID88 | CXCR4 | tgcgggtgggtg | CTTTCCCTACACGACGCTCTTC | GACTGGAGTTCAGACGTGTGCTCTTC |
| _guide2 | | ggggggga | CGATCTcaaacgtttgaacttagagcgcagc | CGATCTtacgtttgcaaacagegtgcaag (SEQ ID |
| | | (SEQ ID | (SEQ ID NO: 4071) | NO: 4072) |
| | | NO: 4070) | | |
| FZID88 | VEGFA | agactgaactga | CTTTCCCTACACGACGCTCTTC | GACTGGAGTTCAGACGTGTGCTCTTC |
| _guide3 | | aaaccctc | CGATCTctcaggcgttctoccagaag | CGATCTctcaggggctcccagtctacc (SEQ ID |
| | | (SEQ ID | (SEQ ID NO: 4074) | NO: 4075) |
| | | NO: 4073) | | |
| FZID88 | CA2 | ctgttttccgagc | CTTTCCCTACACGACGCTCTTC | GACTGGAGTTCAGACGTGTGCTCTTC |
| _guide4 | | ttaatgg (SEQ | CGATCTcaagcaacttccctgaggatcc | CGATCTcaagggttttacagggaagaaac (SEQ ID |
| | | ID NO: | (SEQ ID NO: 4077) | NO: 4078) |
| | | 4076) | | |
| FZID88 | KRAS | gacgaaggtata | CTTTCCCTACACGACGCTCTTC | GACTGGAGTTCAGACGTGTGCTCTTC |
| _guide5 | | aacttctc | CGATCTgtgcggtggaggttactccc | CGATCTgagcattcaggaactcggaggcagatg |
| | | (SEQ ID | (SEQ ID NO: 4080) | (SEQ ID NO: 4081) |
| | | NO: 4079) | | |
| FZID88 | DYRK1 | gtacagtgatttc | CTTTCCCTACACGACGCTCTTC | GACTGGAGTTCAGACGTGTGCTCTTC |
| _guide6 | A | accaaac | CGATCTggctccagaatctggctgatc | CGATCTgccaaggaagactacctggtttg (SEQ ID |
| | | (SEQ ID | (SEQ ID NO: 4083) | NO: 4084) |
| | | NO: 4082) | | |
| FZID88 | HPRT1 | aatgaccagtca | CTTTCCCTACACGACGCTCTTC | GACTGGAGTTCAGACGTGTGCTCTTC |
| _guide7 | | acagggga | CGATCTgctatggatattagctagctaacttc | CGATCTctcttagtgattgattgaaagcacact (SEQ |
| | | (SEQ ID | (SEQ ID NO: 4086) | ID NO: 4087) |
| | | NO: 4085) | | |
| FZID88 | DMD | gattaaggcaaa | CTTTCCCTACACGACGCTCTTC | GACTGGAGTTCAGACGTGTGCTCTTC |
| _guide8 | | gacggttg | CGATCTggaggagaacgtcctcaacttgg | CGATCTctaagagtaactttgtagaatacctgg (SEQ |
| | | (SEQ ID | (SEQ ID NO: 4089) | ID NO: 4090) |
| | | NO: 4088) | | |
| ISDra2 | B2M | ctacacccatct | CTTTCCCTACACGACGCTCTTC | GACTGGAGTTCAGACGTGTGCTCTTC |
| TnpBuid | | gatt (SEQ ID | CGATCTgttattgtactctgtttccaccccttec | CGATCTcttgggttgatccacttaggaacctcag |
| el | | NO: 4091) | (SEQ ID NO: 4092) | (SEQ ID NO: 4093) |
| ISDra2 | CXCR4 | gccgtggcaaa | CTTTCCCTACACGACGCTCTTC | GACTGGAGTTCAGACGTGTGCTCTTC |
| TnpBuide2 | | ctggt (SEQ | CGATCTggcaatggattggtcatcctggtca | CGATCTgcttccttggcctctgactgttggtgg (SEQ |
| | | ID NO: | tg (SEQ ID NO: 4095) | ID NO: 4096) |
| | | 4094) | | |
| ISDra2 | VEGFA | tagtcatcttetcc | CTTTCCCTACACGACGCTCTTC | GACTGGAGTTCAGACGTGTGCTCTTC |
| TnpBuide3 | | cc (SEQ ID | CGATCTccaaccccttgcccaggccag | CGATCTccagtccactgcttcctgtgaggtc (SEQ |
| | | NO: 4097) | (SEQ ID NO: 4098) | ID NO: 4099) |
| ISDra2 | CA2 | atctactcagaa | CTTTCCCTACACGACGCTCTTC | GACTGGAGTTCAGACGTGTGCTCTTC |
| TnpBuide4 | | attc (SEQ ID | CGATCTtgtcttgcagagctgatgcatatcc | CGATCTtcagtaatgggccaggtatgttcacc (SEQ |
| | | NO: 4100) | (SEQ ID NO: 4101) | ID NO: 4102) |
| ISDra2 | KRAS | atttgcatgcttct | CTTTCCCTACACGACGCTCTTC | GACTGGAGTTCAGACGTGTGCTCTTC |
| TnpBuide5 | | gg (SEQ ID | CGATCTgttgatttgcctagaaattaatttgcc | CGATCTagtaacaaaatactctgcagaaaggagg |
| | | NO: 4103) | (SEQ ID NO: 4104) | (SEQ ID NO: 4105) |
| ISDra2 | DYRK1 | tcccattctatcct | CTTTCCCTACACGACGCTCTTC | GACTGGAGTTCAGACGTGTGCTCTTC |
| TnpBuide6 | A | ca (SEQ ID | CGATCTgtgttctctcagggcaggaacaga | CGATCTtggtcccccagctgttcccag (SEQ ID |
| | | NO: 4106) | g (SEQ ID NO: 4107) | NO: 4108) |
| ISDra2 | HPRT1 | aaaatttatgtgt | CTTTCCCTACACGACGCTCTTC | GACTGGAGTTCAGACGTGTGCTCTTC |
| TnpBuide7 | | caa (SEQ ID | CGATCTggaaaaggaccaaccagatcagc | CGATCTgtaatttggcagccactgggcag (SEQ ID |
| | | NO: 4109) | agag (SEQ ID NO: 4110) | NO: 4111) |
| ISDra2 | DMD | ggaatcttactct | CTTTCCCTACACGACGCTCTTC | GACTGGAGTTCAGACGTGTGCTCTTC |
| TnpBuide8 | | gtc (SEQ ID | CGATCTtgtggctttggtctaactactaggca | CGATCTctcagctacttgggaggccgagg (SEQ ID |
| | | NO: 4112) | g (SEQ ID NO: 4113) | NO: 4114) |
| AsCas12a | B2M | tctggaggctct | CTTTCCCTACACGACGCTCTTC | GACTGGAGTTCAGACGTGTGCTCTTC |
| _guide1 | | caaggact | CGATCTatcagatgggtgtagatcaaggca | CGATCTttctgtcactggagattgcgctgc (SEQ ID |
| | | (SEQ ID | gg (SEQ ID NO: 4116) | NO: 4117) |
| | | NO: 4115) | | |
| AsCas12a | CXCR4 | ttgaccatgccta | CTTTCCCTACACGACGCTCTTC | GACTGGAGTTCAGACGTGTGCTCTTC |
| _guide2 | | tatagtg (SEQ | CGATCTccctctccgagogggcagaag | CGATCTcagegegcacgccttctctgc (SEQ ID |
| | | ID NO: | (SEQ ID NO: 4119) | NO: 4120) |
| | | 4118) | | |
| AsCas12a | VEGFA | tgtcctcagtggt | CTTTCCCTACACGACGCTCTTC | GACTGGAGTTCAGACGTGTGCTCTTC |
| _guide3 | | cccaggc | CGATCTggagaagccagaggctgttggtg | CGATCTatattcctgtgccccttccccttc (SEQ ID |
| | | (SEQ ID | (SEQ ID NO: 4122) | NO: 4123) |
| | | NO: 4121) | | |
| AsCas12a | CA2 | tcttgcagagct | CTTTCCCTACACGACGCTCTTC | GACTGGAGTTCAGACGTGTGCTCTTC |
| _guide4 | | gatgcata | CGATCTcaaaaggtgcaaagtcccctogc | CGATCTtgctgccatetttatcacactagccc (SEQ |
| | | (SEQ ID | (SEQ ID NO: 4125) | ID NO: 4126) |
| | | NO: 4124) | | |
| AsCas12a | KRAS | tgggattacagg | CTTTCCCTACACGACGCTCTTC | GACTGGAGTTCAGACGTGTGCTCTTC |
| _guide5 | | catgagcc | CGATCTgtagagacggggtttcaaccacgtt | CGATCTctcatccatgtaaatcagaggctggc (SEQ |
| | | (SEQ ID | g (SEQ ID NO: 4128) | ID NO: 4129) |
| | | NO: 4127) | | |
| AsCas12a | DYRK1 | tatcaataaattc | CTTTCCCTACACGACGCTCTTC | GACTGGAGTTCAGACGTGTGCTCTTC |
| _guide6 | A | cctttat (SEQ | CGATCTctgggcatgtctcagagggcc | CGATCTggtggcacagatcttaagagttcaac (SEQ |
| | | ID NO: | (SEQ ID NO: 4131) | ID NO: 4132) |
| | | 4130) | | |
| AsCas12a | HPRT1 | aatatatacatgc | CTTTCCCTACACGACGCTCTTC | GACTGGAGTTCAGACGTGTGCTCTTC |
| _guide7 | | acatttt (SEQ | CGATCTatatcatctggccctcagcaagc | CGATCTtttctcgagtgtagtctgttagccacc (SEQ |
| | | ID NO: | (SEQ ID NO: 4134) | ID NO: 4135) |
| | | 4133) | | |
| AsCas12a | DMD | agtgagggcttt | CTTTCCCTACACGACGCTCTTC | GACTGGAGTTCAGACGTGTGCTCTTC |
| _guide8 | | gacctcaa | CGATCTcgacacactgaattctgccagaaa | CGATCTcatacacaagttacaacatgtgctctc (SEQ |
| | | | cc (SEQ ID NO: 4137) | ID NO: 4138) |
| | | (SEQ ID | | |
| | | NO: 4136) | | |
| AsCas12f1 | B2M | aaaagtatcttgg | CTTTCCCTACACGACGCTCTTC | GACTGGAGTTCAGACGTGTGCTCTTC |
| _guide1 | | ggccaaa | CGATCTatcagatgggtgtagatcaaggca | CGATCTttctgtcactggagattgcgctgc (SEQ ID |
| | | (SEQ ID | gg (SEQ ID NO: 4140) | NO: 4141) |
| | | NO: 4139) | | |
| AsCas12f1 | CXCR4 | gagtacgggtac | CTTTCCCTACACGACGCTCTTC | GACTGGAGTTCAGACGTGTGCTCTTC |
| _guide2 | | ctccaatg | CGATCTccagcggttaccatggaggggatc | CGATCTctcaagggggagacacatgcagcc (SEQ |
| | | (SEQ ID | (SEQ ID NO: 4143) | ID NO: 4144) |
| | | NO: 4142) | | |
| AsCas12f1 | VEGFA | tgtcctcagtggt | CTTTCCCTACACGACGCTCTTC | GACTGGAGTTCAGACGTGTGCTCTTC |
| _guide3 | | cccaggc | CGATCTggagaagccagaggctgttggtg | CGATCTatattcctgtgccccttccccttc (SEQ ID |
| | | (SEQ ID | (SEQ ID NO: 4146) | NO: 4147) |
| | | NO: 4145) | | |
| AsCas12f1 | CA2 | tcttgcagagct | CTTTCCCTACACGACGCTCTTC | GACTGGAGTTCAGACGTGTGCTCTTC |
| _guide4 | | gatgcata | CGATCTcaaaaggtgcaaagtcccctogc | CGATCTtgctgccatctttatcacactagccc (SEQ |
| | | (SEQ ID | (SEQ ID NO: 4149) | ID NO: 4150) |
| | | NO: 4148) | | |
| AsCas12f1 | KRAS | tgggattacagg | CTTTCCCTACACGACGCTCTTC | GACTGGAGTTCAGACGTGTGCTCTTC |
| _guide5 | | catgagcc | CGATCTgtagagacggggtttcaaccacgtt | CGATCTctcatccatgtaaatcagaggctggc (SEQ |
| | | (SEQ ID | g (SEQ ID NO: 4152) | ID NO: 4153) |
| | | NO: 4151) | | |
| AsCas12f1 | DYRK1 | tatcaataaattc | CTTTCCCTACACGACGCTCTTC | GACTGGAGTTCAGACGTGTGCTCTTC |
| _guide6 | A | cctttat (SEQ | CGATCTctgggcatgtctcagagggcc | CGATCTggtggcacagatcttaagagttcaac (SEQ |
| | | ID NO: | (SEQ ID NO: 4155) | ID NO: 4156) |
| | | 4154) | | |
| AsCas12f1 | HPRT1 | ctgtcattgatcc | CTTTCCCTACACGACGCTCTTC | GACTGGAGTTCAGACGTGTGCTCTTC |
| _guide7 | | tgcacct | CGATCTtcattttatagcgttattaatttgggtg | CGATCTtctatatcatctggccctcagcaagc (SEQ |
| | | (SEQ ID | cc (SEQ ID NO: 4158) | ID NO: 4159) |
| | | NO: 4157) | | |
| AsCas12f1 | DMD | agtgagggcttt | CTTTCCCTACACGACGCTCTTC | GACTGGAGTTCAGACGTGTGCTCTTC |
| _guide8 | | gacctcaa | CGATCTcgacacactgaattctgccagaaa | CGATCTcatacacaagttacaacatgtgctctc (SEQ |
| | | (SEQ ID | cc (SEQ ID NO: 4161) | ID NO: 4162) |
| | | NO: 4160) | | |

TABLE 18

| | | | | | | | OmegaRNA | | |
|---|---|---|---|---|---|---|---|---|---|
| | | | | | | | (5′ to 3′) | | |
| | | | | | | | predicted by | | TAM |
| | | | | ATCC | | start- | heterologous | | (5′ |
| | Fanzor | | Organism | resource | Accession | end: | expression in | Fanzor coding sequence | to |
| ID | type | Category | name | No. | No. | strand | S. cerevisiae | (aa) | 3′) |
| 14 | Fanzor | Fungi | Spizellomyces | ATCC | NW_0159 | 950902- | CTTATCCG | MPPKKKQKLEKLDKPTCLHTC | CATA |
| | 1 | | punctatus | 48900 | 71549 | 590988: | AGCTGGTT | NKTSFAKAFLPNETYRQRLLD | |
| | | | | | | minus | GTCGCCG | YIAIIHQLADHASHALKFYILSA | |
| | | | | | | | GTTCAATT | PTFPTVNEDTIEAILYLLNKGEA | |
| | | | | | | | CCTGGTGC | WHPRKEAKKAWRDCLLPYVQ | |
| | | | | | | | GGGTGCT | RYCQIVGFVHPNLRGEQQSVN | |
| | | | | | | | AGTGCCA | YLTASMMTNLKVNVQEHFMQ | |
| | | | | | | | ATACCCAT | MLLRYINLRLDVKGQKQRLPL | |
| | | | | | | | CGGCTCC | KSDARQAFFTQLHYLKSVFLFE | |
| | | | | | | | GCACTAG | TMPESLDDLSILENEILEEIWTL | |
| | | | | | | | ATATAAA | NLPFPDQDKPLAYLIAIDAMSF | |
| | | | | | | | CGTTT | FPAYCRLSKLFEQQGFQQFSAI | |
| | | | | | | | (SEQ ID | PLRRSLIQSHIRIDTVILYAHIL | |
| | | | | | | | NO: 4163) | CITRQEAEAVEKVDLWLRVCNL | |
| | | | | | | | | RTKAFRSRCGMHFEGSITTDGT | |
| | | | | | | | | SVSVYLKHPEADKYGKRGARK | |
| | | | | | | | | SAKALAAEVKALYVENNLSAC | |
| | | | | | | | | QENIVVIDPNKRDILYCQDNKG | |
| | | | | | | | | TIFRYTANQRCMETGSRRFAKE | |
| | | | | | | | | RQRMKAGGIDLIESRIPSHKTM | |
| | | | | | | | | NLIDFMRYLLVRRADWDRRKE | |
| | | | | | | | | FYSHPAHTRWKWHAFINRQKS | |
| | | | | | | | | ESDLISNMRNKYGENFTIVMG | |
| | | | | | | | | DWSDAGRTARFQTSSKTKGW | |
| | | | | | | | | RTLFKRNRINCFLLDEYKTSSV | |
| | | | | | | | | CPRCLASSDDFLEKDFKTRPHS | |
| | | | | | | | | RPWRRREGKIEKVHGLLGCTN | |
| | | | | | | | | PNCQQAWTMRYWNRDTLATC | |
| | | | | | | | | NMLTIVQSMLDGHGRPEVFSR | |
| | | | | | | | | GVPAVA (SEQ ID NO: 4164) | |
| 16 | Fanzor | Fungi | Spizellomyces | ATCC | NW_0159 | 215781- | GTTTTCCG | MPPKKKQKLERLKKLDKPTLH | CATA |
| | 1 | | punctatus | 48900 | 71553 | 251869: | AGCCGGT | TCNKTSFAKAFLPNETYRQRLL | |
| | | | | | | plus | TGTCGCGC | DYIAIIHQLADHASHALKFYILS | |
| | | | | | | | GGTTCAAT | TSTSSFPVVHEDTIEAILYLLNK | |
| | | | | | | | CCCTGGTG | GEAWHPRKEAKKAWRDCLLP | |
| | | | | | | | CGGGTGC | YVQRYCQIVGFIHPNLRGEQQS | |
| | | | | | | | TAGTGCC | INYLTVSMMTNLKVNVQEHFM | |
| | | | | | | | AATACCC | QMLLRYINLRFDVKGQKQRLP | |
| | | | | | | | ACCGGCT | PKSDARKAFFTRLRYLKSVFLF | |
| | | | | | | | CCGCACT | DVVPELEFLDDLTPLESEVLEEI | |
| | | | | | | | ATCTATAG | WSLDLPFLPNDPLAYAIVADP | |
| | | | | | | | GTTATGA | MSFFPAYCKLSGLYEQYGFQR | |
| | | | | | | | (SEQ ID | FSAIPLRRSLIQSHVRIDTIILY | |
| | | | | | | | NO: 4165) | QHILCITRRDAETVEKDDLWMR | |
| | | | | | | | | VCNLCTKAFRSRCGMHFEGSIT | |
| | | | | | | | | TDGASVSVYLKHPEADKYGKR | |
| | | | | | | | | GARKSANTVAAEVKALYVEN | |
| | | | | | | | | NLPACRAAENVVVIDPNKRDIL | |
| | | | | | | | | YCQDSNGTTFRYTANQRAVET | |
| | | | | | | | | GSRRFAKRREAMKEEAGVDLI | |
| | | | | | | | | ESRIPSHKTMNLMDFTRYLLVR | |
| | | | | | | | | RADWDRRKEFYSHPAHTRWK | |
| | | | | | | | | WHSFINRQKSESDLISNMRNKY | |
| | | | | | | | | GENFTVVMGDWSDAGRTARF | |
| | | | | | | | | QTSSKTKGWRTLFKRNRIDCFL | |
| | | | | | | | | LDEYKTSSVCPRCSSSEFVEKK | |
| | | | | | | | | FKTRPHSRPWRRREGKIEKVH | |
| | | | | | | | | GLLGCTNPNCLQQAWTSGMR | |
| | | | | | | | | YWNRDMLSTCNMLLIVRSML | |
| | | | | | | | | DGHGRPEVFSRSVPAVA (SEQ | |
| | | | | | | | | ID NO: 4166) | |
| 19 | Fanzor | Fungi | Spizellomyces | ATCC | NW_0159 | 988234- | CTTTTCCG | MPPKKKQKLEKLDKPTLHTCN | N.A. |
| | 1 | | punctatus | 48900 | 71537 | 988321: | AACTGGTT | KTSFAKAFLPNETYRQRLLDYI | |
| | | | | | | minus | GTCGCCG | AIIHQLADHASHALKFYILYAP | |
| | | | | | | | GTTCAATC | TFPTVNEDTIEAILYLLNKGEA | |
| | | | | | | | CCTGGTGC | WHPRKEAKKALRGCLLPYIRR | |
| | | | | | | | GGGTGCT | YCQIVGFIHPNLRGEQQSINYLT | |
| | | | | | | | AGTGCCA | ASMMTNLKVNIQEHFMQMLL | |
| | | | | | | | ATACCCAT | RYINLRLNVKGRGRLPLKSDA | |
| | | | | | | | CGGCTCC | RKAFFARLRYLKSIFLFDVMPE | |
| | | | | | | | GCACTAT | SLDDLTAEESELLEEMWSFIPLS | |
| | | | | | | | ATTAAGCT | DQPLAYSVAVDPLAFFPAYCK | |
| | | | | | | | TGTTC | LSVLYERHGFRRFSAIPLRRSL | |
| | | | | | | | (SEQ ID | MQSHIRIDTVILYQHILCITRRE | |
| | | | | | | | NO: 4167) | AETVEKVDLWLRVCNLRNKAF | |
| | | | | | | | | RSRRGMQFEGSISTDGTSVSVY | |
| | | | | | | | | LKHPEADKYGKGARKSAKSLE | |
| | | | | | | | | DEVKVQYMEKNLPACRAAENI | |
| | | | | | | | | VVIDPNKRDILYCQDSNGTTFR | |
| | | | | | | | | YTANQRAMETGSRRQRKERQ | |
| | | | | | | | | QMKKEAGIDLIESRIPSHKTMN | |
| | | | | | | | | LMDFTRYLLVRRADSDRRKEF | |
| | | | | | | | | YSHPAHTRWKWHAFINRQKSE | |
| | | | | | | | | SDLISNMHNKFGNFTIVMGDW | |
| | | | | | | | | SDAGRTARFQTSSKTKGWRTL | |
| | | | | | | | | FKRNRINCFLLDEYKTSSVCPH | |
| | | | | | | | | CLASSADFLEKGFKTRPHSRPW | |
| | | | | | | | | RRREGKIEKVHGLLGCTNPNC | |
| | | | | | | | | QQAWTMRYWNRDTLSTCNML | |
| | | | | | | | | MIVQSMLDGHGRPKVFSRGVP | |
| | | | | | | | | AVA (SEQ ID NO: 4168) | |
| 20 | Fanzor | Fungi | Spizellomyces | ATCC | NW_ | 326568-N: | CTTTTCCG | MPPKKKQKLENPTCLHTCNKT | CATA |
| | 1 | | punctatus | 48900 | 015971551 | plus | AACCGGT | SFAKAFLPNDIYRQRLLDYIAII | |
| | | | | | | (assembly | TATCGCCG | HQLADHASHALKFYILSAPSFP | |
| | | | | | | gap/ | GTTCAATC | TLDQDTIEAILYLLNKGEAWQP | |
| | | | | | | ambiguity | CCTGGTGC | KADAKKALRGCLVPYIRRYCH | |
| | | | | | | in the | GGGTGCT | IVSFVHPNLQKEQQSINYLTAS | |
| | | | | | | original | AGTGCCA | MMTNLKVNVQEHFMQMLLRY | |
| | | | | | | contig) | ATACCCAT | INLRLDVKGQKQRLPLKSDAR | |
| | | | | | | | CGGCTCCC | KAFFTRLRYLKSVFLFDIVPESL | |
| | | | | | | | GCACTAG | DDLTAEESELLEEMWSFIPLSD | |
| | | | | | | | CCAAGGT | QPLAYSVAVDPLAFFPAYCKLS | |
| | | | | | | | GGCACG | VLYERHGFRRFSAIPLRRSLIQS | |
| | | | | | | | (SEQ ID | HIRIDTVILYQHILCITRREAETV | |
| | | | | | | | NO: 4169) | EKVDLWLRICNLRNKAFRSRR | |
| | | | | | | | | GMCFEGSITTDGTSVSVYLKHP | |
| | | | | | | | | EADKYGKRSGGGKKSANTME | |
| | | | | | | | | AEVKAQYVEKNLPACRVAEN | |
| | | | | | | | | VVVIDPNKRDILYCQDSIGTTF | |
| | | | | | | | | RYTANQRAMETGSRRQQKER | |
| | | | | | | | | QQMKKGEIDLIESRIPSHKTMN | |
| | | | | | | | | LMDFTRYLLVRRADSDRRKEF | |
| | | | | | | | | YSHPAHTRWKWHSFINRQRSE | |
| | | | | | | | | SDLISAMRNKYGENFTVVMGD | |
| | | | | | | | | WSDAGRTARFQTSSKTKGWRT | |
| | | | | | | | | LFKRNRINCFLLDEYKTSSVCP | |
| | | | | | | | | HCSSDDFLEKGFKTRPHSRPWR | |
| | | | | | | | | RREGNVEKVHGLLGCTNPNCL | |
| | | | | | | | | QQDWTSGMRYWNRDTLSTCN | |
| | | | | | | | | MLMIVQSIMDGHGRPEVFSRS | |
| | | | | | | | | VPAVA (SEQ ID NO: 4170) | |
| 23 | Fanzor | Fungi | Spizellomyces | ATCC | NW_ | 943865- | GTTTTCCG | MPPKKQRLEKLDKPTLVTLHT | N.A. |
| | 1 | | punctatus | 48900 | 015971537 | 943953: | AACCGGT | CNKTSFAKAFLPNEIYHQRLLD | |
| | | | | | | plus | TGTCGCGC | YIAIIHELADHASHALKFYILSA | |
| | | | | | | | GGTTCAAT | PSFPMVDQDTIEAILYLLNKGE | |
| | | | | | | | CCCTGGTG | AWHPRKEAKKAWRDCLLPYV | |
| | | | | | | | CGGGTGC | QRYCQIVGFVHPNLRGEQQSV | |
| | | | | | | | TAGTGCC | NYLTASMMTNLKVNIQEHFMT | |
| | | | | | | | AATACCC | MLLRYINLRLDVRGRKGPPKSE | |
| | | | | | | | ACCGGCT | ARKAFFARLRYLKSIFLFDIVPE | |
| | | | | | | | CCGCACT | LLDDLTAEESELLEEIWSLDRPF | |
| | | | | | | | ATCAATAT | LVDNPLAYAVVVNPMSFFPAY | |
| | | | | | | | AAAGGTA | CRLSSLYEKHGFRQFSAIPLRRS | |
| | | | | | | | (SEQ ID | LIQSHVRIDTIILYQHILCIARRE | |
| | | | | | | | NO: 4171) | AETVEKVDLWLRVCNLRNKAF | |
| | | | | | | | | RSRRGMCFEGSITTDGTSVSVY | |
| | | | | | | | | LKHPEADKYGKRGGGKKSAK | |
| | | | | | | | | TLEAEVKAVYVENNLPACRAA | |
| | | | | | | | | ENFVVIDPNKRDLLYCQDNKG | |
| | | | | | | | | TIFRYTANQRCKETGSRRFAKE | |
| | | | | | | | | RQRMKAGGIDLIESRIPSHKTM | |
| | | | | | | | | NLMDFTRYLLVRRADSDRRKE | |
| | | | | | | | | FYSHPAHTRWKWHAFINRQKS | |
| | | | | | | | | ESDLISNMHNKFGNFTIVMGD | |
| | | | | | | | | WSDAGRTARFQTSSKTKGWRT | |
| | | | | | | | | LFKRNRINCFLLDEYKTSSVCP | |
| | | | | | | | | CCSSDVEKGFQTRPHSRPYRRR | |
| | | | | | | | | EGKIEKVHGLLGCTNPNCLQQ | |
| | | | | | | | | AWTSGMRYWNRDTLSTCNML | |
| | | | | | | | | MIVQSMLDGHGRPEVFSRSRS | |
| | | | | | | | | VA (SEQ ID NO: 4172) | |
| 28 | Fanzor | Fungi | Torulaspora | ATCC | NC_ | 25445- | GTGGTGG | MTISTQNQAKKRKTSKSKAAK | X |
| | | | delbrueckii | 10662 | 016503 | 25585: | ATCTTCCA | PYWNENAAHFSQQWGLNTML | |
| | | | | | | plus | TTTCTTCT | PTAAKKLGQKINSDSWFSVIKH | |
| | | | | | | | AGTTTAA | PQAPIINDSLNLPLSSGVEEELIR | |
| | | | | | | | GTGGAGG | ARKIRIYPTNSQKETLKKWFGC | |
| | | | | | | | AAATGGT | HRYIYNKALKMHKDGVLMNI | |
| | | | | | | | CGACTCG | KILREKLLNKKTSALTPEEQWL | |
| | | | | | | | CCATGAT | SEYNYDLKDEALRDLVKNYSS | |
| | | | | | | | GGGTCCC | NMAKFKKTRVPFKLRFKTKKA | |
| | | | | | | | GGACCCTT | PVQTLSVLKKYWNKGKKTFYS | |
| | | | | | | | CGTACGT | DIYSSFSLRGAEPLPEELPRDSR | |
| | | | | | | | AAGTACG | LQRTRNNKYYLIVPMAGGEIA | |
| | | | | | | | TTGTAAGT | RKPPTEKFIFIDPGVRTFLTGYD | |
| | | | | | | | CCCTCGG | SSQTVVEIGKDAIVRIEKLKRR | |
| | | | | | | | AGATTTA | RRQLQSKLAKLRKHKKRQNHR | |
| | | | | | | | ACCGGGC | KALHRLDEKISHIVQDLHKKSA | |
| | | | | | | | GCGACAT | LFLCKSYDSIFLPKLNFHHCTK | |
| | | | | | | | TAAGAAC | LNRKSRSSMATLAHCSFHDRL | |
| | | | | | | | TCTTGGCA | TMKAEQFHDASVHEVEEDYTS | |
| | | | | | | | ATC (SEQ | KTCSTCGKIKNDLRSNKIYSCL | |
| | | | | | | | ID NO: | GCFSVFDRDFNAAKNIMLKYIC | |
| | | | | | | | 4173) | EHLMASGGSSISSSLSGGNGRL | |
| | | | | | | | | AMMGPGPFVRKYVVSPSEI | |
| | | | | | | | | (SEQ ID NO: 4174) | |
| 35 | Fanzor | Percolozoa | Naegleria | ATCC | PYSW02 | 574800- | GAGCACC | MEPTHPPTNPSLAHGIIPFWDE | CCG |
| | 2 | | lovaniensis | 30569 | 000004 | 574963: | TTGTGTGT | YSQQVSDKLWACSRDSFHEFN | |
| | | | | | | minus | TGGGTCTT | QYNNKGCTDGWFNFSQFTVIE | |
| | | | | | | | CCCCACCT | SQPVFDVPLNVHHSITENVAFD | |
| | | | | | | | TGTGTGCG | NSKKPPQLKKAKKGQKTPQKF | |
| | | | | | | | TTGGGTCC | QADKSMKIRLYPNEQERTTLN | |
| | | | | | | | TTTCCCCT | QWMGTAR WIYNKCLEFTNKS | |
| | | | | | | | GGCTTTCA | KGVKKNKKNFRTFVVNNDNY | |
| | | | | | | | CTCTTTGA | | |
| | | | | | | | GTGTTTGC | QTENQWVVNTPYDVRDAAAIE | |
| | | | | | | | TTGCAAG | LLTAFNTNFEKKKAGTIDKFMI | |
| | | | | | | | ATCAGCA | RFRRKKDRKDHFVLRCKHWK | |
| | | | | | | | CTTTGTTC | KKSGMYSFIRNIKSAEPLPEELQ | |
| | | | | | | | GATTTGTT | YDSIIIKNKLNHYYLCIPQVLDI | |
| | | | | | | | TGTTTTGT | RGENQAPQHSGQVVALDPGVR | |
| | | | | | | | TCAAATTG | TFQTTFDLNGYSTKWGSGGAE | |
| | | | | | | | TTGATTTA | RIGRLCCAYDKLQSKWSQPEV | |
| | | | | | | | AATAAAG | RHCKRYKYKRAGRRIQQKIRNI | |
| | | | | | | | GCGACAT | VDDLHKKLCLWLCRNYQVILL | |
| | | | | | | | TCTTCATC | PSFETQKMVKKLHRRINSKTAR | |
| | | | | | | | TCTCAAAC | KMLTWSHYRFKQRLLHKARE | |
| | | | | | | | C (SEQ ID | HPWTHIYIVNEAYTSKTCSCCG | |
| | | | | | | | NO: 4175) | HVYTVGSSEVFRCPSCGSIFDR | |
| | | | | | | | | DINGARNILLRFLTTHRISF | |
| | | | | | | | | (SEQ ID NO: 4176) | |
| 36 | Fanzor | Percolozoa | Naegleria | ATCC | PYSW02 | 214856- | GAGCACC | MKRSREDEPTHPPTNPSLAHGI | X |
| | 2 | | lovaniensis | 30569 | 000038 | 215019: | TTGTGTGT | IPFWNEYSQQVSDKLWACSRDS | |
| | | | | | | plus | TGGGTCTT | FHEFNQYNNKGCTDGWFNFSQF | |
| | | | | | | | CCCCACCT | TVIESKPVFDVPLNVHHSITEN | |
| | | | | | | | TGTGTGCG | VAFDNSKKPPQLKKAKKNQKT | |
| | | | | | | | TTGGGTCC | PQKLQADKSLKIRLYPNEQERT | |
| | | | | | | | TTTCCCCT | TLNQWMGTARWIYNKCLEFT | |
| | | | | | | | GGCTTTCA | HNFKDVKKNKKNFRTFVVNN | |
| | | | | | | | CTCTTTGA | DNYQTENQWVVNTPYDVRDA | |
| | | | | | | | GTGTTTGC | AAIELLTAFNTNFEKKKAGMID | |
| | | | | | | | TTGCAAG | KFMIRFRRKKDRKDHFVLHCK | |
| | | | | | | | ATCAGCA | HWKKKSGLYSFIRNIKSAEPLP | |
| | | | | | | | CTTTGTTC | EELQYDSIIIKNKLNHYYLCIPQ | |
| | | | | | | | GATTTGTT | VLDIRGENQAPQHSGQVVALD | |
| | | | | | | | TGTTTTGT | PGVRTFQTTFDLNGYSTKWGS | |
| | | | | | | | TCAAATTG | GGAERIGRLCCAYDKLQSKWS | |
| | | | | | | | TTGATTTA | QPEVRHCKRYKYKRAGRRIQQ | |
| | | | | | | | AATAAAG | KIRNIVDDLHKKLCLWLCRNY | |
| | | | | | | | GCGTTGTT | QVILLPSFETQKMVKKLHRRIN | |
| | | | | | | | GCTTGTTT | SKTARKMLTWSHYRFKQRLLH | |
| | | | | | | | CAGAATTT | KAREHPWTHIYIVNEAYTSKTC | |
| | | | | | | | (SEQ ID | SCCGHVYTVGSSEVFRCPSCGSI | |
| | | | | | | | NO: 4177) | FDRDINGARNILLRFLTTHGISF | |
| | | | | | | | | (SEQ ID NO: 4178) | |
| 37 | Fanzor | Percolozoa | Naegleria | ATCC | PYSW02 | 307058- | GAGCACC | MKRSREDEPTHPPTNPSLAHGII | X |
| | 2 | | lovaniensis | 30569 | 000025 | 307221: | TTGTGTGT | PFWDEYSQQVSDKLWACSRDS | |
| | | | | | | plus | TGGGTCTT | FHEFNQYNNKGCTDGWFNFSQ | |
| | | | | | | | CCCCACCT | FTVIESKPVFDVPLSVHHSITEN | |
| | | | | | | | TGTGTGCG | VAFDNSKKPPQLKKAKKNQKV | |
| | | | | | | | TTGGGTCC | AQKFQADKSLKIRLYPKEQERT | |
| | | | | | | | TTTCCCCT | TLNQWMGTARWIYNKCLEFT | |
| | | | | | | | GGCTTTCA | HNFKGVKKNKKNFRTVVVNN | |
| | | | | | | | CTCTTTGA | DNYQTENQWVVNTPYDVRDA | |
| | | | | | | | GTGTTTGC | AAIELLTAFKTNFEKKKAGTID | |
| | | | | | | | TTGCAAG | KFMIRLRRKKDRKDHFVLHCK | |
| | | | | | | | ATCAGCA | HWKKKNGLYSFIRNIKSAEPLL | |
| | | | | | | | CTTTGTTC | EELQYDSIIIKNKLNRYYLCIPQ | |
| | | | | | | | GATTTGTT | VLEIRGENQAPQHSGQVVALD | |
| | | | | | | | TGTTTTGT | PGVRTFQTTFDLNGYSTKWGS | |
| | | | | | | | TCAAAAT | GGAERIGRLCCAYDKLQSKWS | |
| | | | | | | | GTTGATTT | QPEVRHCKRYKYKRAGRRIQQ | |
| | | | | | | | AAATAAA | KIRNIVDDLHKKLCLWLCRNY | |
| | | | | | | | GGCGTATT | QVILLPSFETQKMVKKLHRRIN | |
| | | | | | | | GGAACAT | SKTARKMLTWSHYRFKQRLLH | |
| | | | | | | | TGAATAT | KAREHPWTHIYIVNEAYTSKTC | |
| | | | | | | | ATA (SEQ | SCCGHVYTVGLSEVFRCPSCGS | |
| | | | | | | | ID NO: | IFDRDINGARNILLRFLTTHRISF | |
| | | | | | | | 4179) | (SEQ ID NO: 4180) | |
| 38 | Fanzor | Percolozoa | Naegleria | ATCC | PYSW02 | 642462- | GAGCACC | MKRSREDEPTHPPTNPSLAHGII | X |
| | 2 | | lovaniensis | 30569 | 000003 | 642598: | TTGTGTGC | PFWDEYSQQVSDKLWACSRDS | |
| | | | | | | minus | GTTGGGTC | FHEFNQYNNKGCTDGWFNFSQ | |
| | | | | | | | CTTTCCCC | FTVIESKPVFDVPLNVHHSITEN | |
| | | | | | | | TGGCTTTC | VAFDNSKKPPQLKKAKKNQKV | |
| | | | | | | | ACTCTTTG | AQKFQADKSLKIRLYPNEQERT | |
| | | | | | | | AGTGTTTG | TLNQWMGTARWIYNKCLEFT | |
| | | | | | | | CTTGCAA | NKSKGVKKNKKNFRTFVVNN | |
| | | | | | | | GATCAGC | DNYQTENQWVVNTPYDVRDA | |
| | | | | | | | ACTTTGTT | AAIELLTAFNTNFEKKKAGTID | |
| | | | | | | | CGATTTGT | KFMIRFRRKKDRKDHFVLHCK | |
| | | | | | | | TTGTTTTG | HWKKKSGLYSFIRNIKSSEPLPE | |
| | | | | | | | TTCAAATT | ELQYDSIIIKNKLNHYYLCIPQV | |
| | | | | | | | GTTGATTT | LDIRGENQAPQHSGQVVALDP | |
| | | | | | | | AAATAAA | GVRTFQTTFDLNGYSTKWGSG | |
| | | | | | | | GGCGTTA | GAERIGRLCCAYDKLQSKWSQ | |
| | | | | | | | ACAATTA | PEVRHCKRYKYKRAGRRIQQK | |
| | | | | | | | AATATTT | IRNIVDDLHKKLCLWLCRNYQ | |
| | | | | | | | (SEQ ID | VILLPSFETQKMVKKLHRRINS | |
| | | | | | | | NO: 4181) | KTARKMLTWSHYRFKQRLLH | |
| | | | | | | | | KAREHPWTHIYIVNEAYTSKTC | |
| | | | | | | | | SCCGHIYTVGSSEVFRCPSCGSI | |
| | | | | | | | | FDRDINAARNILLRFLTTHRISF | |
| | | | | | | | | (SEQ ID NO: 4182) | |
| 55 | Fanzor | Virus | Dishu | — | MN940580 | 308189- | ATTCATAT | MKPPDPRPIEGKHILTVKKTAL | X |
| | 1 | | i Lake | | | 308300: | CTGTTAAA | RNIVGNDPMILSRIQDAVYRKH | |
| | | | large | | | minus | CGACAGA | VIVQHTTHFMKLYLLSLFEKGD | |
| | | | Algae | | | | TACGACC | VLPMIDVDFIAISMRVVSNMPP | |
| | | | virus | | | | CAAATTTT | EENRRGRPPNASTRALMNQLE | |
| | | | 1 | | | | TATAGCG | CFYKEHYEPLLGKNPEEMRTT | |
| | | | | | | | GGTATATT | LYRIGDMLQYEEKDILKNIKNN | |
| | | | | | | | TTTATGGG | IFLHFTDYVKEFINKEFNLKETL | |
| | | | | | | | ATTAGAC | SKVDAMALTEEEKRLTKRSISI | |
| | | | | | | | CCCCATTT | ELRHVKNDLLSPLGTVLTSPVK | |
| | | | | | | | GAAATGT | YHEWICQHKSKLIPKEKYLKN | |
| | | | | | | | CACTCGCT | NIEYDVKAKPMDYLSSMFYVC | |
| | | | | | | | GTAAATA | SQLEKYGRHVHAFPLCTSTIPS | |
| | | | | | | | TATTCTTT | YATIDTTTLIMLMIDDNALMFR | |
| | | | | | | | TTATTT | KKVKESKEDVWGSFFQLGNKA | |
| | | | | | | | (SEQ ID | FRRKDYRFHYMIKTDGVGASIL | |
| | | | | | | | NO: 4183) | FHRKDQNPDKLDDDTICTVKE | |
| | | | | | | | | KYIDEIEVPQDKNIIGIDVGLDD | |
| | | | | | | | | ILYCTDGTSFYRYSANQRRVQT | |
| | | | | | | | | KTKKYMNIMDSLKKEHLVEG | |
| | | | | | | | | MSVKEWETILSLYNKYTCSFSK | |
| | | | | | | | | FKEYVEQKTTITYTLTPFYTNT | |
| | | | | | | | | LLRKLKWNCYINRQRSEAKML | |
| | | | | | | | | NKLKEQFGEPDKAIVAIGDWD | |
| | | | | | | | | QGSYHMKGKEPTKGKGMRKV | |
| | | | | | | | | LRQGGYEVYLVDEFKTSCTCH | |
| | | | | | | | | NCHGECKKWLYRPSHKPRNLG | |
| | | | | | | | | ENTLVHGLLRCTSVNGCGSLW | |
| | | | | | | | | NRDVNGCLNICMLAHKAVQK | |
| | | | | | | | | EERPLAFQRGIHIC | |
| | | | | | | | | (SEQ ID NO: 4184) | |
| 58 | Fanzor | Fungi | Parasitella | — | LN731931 | 21093- | TTATCCAC | MEAESDDDFQPPIIRRKRSSRE | N.A. |
| | 1 | | parasitica | | | 21163: | CAAAGTT | NTQQSGSQKRLKGKDKEIVAD | |
| | | | | | | minus | ATCGCTTT | DNPILNTTTLDDYDYDDFQPPV | |
| | | | | | | | GGTCAATT | VKRPDIGESSSSVNPTFFAAES | |
| | | | | | | | AATGCAG | STRASHTSNNTPNTPSKRVITI | |
| | | | | | | | GTAAGCA | KTTIKGIWKYDYRQPLYDLVHT | |
| | | | | | | | ACATCCA | TNLLVTHTYAFTKYIFLKELAT | |
| | | | | | | | GCAAACA | DENFAFNELITKDFFVEVFLSL | |
| | | | | | | | GAGCTCG | VSAKAGNSERLKDTTKRYRSLI | |
| | | | | | | | TTCAA | GKHKDAYFEDAKYTPISLAYAQ | |
| | | | | | | | (SEQ ID | QIALYECAKVQTAYFNNMKAH | |
| | | | | | | | NO: 4185) | FGNRLRALINKLFKKKEKVESL | |
| | | | | | | | | TKEMEANNFSIKEIKQAIRKNV | |
| | | | | | | | | YQPCNQVKLAITKKNMPESGL | |
| | | | | | | | | LDDKSVTQLNEFFSMYAVDYT | |
| | | | | | | | | FQKESIFYDVVANPEKHFKAFY | |
| | | | | | | | | KLAQLSEAYEVKPFACFPLRRT | |
| | | | | | | | | FIPCYMTVDSKILNYHILKNKK | |
| | | | | | | | | VLKMDEKFNAWGRVVNLERK | |
| | | | | | | | | AFKSQGCKKTLHFQGTLETDG | |
| | | | | | | | | VGVSILKQNTDTNRKSVMPKK | |
| | | | | | | | | PLEDIDDETKYIEKLEDAELKQ | |
| | | | | | | | | TLGKCVLMDPGRRDLLYCMK | |
| | | | | | | | | ETSRADKKEIMIFTKNDRSKCS | |
| | | | | | | | | RHFRRLRKLLQPSQIREAETYL | |
| | | | | | | | | SGFATKSVNMEKFVEYIQARA | |
| | | | | | | | | SVKDILYEYYGNETAKSITEFY | |
| | | | | | | | | PESQFDFKVDQKCNLYYENLF | |
| | | | | | | | | VAKIRGFYPQPEHEPNDITLKS | |
| | | | | | | | | HMYHTYLQIMLNQKHISERLN | |
| | | | | | | | | SEKRRKIEDLAKAILEQPHESG | |
| | | | | | | | | HKTTISSLLGKLRLLPFRKMKF | |
| | | | | | | | | STKLFSDNNDRKLVKNIKKKF | |
| | | | | | | | | GADAVLVLGNWSAPNTKYQD | |
| | | | | | | | | PTRNKGLRRMLKKNGFPLYLI | |
| | | | | | | | | DEFRTSSFCPKCESDLEKFKVIP | |
| | | | | | | | | NPRPHNQEKQPKVLCHGLLRC | |
| | | | | | | | | KNMSCLEQQTSEGNQRLWNR | |
| | | | | | | | | DQAAVLNFRKILNCLRETKQRP | |
| | | | | | | | | PLFSREPSKN (SEQ ID NO: | |
| | | | | | | | | 4186) | |
| 59 | Fanzor | Fungi | Parasitella | — | LN731111 | 75091- | ACATTCCG | MTEEESHPESSTERRIMTIKSTI | N.A |
| | 1 | | parasitica | | | 75179: | CTTGAGTT | QNIWKSNYIEPLHKLVDITNHL | |
| | | | | | | minus | ATCGCTTA | VTHTYFFIKYIFLQEMKNTNEA | |
| | | | | | | | AGCAATTT | FDMNAYVNKKFFVEVFLSLIER | |
| | | | | | | | AATGCAG | QVRDGAKTGKSRLGNDVVLFR | |
| | | | | | | | GTAAGCA | ALINAHKDSYFRLAKYTPPKLT | |
| | | | | | | | ACATCCA | NAQQIALYECEKIHTAYINNIR | |
| | | | | | | | ACAAACA | KHFGNRLRMFLNFCCKIKQRS | |
| | | | | | | | GAGCCTG | ADIRTRMTKARYSEANIRDVIY | |
| | | | | | | | TCCAAAA | RTVTQPSNAIKDQVSQKLVPA | |
| | | | | | | | ACTAATTT | DSSLSSEHLGQVESFLAMYPAE | |
| | | | | | | | CTTITTA | YNFQKSSIYYDLKANPQSHFKA | |
| | | | | | | | (SEQ ID | FYKLTELCQLNNLKNFHCFPLR | |
| | | | | | | | NO: 4187) | TSFVPAYMTLDAKIANYHILKN | |
| | | | | | | | | KSMKEDKMTIWGLVCDLQNK | |
| | | | | | | | | AMKDQGTLKFHGTIETDGIAAS | |
| | | | | | | | | VLKQNFPTSRKRPGGGEGGSG | |
| | | | | | | | | GEDEDQPQYVESLTMAQHQEI | |
| | | | | | | | | QGRCVLIDPNRRDLLFCMKESS | |
| | | | | | | | | TISRKQLYRHTQVCRNKQLRH | |
| | | | | | | | | FKKLQKKLKPESVRLAELALSE | |
| | | | | | | | | TKSSSVDSVAFVNYVTIRAEHE | |
| | | | | | | | | DILYEYYGNETADFTQDFDWD | |
| | | | | | | | | IKHEFNIRNQKNLYWGHFFIAQ | |
| | | | | | | | | YKGLFPENCIDTLDDRTNLQLQ | |
| | | | | | | | | INYLEVMLSQSHVKKRISQDIL | |
| | | | | | | | | DRLSLFASETFIWSQRNHTQED | |
| | | | | | | | | LKEKLNETEELVNSELKLLNLL | |
| | | | | | | | | PFRKMRFSLKVYSKONDANLV | |
| | | | | | | | | RSLRSKFGADCVLILGNWSAPT | |
| | | | | | | | | TKFHEPIRNKGLIKMLQKNGFT | |
| | | | | | | | | LFLIDEFKTSSVCPDCEGGLQK | |
| | | | | | | | | FKTIPNPRPYQREKMPKVTCNG | |
| | | | | | | | | LLKCKNHSTPKLWNRDVAAVS | |
| | | | | | | | | NFLKILNELRKTGNRPSCFSRS | |
| | | | | | | | | NTETKKRKNNRSPTSASSSKKV | |
| | | | | | | | | KHSA (SEQ ID NO: 4188) | |
| 62 | Fanzor | Fungi | Batrachochytrium | — | JAKFGG | 15876- | ATTCGGTG | MDPPLEGGEDQGISHR VVKHN | N.A. |
| | 1 | | salamandrivorans | | 010000033 | 16104: | AGACAAA | LARVLRDPDKLEVLCGMVKG | |
| | | | strain | | | plus | GGAAGCA | GHHIVVHAYQFIKLFILHEYET | |
| | | | AMF | | | | GCAGAGG | HIKSAKGGTSTEGGTSTEGGTS | |
| | | | P14/2 | | | | CTGAGGC | AKGGTSTPELTPVTVSFVQCVV | |
| | | | | | | | TATCCGAC | TVLCEETGARETKVRTEAKTEL | |
| | | | | | | | AGGCGGA | KKKLKDFYRLHYKETVSPHQQ | |
| | | | | | | | GTCGGAG | GLGFNNQAQIVAYLAVQVVTS | |
| | | | | | | | GCCGGTTC | LVNNIQRRYVQHLDIFLRTLYG | |
| | | | | | | | GCTATCG | GEVLALTEEVRKLDNQLRASK | |
| | | | | | | | GATCTCAC | TKEARSKAARKKKAKEEAALR | |
| | | | | | | | AACCACG | AKLVDERKALVTAKTTRARKI | |
| | | | | | | | GCACGTC | AEARDFVLFDAKKPAAAKAAK | |
| | | | | | | | ATGAGTC | TEAAKTEAAAAKAAKTEAAAT | |
| | | | | | | | ATAACTTA | RKRAKTEAAAAKAAKTEPAVT | |
| | | | | | | | TGGCGTGT | RKRAKAGGHAVEEPAAKAPVP | |
| | | | | | | | CAACCCA | PPARTMPPELIDHWRWIRPDRP | |
| | | | | | | | CGTCGTTA | IQQDSVYYDIQAAPLDYLPCMI | |
| | | | | | | | TGACGTC | YMSRFAQAAGQRVLNVFPQRS | |
| | | | | | | | GTGGGGC | SLVPAYITVDTTLAIKFLLPDDF | |
| | | | | | | | GGTTTATT | MLKGQTKKPTQRQLLDNITRH | |
| | | | | | | | ATTTTTGT | QDEIWASVVKLEKRCFAPRNS | |
| | | | | | | | GTCGGCCT | KYEFGWQFTTDGIGCSLLWVS | |
| | | | | | | | CAAAATTT | RGTHTASRENKEAGNRHKRGR | |
| | | | | | | | GAGGGCA | PGPSTKEEPKTRAEVREAMYS | |
| | | | | | | | CAGTTGTG | WAAAAGRLVVGVDPGRDDLL | |
| | | | | | | | TGGTGCC | FCSREKSDEEKRVEGSREASW | |
| | | | | | | | ACGTGAA | HFSAKQRRHETGATRYRKKRA | |
| | | | | | | | CAGCTGTT | IMSKWPVGEKSVQAWESELSE | |
| | | | | | | | TGTCGTCT | FSRKAMTTASFKAYCKAKNAL | |
| | | | | | | | GACGA | NARLYPHYERVAYRKMRWHQ | |
| | | | | | | | (SEQ ID | YINSQRSDAKMVNDFGAKLGT | |
| | | | | | | | NO: 4189) | KEQVVLAYGDWGHGSSHMKY | |
| | | | | | | | | QAPTRRVGMQRLFEKAGYLVV | |
| | | | | | | | | LVDEYLTSRTCYKCDHRCANF | |
| | | | | | | | | KMVPQPRPWMRETRPKVLRH | |
| | | | | | | | | GLLRCKNCSTHWNRDRNGSLN | |
| | | | | | | | | IMRCGIAARDNLDRPPCMDRIK | |
| | | | | | | | | FGETKEAAEAEAIRQAESEAGS | |
| | | | | | | | | LSDLTTTARHES | |
| | | | | | | | | (SEQ ID NO: 4190) | |
| 83 | Fanzor | Algae | Guillardia | — | NW_ | 896451- | CACTATCC | MSNIRIVKRKAKGFFKCEDLVT | TTAAN |
| | 1 | | theta | | 005434667 | 896603: | GGTAACG | IKDAVKAAHRIMSDASILVRSY | |
| | | | CCM | | | plus | AAACTAC | YLRWFQSSYPLDSDDKELELE | |
| | | | P2712 | | | | CGGAGAC | HFHISMACSIVQGITRPPVRGV | |
| | | | | | | | GGGTTAG | GPEQSVKIDVFNDMLDEYKRL | |
| | | | | | | | GAGGTGA | YERAPNDKENETDLSLSHVLA | |
| | | | | | | | CGACCTCT | YSIDNLLTAYKNNIEAHFSKYV | |
| | | | | | | | AAAACCT | KRFIRCDMLAKGFNKSEANRV | |
| | | | | | | | AGAACTT | AAIYTNAYIYDSSLDLEPDFME | |
| | | | | | | | AGAGTGC | RLGLEATSYSSLFPSKINKGGFP | |
| | | | | | | | AAAAACG | RVYDLKANPWVYLPKMVMIN | |
| | | | | | | | CCATTACG | QALETDFSSVEHKERRLLNPLP | |
| | | | | | | | ATTGTGAT | FYSSFVPMHIRIDTSGLSQLLMT | |
| | | | | | | | GCCTATTC | KDRLDDFKRSYLAEFGVSLNIK | |
| | | | | | | | AAGGGTG | NKGDMLASFEKIFGRKATSNR | |
| | | | | | | | TCCCAAGT | EAGLYATEMWSFLTNLKTCRQ | |
| | | | | | | | GTAAAAA | WKELDGVVRKNDPKGTQWMF | |
| | | | | | | | GAAAGCA | DNAVVTDGVSISFQVIDNSMFG | |
| | | | | | | | CTCTAAG | RKAFSGRKKRVACQEANDEED | |
| | | | | | | | AGCATTA | SKQVTREELKTSKLLGCDPGK | |
| | | | | | | | AACTCTA | RDILAITDGIKTICYTKGQRDM | |
| | | | | | | | (SEQ ID | DTHKTIRLRTSLKRRRGCGLEE | |
| | | | | | | | NO: 4191) | YETQVMNRFQKRSCHPEMFRR | |
| | | | | | | | | YACSRKRMEHMLLECYSHPVF | |
| | | | | | | | | REFKFLVYNKTKSSEHRFMHR | |
| | | | | | | | | VLETFKRPQTNLSKARCASGV | |
| | | | | | | | | MRMNALKEVQRHGDIIIGWGN | |
| | | | | | | | | WGKNPNALRCSAGPTPGIGIRR | |
| | | | | | | | | RFESLFKTTTVPEHYTSQECPSC | |
| | | | | | | | | KGRCLRKATGNPIMRHHLLRC | |
| | | | | | | | | TNDSCCSRWWNRNVAGAFNIL | |
| | | | | | | | | TRLLDGQTLSGNETTGDGLGG | |
| | | | | | | | | DDL(SEQ ID NO: 4192) | |
| 85 | Fanzor | Mollusca | Batillaria | — | JACVVK | 2163504- | TTTTTCCT | MKRTYSATKSSLTLWTAASVK | X |
| | 2 | | attram | | 010000048 | 2163629: | TGGCCCA | TTSAPKVVTTFSGWMKKILPTR | |
| | | | entaria | | | minus | AGGATTG | AETSLTLINPADIADPSPPKKKA | |
| | | | isolate | | | | CCAAACA | KKTTPATPKPTLRIYKIGLRPSP | |
| | | | Wonlab- | | | | CCACTCA | AQRKTLNACIVAANFAYNQCV | |
| | | | 2016 | | | | AATCCTCG | HLVQHKVCKPHLYDLQKIVAK | |
| | | | 000051F | | | | TTCAGGG | MKTPEDINHRYAPDRDGWFW | |
| | | | | | | | GCCTCGA | KSSTIVRLLATKDFCAAYKAIV | |
| | | | | | | | GTGGCTG | SNKKKDVAVIKYKTYDDPEAI | |
| | | | | | | | GGCATAT | NPLSGLFGCQKQYATVTQAGL | |
| | | | | | | | ATGGGTT | RLLPRLFGKDPIPLVKKKLKVA | |
| | | | | | | | AGCACTG | TIDHDFKIEKTSKGKFVLCLTV | |
| | | | | | | | AGACTTC | ECSLLRRVKPPAPLFEDGYIHA | |
| | | | | | | | GATAAGA | CGIDPGVRSFVTVYDPTRQDCY | |
| | | | | | | | AGCAACG | QFGTSAQKAERLDPITNAIDNW | |
| | | | | | | | ATCTTGGA | NSFVDQHRDKAPPTAIESWSRK | |
| | | | | | | | CACCACG | TKKLWYKLKNQVRSLHDQVIA | |
| | | | | | | | AAAT (SEQ | HLLGAYNFISLGKLDVSCFRRG | |
| | | | | | | | ID NO: | TTAKSTNRWLRIYRHFEFRTKL | |
| | | | | | | | 4193) | LARVEGTDNCRVEITDERWTS | |
| | | | | | | | | KTCGMCRSIHRELGAKELFECP | |
| | | | | | | | | NCHYTCHRDVHVARNILLRSF | |
| | | | | | | | | GQFPV (SEQ ID NO: 4194) | |
| 88 | Fanzor | Mollusca | Mercenaria | — | NC_ | 36628732- | TCGGGTTC | MKRKREQMTLWKAAFVNGQE | TAG |
| | 2 | | mercenaria | | 059312 | 36628843: | GATTCTAT | TFKSWIDKARMLELNCDVSSA | |
| | | | isolate | | | minus | CCCCAGG | SSTHYSDLNLKTKCAKTDDKF | |
| | | | YKG- | | | | GCTCGAA | MCNYSVCIRPTSKQKRTLNQM | |
| | | | 2019 | | | | TGCATTTT | LKVSNYAYNWCNYLVKEKDF | |
| | | | | | | | TGTCACA | KPKQFDLQRIVAKTNSTDVPAE | |
| | | | | | | | GATTTTGC | YRLPGDDWFFDNKMSSIKLTA | |
| | | | | | | | CAATGCA | CKNFCTMYKSTQTNQKKTKV | |
| | | | | | | | AGATCTG | DLRNKDIVQLREGSFEVQSKY | |
| | | | | | | | GGGGCAA | VRLLTEKDIPGERIRQSRIALMP | |
| | | | | | | | GAATGTCT | DSFSKSKKDWKERFLRLSKNV | |
| | | | | | | | CCGGGTG | SKIPPLSHDMKVCKRPNGKFIL | |
| | | | | | | | AAAAGAG | QISCDPICTRQIQVQTSDSICSID | |
| | | | | | | | TCAGGCT | PGGRTFATCYDPSNIKTFQIGPE | |
| | | | | | | | GGAAAGA | ADKKEIIHEFHNKIDYVHRLLS | |
| | | | | | | | TT (SEQ ID | HAQEKKQTQAVQDRIGQLKKL | |
| | | | | | | | NO: 4195) | HLKLKTYVDDVHLKLCSYLVK | |
| | | | | | | | | NYKLVVLGKISVSSIVRKDRPN | |
| | | | | | | | | HLAKSANRDLLCWQHYRFRQ | |
| | | | | | | | | RLLHRVRGTDCEVIIQDERYTS | |
| | | | | | | | | KTCGNCGEKNNKLGGKETFTC | |
| | | | | | | | | ESCNYKTHRDVNGARNILCKY | |
| | | | | | | | | LGLFPFAA | |
| | | | | | | | | (SEQ ID NO: 4196) | |
| 89 | Fanzor | Mollusca | Mercenaria | | NW_ | 21973- | TTTAGGGC | MKRKREQMTLWKAAFVNGRE | TTAA |
| | 2 | | mercenaria | | 025542472 | 22084: | TCGATTCT | TFKSWIDKARMLELNCDISSAS | |
| | | | isolate | | | plus | TTGCCTTC | STHYSDLDLKSKCAKIEDKFM | |
| | | | YKG-2019 | | | | TCGATGC | CTFSVGIRPTSKQNRTLNQMLK | |
| | | | | | | | ATTTATTG | VSNYAYNWCNHLVKEKDFKP | |
| | | | | | | | CCACAGA | KQFDLQRVVTKTNSHDVPAEY | |
| | | | | | | | TTTTGCTA | RLPGDDWFFDNKMSSIKLTAC | |
| | | | | | | | ATGCAGTT | KNFCTMYKSARTNQKKTKVD | |
| | | | | | | | TCTGAGG | LRNKDTALLREGSFEVQRQYVR | |
| | | | | | | | CAAGAAT | LLTEKDIPDERIRQSRIALMAD | |
| | | | | | | | GTGTTCGG | NFSKSKKDWKERFLRLSKNVS | |
| | | | | | | | GTAAAAA | KIPPLNHDMKVCKRPNGKFILQ | |
| | | | | | | | GAGTTAA | IPCDPICTRQIQVHTSDSICSI | |
| | | | | | | | TGGGCAA | DPGGRTFATCYDPSNIKTFQIG | |
| | | | | | | | ACTATGA | PEADKKEIIHKFHNKIDNVHRL | |
| | | | | | | | (SEQ ID | LSYAQKKKQTQAVQDRIGQLKK | |
| | | | | | | | NO: 4197) | LHLKLKTYVDDVHLKLCSYLVK | |
| | | | | | | | | NYKLVVLGRISVSSIVRKDRPN | |
| | | | | | | | | HLAKKGNRDLLCWQHFRFRQ | |
| | | | | | | | | RLLHRVRGTDCEAIAQDERYTS | |
| | | | | | | | | KTCGNCGVQNNKLGGNETFHC | |
| | | | | | | | | KSCNYKTHRDVNGARNILCKY | |
| | | | | | | | | LGHFPFAT | |
| | | | | | | | | (SEQ ID NO: 4198) | |
| 96 | Fanzor | Mollusca | Dreissena | - | JAIWYP0 | 88666563- | ATTAGGTC | MKRKREDLTLWDAANVHKHK | X |
| | 2 | | polymorpha | | 10000009 | 88666640: | GATCCATC | SMWYWWEYIRRKDLINHEKT | |
| | | | isolate | | | plus | CTAAGTTC | DCDVIQLLQSASVKKQKTHSD | |
| | | | Duluth1 | | | | GAAAGTT | DFLTSFSVGIRPTKHQKQVLN | |
| | | | | | | | GATTGCTG | EMLRVSNYTYNWCLWLVNEKG | |
| | | | | | | | GGCAATTT | LRPHQFELQKIVCKTNARDVDP | |
| | | | | | | | TCTGCCGA | QYRMENDDWFFNNKMTRVKG | |
| | | | | | | | ATGATAT | TSCKNFCTSYKSAKALKSKLK | |
| | | | | | | | GGGTTAT | RPMPISNIIEGSFGVPNLYIRL | |
| | | | | | | | GACACTA | LSSKDVCTHETNMQNRYICMMP | |
| | | | | | | | CG (SEQ ID | DNFEKRSNPKERFLKLAKRITN | |
| | | | | | | | NO: 4199) | IPPINHDVKIVKRADGMFIMNIP | |
| | | | | | | | | CDPKYTRRNASNDTIEKRVCGI | |
| | | | | | | | | DPGGRTFATVYDPIDCCVFQV | |
| | | | | | | | | GIKEDKQYVISKLHNKIDHAH | |
| | | | | | | | | MHLTKAQNKKQQQAARERIVS | |
| | | | | | | | | LKKTHLKLKTFVEDIHLKLSSH | |
| | | | | | | | | LVKEYHYVALGKINVAPMVK | |
| | | | | | | | | KKHLSKRAKRDLLYWQHYRF | |
| | | | | | | | | RQRLTHRTTNTDCIFEVQNEAY | |
| | | | | | | | | TSKTCGVCGKINENLEKSETFY | |
| | | | | | | | | CDQCKYNTHRDVNGARNILLK | |
| | | | | | | | | SLNMFPFEKKQQ | |
| | | | | | | | | (SEQ ID NO: 4200) | |
| 97 | Fanzor | Mollusca | Dreissena | - | JAIWYP0 | 70826073- | AATTAGG | MKRKREDLTLWDAANVHKHK | X |
| | 1 | | polymorpha | | 708260 | 70826167: | TCGATCCA | SMWYWWEYIRRKDLINHEKT | |
| | | | isolate | | | plus | TCCTAAGT | DCDVIQLLQSASVKKQKTQSD | |
| | | | Duluth1 | | | | TCGAAAG | KFLTSFSVGIRPTKHQKQVLNE | |
| | | | | | | | TTGATTGC | MLRVSNYTYNWCLWLVNEKG | |
| | | | | | | | TGGGCAA | LKPHQFELQKIVCKTNARDVD | |
| | | | | | | | TTTTCTGC | PQYRMANDDWFFNNKMTRVK | |
| | | | | | | | CGAATGA | GTSCKNFCTSYKSAKALKSKLK | |
| | | | | | | | TATGGGTT | RPMPISNIIEGSFGVPNLYIRLL | |
| | | | | | | | ATGACAC | SSKDVCTHETNMQNRYICMMP | |
| | | | | | | | TACGTTAG | DNFEKRSNPKERFLKLAKRITN | |
| | | | | | | | TGATTGTG | IPPINHDVKIVKRADGMFIMNIP | |
| | | | | | | | TGCC (SEQ | CDPKYTRRNASNDTIEKRVCGI | |
| | | | | | | | ID NO: | DPGGRTFATVYDPIDCCVFQV | |
| | | | | | | | 4201) | GIKEDKQYVISKLHNKIDHAH | |
| | | | | | | | | MHLTKAQNKKQQQAARERIVS | |
| | | | | | | | | LKKTHLKLKTFVEDIHLKLSSH | |
| | | | | | | | | LVKEYHYVALGKINVAPMVK | |
| | | | | | | | | KKHLSKRAKRDLLYWQHYRF | |
| | | | | | | | | RQRLTHRTTNTECIFEVQNEAY | |
| | | | | | | | | TSMTCGVCGKLNKNLEKSETF | |
| | | | | | | | | YCDSCNYNTHRDVNGARNILL | |
| | | | | | | | | KSLNMFPFEKKQQ (SEQ ID | |
| | | | | | | | | NO: 4202) | |

TABLE 21

| SEQ | Locus - Spu DAOM BR117 | |
|---|---|---|
| ID | chromosome | Notes |
| 652 | NW_015971553.1 | Origin - fz = 1179 . . . 3092 |
| 653 | NW_015971553.1 | CDS = join(complement(697 . . . 730), complement(539 . . . 630), |
| | | complement(250 . . . 393), complement(35 . . . 188)), XP_016604939.1 - |
| | | uncharacterized protein |
| 654 | NW_015971553.1 | CDS = 1179 . . . 3092, XP_016604940.1 - uncharacterized protein |
| 655 | NW_015971553.1 | XP_016604941.1 - uncharacterized protein |
| 656 | NW_015971542.63 | Origin - fz = 1432 . . . 3270 |
| 657 | NW_015971542.63 | CDS = complement(23 . . . 1108), XP_016608970.1 - uncharacterized protein |
| 658 | NW_015971542.63 | 1390 . . . 3273, XP_016608971.1 - uncharacterized protein |
| 659 | NW_015971537.108 | Origin - fz = 1296 . . . 3128 |
| 660 | NW_015971537.108 | CDS = complement(<1 . . . 762), XP_016612697.1 - uncharacterized protein |
| 661 | NW_015971537.108 | CDS = 1254 . . . 3131, XP_016612696.1 - uncharacterized protein |
| 662 | NW_015971537.108 | CDS = join(complement(4559 . . . 4921), complement(4391 . . . 4496), |
| | | complement(3843 . . . 4327)), XP_016612695.1 - uncharacterized protein |
| 663 | NW_015971541.70 | Origin - fz = 1514 . . . 3070, fz = 3040 . . . 3357 |
| 664 | NW_015971541.70 | CDS = join(596 . . . 834,894 . . . 1182), XP_016609660.1 - uncharacterized protein |
| 665 | NW_015971541.70 | CDS = join(1481 . . . 3174,3230 . . . 3317), XP_016609663.1 - uncharacterized |
| | | protein |
| 666 | NW_015971541.70 | CDS = 1481 . . . 3238, XP_016609662.1 - hypothetical protein, variant 1 CDS |
| 667 | NW_015971541.70 | CDS = join(1481 . . . 3174,3226 . . . 3238), XP_016609661.1 - hypothetical protein, |
| | | variant 2 CDS |
| 668 | NW_015971541.70 | CDS = join(3595 . . . 3826,3886 . . . 4346,4415 . . . 4876), XP_016609664.1 - |
| | | uncharacterized protein |
| 669 | NW_015971541.70 | CDS = complement(5003 . . . >5638), XP_016609665.1 - glutamate 5-kinase |
| | | CDS |
| 670 | NW_015971539.87 | Origin - Fz = 2119 . . . 3978 |
| 671 | NW_015971539.87 | CDS =join(complement(1535 . . . 1788), complement(1140 . . . 1469), |
| | | complement(1011 . . . 1065)), XP_016611116.1 - large conductance |
| | | mechanosensitive channel protein |
| 672 | NW_015971539.87 | CDS = complement(3139 . . . 3480), XP_016611115.1 - uncharacterized protein |
| 673 | NW_015971539.87 | CDS = join(complement(4845 . . . 5062), complement(4691 . . . 4782), |
| | | complement(4575 . . . 4620), complement(4434 . . . 4512), |
| | | complement(4331 . . . 4369)), XP_016611114.1 - uncharacterized protein |
| 674 | NW_015971539.87 | CDS = complement(5696 . . . >5845), XP_016611113.1 - uncharacterized |
| | | protein |
| 675 | NW_015971556.16 | Origin - fz = 1256 . . . 1336, fz = 1338 . . . 3095 |
| 676 | NW_015971556.16 | CDS = join(complement(267 . . . 364), complement(15 . . . 177)), XP_016612092.1 - |
| | | ribosomal protein L7/L12 CDS |
| 677 | NW_015971556.16 | CDS = join(712 . . . 795,857 . . . 1027), XP_016612093.1 - uncharacterized protein |
| 678 | NW_015971556.16 | CDS = complement(2045 . . . 2365), XP_016612094.1 - uncharacterized protein |
| 679 | NW_015971556.16 | CDS = complement(3402 . . . >4021), XP_016612095.1 - uncharacterized |
| | | protein |
| 680 | NW_015971544.48 | Origin - fz = 2001 . . . 3839 |
| 681 | NW_015971544.48 | CDS = 2361 . . . 3842, XP_016607575.1 - uncharacterized protein |
| 682 | NW_015971544.48 | CDS = join(4047 . . . 4157,4217 . . . 4403,4474 . . . 4534,4593 . . . 4793,4847 . . . 5660), |
| | | XP_016607574.1 - uncharacterized protein |
| 683 | NW_015971540.78 | Origin - fz = 1141 . . . 2961 |
| 684 | NW_015971540.78 | CDS = join(complement(560 . . . 775), complement(357 . . . 473), |
| | | complement(194 . . . 285), complement(103 . . . 126), complement(<1 . . . 44)), |
| | | XP_016610424.1 - uncharacterized protein |
| 685 | NW_015971540.78 | CDS = 1486 . . . 2964, XP_016610425.1 - uncharacterized protein |
| 686 | NW_015971550.23 | Origin - fz = 1596 . . . 3449 |
| 687 | NW_015971550.23 | CDS = complement(<1 . . . 319), XP_016605586.1 - uncharacterized protein |
| 688 | NW_015971550.23 | CDS = 1554 . . . 3452, XP_016605587.1 - uncharacterized protein |
| 689 | NW_015971550.23 | CDS = join(3804 . . . 3858,3929 . . . 4303,4567 . . . >5306), XP_016605588.1 - |
| | | LPXTG-domain-containing protein cell wall anchordomain CDS |
| 690 | NW_015971553.2 | Origin - fz = 1496 . . . 3337 |
| 691 | NW_015971553.2 | CDS = complement(140 . . . 874), XP_016605007.1 - uncharacterized protein |
| 692 | NW_015971553.2 | CDS = join(1454 . . . 3002,3111 . . . 3340), XP_016605006.1 - uncharacterized |
| | | protein |
| 693 | NW_015971543.7 | Origin - fz = 1507 . . . 3405 |
| 694 | NW_015971543.7 | CDS =< 1 . . . 984, XP_016608332.1 - uncharacterized protein |
| 695 | NW_015971543.7 | CDS = join(1507 . . . 2987,3055 . . . 3316), XP_016608331.1 - uncharacterized |
| | | protein |
| 696 | NW_015971549.29 | Origin - fz = 2177 . . . 4021 |
| 697 | NW_015971549.29 | CDS = 2135 . . . 4024, XP_016605988.1 - uncharacterized protein |
| 698 | NW_015971549.29 | Origin = fz 1533 . . . 3383 |
| 699 | NW_015971549.29 | CDS = join(complement(84 . . . 210), complement(<1 . . . 19)), XP_016605977.1 - |
| | | nuclear export factor GLE1 CDS |
| 700 | NW_015971549.29 | CDS = 1488 . . . 3386, XP_016605978.1 - uncharacterized protein |
| 701 | NW_015971549.29 | CDS = join(complement(3783 . . . 4010), complement(3559 . . . 3723), |
| | | complement(3450 . . . 3476)), XP_016605979.1 - uncharacterized protein |
| 702 | NW_015971549.29 | CDS = join(4382 . . . 4502,4569 . . . 4607,4672 . . . 4748,4822 . . . 4941, 5009 . . . >5057), |
| | | XP_016605980.1 - ribosomal protein S18 CDS |
| 703 | NW_015971537.108 | Origin - Fz = 1664 . . . 3481 |
| 704 | NW_015971537.108 | CDS = join(complement(170 . . . 749), complement(<1 . . . 103)), XP_016612676.1 - |
| | | uncharacterized protein |
| 705 | NW_015971537.108 | CDS = 1613 . . . 3496, XP_016612677.1 - uncharacterized protein |
| 706 | NW_015971537.108 | CDS = join(complement(4295 . . . >4477), complement(4179 . . . 4215), |
| | | complement(4073 . . . 4118), complement(3883 . . . 4005), |
| | | complement(3627 . . . 3827)), XP_016612679.1 - 8-oxoguanine DNA- |
| | | glycosylase (ogg) CDS |
| 707 | NW_015971539.89 | Origin - Fz = 3414 . . . 4805 |
| 708 | NW_015971539.89 | CDS = join(<1 . . . 77,148 . . . 498), XP_016611303.1 - atypical/RIO/RIO2 protein |
| | | kinase CDS |
| 709 | NW_015971539.89 | CDS = 3414 . . . 4913, XP_016611304.1 - uncharacterized protein |
| 710 | NW_015971539.89 | CDS = join(5943 . . . 5991,6051 . . . 6694), XP_016611305.1 - uncharacterized |
| | | protein |
| 711 | NW_015971539.80 | Origin - fz = 1141 . . . 2961 |
| 712 | NW_015971539.80 | CDS = join(complement(751 . . . 1071), complement(495 . . . 685), |
| | | complement(326 . . . 428), complement(231 . . . 262), complement(<1 . . . 167)), |
| | | XP_016610709.1 - uncharacterized protein |
| 713 | NW_015971539.80 | CDS = 1334 . . . 2617, XP_016610710.1 - uncharacterized protein |
| 714 | NW_015971539.80 | CDS = join(3793 . . . 4239,4305 . . . >4684), XP_016610711.1 - uncharacterized |
| | | protein |
| 715 | NW_015971548.32 | Origin - Fz = 2042 . . . 2731, Fz = 2734 . . . 3897 |
| 716 | NW_015971548.32 | CDS = join(complement(87 . . . 371), complement(<1 . . . 15)), XP_016606174.1 - |
| | | uncharacterized protein |
| 717 | NW_015971548.32 | CDS = 2000 . . . 2878, XP_016606179.1 - uncharacterized protein |
| 718 | NW_015971548.32 | CDS = complement(3055 . . . 3399), XP_016606178.1 - uncharacterized protein |
| 719 | NW_015971548.32 | CDS = complement(3055 . . . 3399), XP_016606177.1 - hypothetical protein, |
| | | variant 1 CDS |
| 720 | NW_015971548.32 | CDS = complement(3055 . . . 3399), XP_016606175.1 - hypothetical protein, |
| | | variant 3 CDS |
| 721 | NW_015971548.32 | CDS = complement(3055 . . . 3399), XP_016606176.1 - hypothetical protein, |
| | | variant 2 CDS |
| 722 | NW_015971548.32 | CDS = join(complement(4532 . . . 5052), complement(4228 . . . 4465)), |
| | | XP_016606180.1 - uncharacterized protein |
| 723 | NW_015971537.105 | Origin - Fz 1285 . . . 1851, Fz 1838 . . . 3106 |
| 724 | NW_015971537.105 | CDS = 43 . . . 953, XP_016612555.1 - 23S rRNA methyltransferase CDS |
| 725 | NW_015971537.105 | CDS = 1931 . . . 3109, XP_016612556.1 - uncharacterized protein |
| 726 | NW_015971537.105 | CDS = 3340 . . . 4044, XP_016612557.1 - uncharacterized protein |
| 727 | NW_015971551.22 | Origin - Fz = 1455 . . . 3305 |
| 728 | NW_015971551.22 | CDS = join(complement(438 . . . 741), complement(274 . . . 374), |
| | | complement(78 . . . 203), complement(<1 . . . 11)), XP_016605440.1 - amylase |
| | | CDS |
| 729 | NW_015971551.22 | CDS = 1422 . . . 3308, XP_016605441.1 - uncharacterized protein |
| 730 | NW_015971538.95 | Origin - Fz 1976 . . . 3643 |
| 731 | NW_015971538.95 | CDS = join(545 . . . 634,713 . . . 778,874 . . . 947,1012 . . . 1105,1182 . . . 1511), |
| | | XP_016611749.1, hypothetical protein, variant CDS |
| 732 | NW_015971538.95 | CDS = join(545 . . . 634,713 . . . 778,874 . . . 947,1012 . . . 1105,1182 . . . 1511), |
| | | XP_016611750.1, uncharacterized protein |
| 733 | NW_015971538.95 | CDS = 1934 . . . 3736, XP_016611748.1 - uncharacterized protein |
| 734 | NW_015971538.95 | CDS = join(3756 . . . 3821,3891 . . . 4044,4124 . . . 4209), XP_016611747.1 - |
| | | uncharacterized protiein |
| 735 | NW_015971538.95 | CDS = join(complement(4720 . . . >4975),complement(4427 . . . 4654)), |
| | | XP_016611746.1 - protein transporter SEC23 CDS |
| 736 | NW_015971543.5 | Origin - Fz = 1403 . . . 2932, Fz = 3484 . . . 3843, Fz = 10482 . . . 10841 |
| 737 | NW_015971543.5 | CDS = join(complement(608 . . . 857), complement(<1 . . . 526)), XP_016608127.1 - |
| | | uncharacterized protein |
| 738 | NW_015971543.5 | CDS = join(1367 . . . 1651,1847 . . . 2458), XP_016608126.1 - uncharacterized |
| | | protein |
| 739 | NW_015971543.5 | CDS = join(complement(11527 . . . >11856),complement(11196 . . . 11459)), |
| | | XP_016608125.1 - tRNA pseudouridine synthase A CDS |
| 740 | NW_015971547.38 | Origin - Fz 21153 . . . 23000 |
| 741 | NW_015971547.38 | CDS = complement(<1 . . . 1238), XP_016606728.1 - uncharacterized protein |
| 742 | NW_015971547.38 | CDS = join(complement(2679 . . . 3302), complement(2333 . . . 2608)), |
| | | XP_016606729.1 - uncharacterized protein |
| 743 | NW_015971547.38 | CDS = join(complement(5514 . . . 5714), complement(5314 . . . 5433), |
| | | complement(5182 . . . 5244), complement(4441 . . . 4919), |
| | | complement(4191 . . . 4379), complement(4113 . . . 4122)), XP_016606730.1 - |
| | | uncharacterized protein |
| 744 | NW_015971547.38 | CDS = join(5915 . . . 6120,6190 . . . 6532), XP_016606731.1 - uncharacterized |
| | | protein |
| 745 | NW_015971547.38 | CDS = join(complement(8765 . . . 8775), complement(8112 . . . 8208), |
| | | complement(7758 . . . 7924), complement(7240 . . . 7699)), XP_016606732.1 - 60S |
| | | ribosomal protein L7 CDS |
| 746 | NW_015971547.38 | CDS = join(complement(10403 . . . 10640), complement(9797 . . . 10330), |
| | | complement(9493 . . . 9731)), XP_016606733.1 - uncharacterized protein |
| 747 | NW_015971547.38 | CDS = complement(11273 . . . 11626), XP_016606734.1 - uncharacterized |
| | | protein |
| 748 | NW_015971547.38 | CDS =21117 . . . 22724, XP_016606735.1 - uncharacterized protein |
| 749 | NW_015971540.74 | Origin - Fz = 1556 . . . 1618, Fz = 18457 . . . 20241 |
| 750 | NW_015971540.74 | CDS = join(complement(6883 . . . 8959), complement(6008 . . . 6816)), |
| | | XP_016610099.1, uncharacterized protein |
| 751 | NW_015971540.74 | CDS = 15278 . . . 16615, XP_016610098.1 - uncharacterized protein |
| 752 | NW_015971540.74 | CDS = 16667 . . . 17203, XP_016610097.1 - uncharacterized protein |
| 753 | NW_015971540.74 | CDS = 18934 . . . 19641, XP_016610096.1 - uncharacterized protein |
| 754 | NW_015971544.54 | Origin - Fz = 2179 . . . 3963, Fz = 11221 . . . 12918 |
| 755 | NW_015971544.54 | CDS = join(11923 . . . 12187,12380 . . . 12921), XP_016607809.1 - uncharacterized |
| | | protein |
| 756 | NW_015971548.31 | Origin - Fz = 2179 . . . 3963, 29761 . . . 29823 |
| 757 | NW_015971548.31 | 2137 . . . 2625, XP_016606083.1, uncharacterized protein CDS |
| 758 | NW_015971548.31 | 2935 . . . 3228, XP_016606082.1, uncharacterized protein CDS |
| 759 | NW_015971548.31 | complement(4585 . . . 5244), XP_016606081.1, uncharacterized protein CDS |
| 760 | NW_015971548.31 | join(complement(6085 . . . 6144), complement(5608 . . . 5979)), XP_016606080.1, |
| | | uncharacterized protein CDS |
| 761 | NW_015971548.31 | 12775 . . . 13341, XP_016606079.1, uncharacterized protein CDS |
| 762 | NW_015971548.31 | 13759 . . . 15615, XP_016606078.1, uncharacterized protein CDS |
| 763 | NW_015971548.31 | complement(21197 . . . 21856), XP_016606077.1, uncharacterized protein CDS |
| 764 | NW_015971548.31 | complement(27986 . . . 28999, XP_016606076.1, uncharacterized protein CDS |
| 765 | NW_015971553.2 | Origin - Fz = 1722 . . . 1823, Fz = 8361 . . . 8735, Fz = 9316 . . . 10710 |
| 766 | NW_015971553.2 | <1 . . . 895, XP_016605023.1, methylthioadenosine phosphorylase CDS |
| 767 | NW_015971553.2 | 9763 . . . 10341, XP_016605024.1, uncharacterized protein CDS |
| 768 | NW_015971553.2 | join(10846 . . . 10979,11047 . . . 11152,11217 . . . 11406, 11475 . . . 11674, |
| | | 11741 . . . >11855), XP_016605025.1, uncharacterized protein CDS |
| 769 | NW_015971544.55 | Origin - Fz = 2204 . . . 3538, Fz = 18980 . . . 19504 |
| 770 | NW_015971544.55 | join(1 . . . 211,281 . . . 450), XP_016607855.1, uncharacterized protein CDS |
| 771 | NW_015971544.55 | 2564 . . . 3556, XP_016607856.1, uncharacterized protein CDS |
| 772 | NW_015971544.55 | 4268 . . . 5281, XP_016607857.1, uncharacterized protein CDS |
| 773 | NW_015971544.55 | 17579 . . . 18364, XP_016607858.1, uncharacterized protein CDS |
| 774 | NW_015971545.47 | Origin - Fz = complement(929 . . . 1078), Fz = complement(16332 . . . 16598) |
| 775 | NW_015971545.47 | complement(1707 . . . 3245), XP_016607519.1, uncharacterized protein CDS |
| 776 | NW_015971545.47 | 4376 . . . 5512, XP_016607520.1, uncharacterized protein CDS |
| 777 | NW_015971545.47 | 5579 . . . 6625, XP_016607521.1, uncharacterized protein CDS |
| 778 | NW_015971545.47 | complement(6865 . . . 7386), XP_016607522.1, uncharacterized protein CDS |
| 779 | NW_015971557.14 | Origin - Fz = 1428 . . . 2312, Fz = complement(18911 . . . 19747), Fz = |
| | | complement(19747 . . . 20313) |
| 780 | NW_015971557.14 | 1386 . . . 2315, XP_016604334.1, uncharacterized protein CDS |
| 781 | NW_015971557.14 | 5128 . . . 7629, XP_016604335.1, uncharacterized protein CDS |
| 782 | NW_015971557.14 | join(8642 . . . 9617,9685 . . . 9974), XP_016604336.1, uncharacterized protein CDS |
| 783 | NW_015971557.14 | join(complement(19752 . . . 20355), complement(18974 . . . 19677)), |
| | | XP_016604337.1, uncharacterized protein CDS |
| 784 | NW_015971557.14 | complement(20561 . . . 21139), XP_016604338.1, uncharacterized protein CDS |
| 785 | NW_015971546.39 | Origin - Fz = 1386 . . . 2255, Fz = 12370 . . . 13425 |
| 786 | NW_015971546.39 | 1386 . . . 2288, XP_016606932.1, uncharacterized protein CDS |
| 787 | NW_015971546.39 | 13000 . . . 13428, XP_016606933.1, uncharacterized protein CDS |
| 788 | NW_015971546.39 | join(13966 . . . 14331, 14393 . . . 14524,14588 . . . 14644), XP_016606934.1, |
| | | uncharacterized protein CDS |
| 789 | NW_015971540.75 | Origin - Fz = 1050 . . . 1601, Fz = 21796 . . . 22866 |
| 790 | NW_015971540.75 | <1 . . . 583, XP_016610126.1, regulatory P domain-containing protein CDS |
| 791 | NW_015971540.75 | 930 . . . 1673, XP_016610127.1, uncharacterized protein CDS |
| 792 | NW_015971540.75 | join(2364 . . . 5575,5635 . . . 5770), XP_016610128.1, uncharacterized protein CDS |
| 793 | NW_015971540.75 | join(complement(20050 . . . 21056), complement(19871 . . . 19976)), |
| | | XP_016610129.1, uncharacterized protein CDS |
| 794 | NW_015971540.75 | 21913 . . . 22263, XP_016610130.1, uncharacterized protein CDS |
| 795 | NW_015971540.75 | join(23388 . . . 23423,23480 . . . >24002), XP_016610131.1, uncharacterized |
| | | protein CD |
| 796 | NW_015971552.20 | Origin - Fz = 1431 . . . 2054, Fz = 6641 . . . 7141, Fz = 31571 . . . 32275 |
| 797 | NW_015971552.20 | 1389 . . . 2087, XP_016605239.1, uncharacterized protein CDS |
| 798 | NW_015971552.20 | complement(9377 . . . 10213), XP_016605240.1, uncharacterized protein CDS |
| 799 | NW_015971552.20 | complement(10607 . . . 14875), XP_016605241.1, uncharacterized protein CDS |
| 800 | NW_015971552.20 | complement(15056 . . . 16528), XP_016605242.1, uncharacterized protein CDS |
| 801 | NW_015971552.20 | complement(16993 . . . 18246), XP_016605243.1, uncharacterized protein CDS |
| 802 | NW_015971552.20 | complement(18290 . . . 18838), XP_016605244.1, uncharacterized protein CDS |
| 803 | NW_015971552.20 | complement(18885 . . . 19541), XP_016605245.1, uncharacterized protein CDS |
| 804 | NW_015971552.20 | complement(20348 . . . 20710), XP_016605246.1, uncharacterized protein CDS |
| 805 | NW_015971552.20 | complement(22271 . . . 23368), XP_016605247.1, uncharacterized protein CDS |
| 806 | NW_015971552.20 | join(23490 . . . 23613,23713 . . . 24011), XP_016605248.1, uncharacterized protein |
| | | CDS |
| 807 | NW_015971552.20 | complement(24114 . . . 26117), XP_016605249.1, uncharacterized protein CDS |
| 808 | NW_015971552.20 | 27736 . . . 30210, XP_016605250.1, uncharacterized protein CD |
| 809 | NW_015971552.20 | 31562 . . . 32278, XP_016605251.1, uncharacterized protein CDS |
| 810 | NW_015971552.20 | 32943 . . . >33826, XP_016605252.1, uncharacterized protein CDS |
| 811 | NW_015971539.88 | Origin - Fz = 3934 . . . 4731 |
| 812 | NW_015971539.88 | join(complement(6171 . . . 6488), complement(5530 . . . 6102), |
| | | complement(4914 . . . 5468)), XP_016611175.1, uncharacterized protein CDS |
| 813 | NW_015971539.88 | Origin - Fz = 6802 . . . 7764 |
| 814 | NW_015971539.88 | join(<1 . . . 469,560 . . . 3504), XP_016611171.1, uncharacterized protein CDS |
| 815 | NW_015971539.88 | 5978 . . . 6376, XP_016611170.1, uncharacterized protein CDS |
| 816 | NW_015971539.88 | 6838 . . . 7542, XP_016611169.1, uncharacterized protein CDS |
| 817 | NW_015971550.24 | Origin - Fz = 1951 . . . 2142 |
| 818 | NW_015971550.24 | join(complement(815 . . . 1728), complement(645 . . . 729)), XP_016605628.1, |
| | | FAD-dependent pyridine nucleotide-disulfide oxidoreductase CDS |
| 819 | NW_015971550.24 | join(2856 . . . 3030,3118 . . . 3522,3590 . . . >3811), XP_016605627.1, uncharacterized |
| | | protein CDS |
| 820 | NW_015971545.43 | Origin - Fz = 1172 . . . 2080, Fz = 40950 . . . 41912 |
| 821 | NW_015971545.43 | join(complement(12469 . . . 13498), complement(9416 . . . 12378)), |
| | | XP_016607267.1, uncharacterized protein CDS |
| 822 | NW_015971545.43 | complement(13541 . . . 15748), XP_016607268.1, uncharacterized protein CDS |
| 823 | NW_015971545.43 | join(complement(16732 . . . 17676), complement(16202 . . . 16643), |
| | | complement(15807 . . . 16138)), XP_016607269.1, uncharacterized protein CDS |
| 824 | NW_015971545.43 | join(19841 . . . 20627,20775 . . . 21244), XP_016607270.1, uncharacterized protein |
| | | CDS |
| 825 | NW_015971545.43 | 21786 . . . 22385, XP_016607271.1, uncharacterized protein CDS |
| 826 | NW_015971545.43 | join(23128 . . . 23590,23648 . . . 23949,24751 . . . 24852,24946 . . . 25324, |
| | | 25391 . . . 25720,25792 . . . 25814), XP_016607272.1, uncharacterized protein CDS |
| 827 | NW_015971545.43 | 26002 . . . 27456, XP_016607273.1, uncharacterized protein CDS |
| 828 | NW_015971545.43 | join(complement(39024 . . . 40212), complement(38116 . . . 38963)), |
| | | XP_016607274.1, uncharacterized protein CDS |
| 829 | NW_015971541.67 | Origin - Fz = 2001 . . . 3248 |
| 830 | NW_015971541.67 | join(755 . . . 864,897 . . . 1341), XP_016607744.1, uncharacterized protein CDS |
| 831 | NW_015971554.117 | Origin - Fz = 2009 . . . 2293 |
| 832 | NW_015971554.117 | join(complement(874 . . . 1258), complement(398 . . . 789)), XP_016604860.1, |
| | | uncharacterized protein CDS |
| 833 | NW_015971554.117 | join(2498 . . . 2932,2999 . . . >3115), XP_016604861.1, uncharacterized protein |
| | | CDS |
| 834 | NW_015971537.110 | Origin - Fz = 2009 . . . 2293 |
| 835 | NW_015971537.107 | Origin - Fz = 2000 . . . 2812 |
| 836 | NW_015971537.107 | 2162 . . . 2815, XP_016612640.1, uncharacterized protein CDS |

Species: Spizellomyces punctatus - DAOM BR117 chromosome

### DNA Cleavage In Vitro by Fz-ωRNA RNP

[1420] Based on its structural similarity to TnpB and Cas12, applicant hypothesized that Fz performs DNA cleavage and that the 3′ terminal flanking sequence of the ωRNA functions as a guide sequence that directs Fz to its target. To test this hypothesis, applicant adopted the previously developed target-adjacent motif (TAM) identification assay used for OMEGA systems⁴. The 3′-terminal ωRNA flanking sequence in the S. cerevisiae expression vector for 4 Fz orthologs (SpuFz1, GtFz1, NlovFz2, and MmeFz2) was replaced by a 30-nt sequence (hereafter PSP1 guide) matching a target site adjacent to an 8-bp (8N) randomized region in a plasmid library. Fz RNP complexes were purified from yeast and used for plasmid library cleavage assays (FIG. 63A). Deep-sequencing of the cleaved products revealed enrichment of specific 5′ sequences in the randomized 8N region upstream of the target sequence (5′-CATA-TAM sequence for SpuFz1, 5′-TTAAN for GtFz1, 5′-CCG for NlovFz2 and 5′-TAG for MmeFz2) (FIG. 63B). Sanger sequencing of the cleaved products revealed unique cleavage patterns for each ortholog (FIG. 63B), SpuFz1 cleaved after the 16th and 17th bases on the non-target strand (NTS) and after the 20th and 21st bases on the target strand (TS), generating 5′ overhangs. GtFz1 cleaved after the 14-17th bases on the NTS and after the 14-16th bases on the TS, which could generate both sticky and blunt ends. NlovFz2 cleaved after the 19th base on both the NTS and TS, generating blunt ends. Finally, MmeFz2 cleaved after the 17th and 18th bases on the NTS and after the 9-14th bases on the TS, generating 3′ overhangs. Collectively, these results demonstrate that Fz1 and Fz2 are ωRNA-guided endonucleases.

[1421] Applicant further characterized Fz1 using recombinant SpuFz1 RNP from S. cerevisiae, confirming that mutating any base in the TAM sequence completely abolished cleavage, indicating a strong dependence on the TAM for RNA-guided DNA endonuclease activity (FIG. 63C). Cleavage activity of SpuFz1 is supported by magnesium, calcium and manganese (FIG. 63D) and has a broad temperature range (from 4° to 70° C.), which is consistent with the mesophilic temperature habitat of the host organism S. punctatus (FIG. 63E). Applicant also tested the activity of SpuFz1 on other types of substrates (single-stranded DNA (ssDNA), double-stranded RNA (dsRNA) and single-stranded RNA (ssRNA)), and demonstrated that SpuFz1 performed ωRNA-guided, TAM- and target-dependent double-stranded DNA (dsDNA) cleavage, but did not cleave targeted ssDNA (FIG. 63F). Applicant further confirmed that SpuFz1 does not have any robust cleavage activity on collateral dsDNA, ssDNA, dsRNA or ssRNA substrates upon dsDNA target recognition (FIG. 63G).

### Fz Functions as a Human Genome Editor

[1422] Next, we tested whether the Fz OMEGA system can be harnessed to achieve RNA-guided DNA cleavage in the genome of human cells. We focused on four orthologs (SpuFz1, GtFz1, NlovFz2 and MmeFz2) with in vitro activity and tested their activities in human cells. A plasmid encoding the human codon optimized Fz protein and the U6 promoter-driven ωRNA expression plasmid were transiently transfected into HEK293FT cells. After 72 hours, genomic DNA was extracted and analyzed by deep sequencing for the presence of insertions and deletions (indels) at the targeted sites (FIG. 64A). To assess the programmability of the system, we screened eight guides targeting eight different loci: B2M, CXCR4, VEGFA, CA2, KRAS, DYRK1A, HPRT1 and DMD, with ISDra2 TnpB⁸, AsCas12a¹² and AsCas12fl (a minimal editor of Cas12 lineage)¹³ as benchmarks. We confirmed that SpuFz1, NlovFz2 and MmeFz2 induced indels at these sites with varying efficiency, up to 11.8% by NlovFz2, whereas GtFz1 did not induce detectable indels (0.01%) at these eight different loci (FIG. 64B-64D, FIG. 72A). The overall editing efficiency of those three wild-type (WT) Fz proteins is comparable with that of WT AsCas12fl (FIG. 72B). Deep sequencing of the target loci revealed that these three orthologs have different indel patterns (FIG. 64B-64D). SpuFz1 and NlovFz2 caused larger deletion patterns, which is closer to the pattern observed for AsCas12a than that of SpCas9¹⁴. ISDra2 TnpB also caused a larger deletion pattern (FIG. 72B). MmeFz2 uniquely shows a prominent 1-bp deletion pattern, which is similar to that of AsCas12fl (FIG. 72B). To further characterize the activity of these three Fz orthologs, we tested a range of guide lengths targeting a representative locus, B2M, on the human genome. SpuFz1, NlovFz2 and MmeFz2 showed minimal activity with 10-, 7- and 9-nt long guides, respectively, and the efficiency increased with increasing guide length, reaching a plateau around 13-, 12- and 11-nt long guides, respectively. (FIG. 72C). The native guide lengths identified by RNP-RNAseq (14-, 21- and 11-nt) are within the plateaus.

[1423] Based on the structural predictions and the minimal guide length requirement in human cells, we chose to focus on SpuFz1 for optimization for activity in human cells. We first tested if extending or modifying the ωRNA scaffold improved activity. We tested extensions from 87-nt to 425-nt and found that the 275-nt extension of the 5′ sequence or adding an MS2-stem loop to the 5′ of ωRNA scaffold improved the activity of SpuFz1. We also assessed the function of ghost ωRNAs, which lack a Fz gene in their loci. RNA structure prediction showed that ghost ωRNAs have a distinct stem 2 structure with a 3-nt bulge instead of an 8-nt hairpin loop (FIG. 64E). The 75-nt ghost ωRNAs from 4 different loci achieved comparable indel efficiency as the 5′ MS2-stem loop or 5′ extended canonical ωRNA from the original SpuFz1 locus (FIG. 64F). Based on these results, we chose to use the 5′ 275-nt extended canonical ωRNA for downstream experiments. To further improve activity, we sought to increase the binding strength of SpuFz1 proteins to ωRNA and target DNA by mutating residues selected based on the structural model to arginines, lysines or histidines. We tested the activity of 111 SpuFz1 single point mutants at the B2M target site (FIG. 72D). We identified five mutants (D300R, C310R, D487K, E498R and T513K) that showed increased indel efficiency compared to WT SpuFz1 (FIG. 72D). By combining these mutations, we further boosted efficiency (FIG. 64G). We selected one combination, C310R/D487K/T513K (hereafter SpuFz1-v2), and confirmed it showed improved gene editing efficiency at eight genomic sites (FIG. 64H). Collectively, these data demonstrate the potential of Fz for human genome engineering applications.

### Structure of SpuFz1-ωRNA-Target DNA Complex

[1424] To understand the DNA cleavage mechanism of SpuFz1, we determined the cryo-EM structure of the full-length WT SpuFz1 (residues 1-638) in complex with the native ωRNA, a 54-nt target DNA strand and a 24-nt non-target DNA strand at a resolution of 2.7 Å (FIG. 65A-65F and FIG. 66 and FIG. 73A-73F). EM densities were sufficient to construct majority of models for SpuFz1, ωRNA and target DNA. The structure reveals that SpuFz1 adopts a bilobal architecture, comprising a recognition (REC) lobe and a nuclease (NUC) lobe. The REC lobe consists of the REC domain and WED domain, and the NUC lobe is composed of the RuvC domain and the NUC domain (FIGS. 65B and 65C). The DNA duplex containing the TAM sequence is surrounded by the REC and WED domains (FIG. 74A). The heteroduplex of ωRNA and target DNA is accommodated by the positively charged channel formed by the REC domain and the RuvC domain (FIG. 74B).

[1425] The ωRNA structure of SpuFz1 includes a 15-nt guide segment and a 75-nt RNA scaffold. The RNA scaffold is composed of 2 stems and a linker (FIG. 66 and FIGS. 74C and 74D). The scaffold of the ωRNA is recognized by the positively charged surface formed by the WED, RuvC and NUC domains of SpuFz1 (FIG. 74B). In the structure, the first 3 nucleotides, U5, C6 and C7, of the ωRNA scaffold form extensive interactions with SpuFz1, where the base of U5 is sandwiched by the NUC domain and guide region of the ωRNA, forming a stacking interaction with W570 of the NUC domain and a hydrogen bond with the backbone phosphate of A86. The second nucleotide, C6, forms a base pair with G20, a nucleotide of stem loop 1. The third nucleotide, C7, forms hydrogen bonds with R414 and R387 of the RuvC domain (FIG. 66 and FIG. 74E). The nucleotides from stem loop 1 (U16, G17, U18, C19, G20 and G22) extensively interact with the residues of the RuvC and NUC domains, including W596^{NUC}, R601^{NUC}, N604^{NUC}, S598^{NUC}, Y602^{NUC}, R550^{NUC}, C611^{RuvC}, M607^{RuvC}, W603^{NUC}, L583^{NUC}, K562^{NUC}, R564^{NUC}, S567^{NUC} and R572^{NUC} (FIG. 66 and FIG. 74E-74G). The 6-nt linker between stem 1 and stem 2, A29 to C34, interacts with the RuvC domain, where the side chain residues of R415 and R419 interact with the backbone phosphate of C32, while the side chains of residues K483 and N480 interact with the base group of C34. Stem 2 is mainly recognized by the WED and RuvC domains: the phosphates of A72 and A75 interact with R315 and R317 of the WED domain, and the base groups of U35 and G37 interact with Q482 of the RuvC and K312 of the WED domain, respectively. The core-distal part of stem 2 (C40-G70) does not contact SpuFz1, and the structure of this region is flexible, as reflected in the low local resolution and lack of EM density in the loop region of stem 2 (FIG. 73E). This observation suggested this region of stem 2 could be omitted, making a more compact ωRNA for applications. To test this hypothesis, we systematically trimmed the stem 2 region and confirmed that the C40-G70 region is not essential for activity of SpuFz1 in human cells (FIGS. 65D and 65E), giving a final ωRNA design for 96 nt (29-nt MS2 stem loop+52-nt trimmed ωRNA scaffold+15-nt guide) (FIG. 65F).

[1426] Fifteen bp of the RNA-DNA heteroduplex are visible in the structure, positioned within a positively-charged channel created by the WED, REC and RuvC domains (FIG. 74A-74D). The first complementary pairing between dA0 in the DNA and U76 in the RNA is stacked with the WED domain. Polar interactions are formed by T22 of the WED domain and R531 of the RuvC domain with U76 in RNA, and stacking interactions are formed by H21 of the WED domain and dA0 in the DNA, thereby facilitating heteroduplex formation. Sugar-phosphate backbone interactions are formed between C77, U78, A81 and G83 in the RNA and residues R481^{RUVC}, K25^{WED}, R268^{REC} and R157^{REC} of SpuFz1. The interactions formed by the sugar-phosphate backbone interactions were also observed between the DNA (dA(−2), dC(−6), dA(−8), dA(−9), dA(−10), dA(−11), dC(−12)) and protein (Q148^{REC}, R407^{RuvC}, R420^{RuvC}, S269^{REC}, R268^{REC}, K440^{RuvC}, R260^{REC}) (FIG. 66).

[1427] The DNA TAM region is recognized by the REC and WED domains. The NTS bases of the 5′-CATA-3′ TAM interact with the REC domain, while the TS bases interact both with the REC and WED domains. Specifically, hydrogen bonds are formed by dC(−4), dA(−3) and dT(−2) on the NTS with residues R96, Q129 and N133 of the REC domain and by dG4, dA2 and dT1 on the TS with residues R291 of the WED domain, Q130 of the REC domain and N133 of the REC domain, respectively (FIG. 66 and FIG. 75A-75B). Additionally, the base dT1 on the TAM interacts with Y345 in the loop of the WED domain, which is the starting point for DNA unwinding (FIG. 75C). These results reveal the recognition mechanism of the SpuFz1 5′-CATA-3′ TAM.

[1428] Applicants observed in the structure that a downstream segment of the TS binds to the positively-charged channel formed by the RuvC and NUC domains (FIG. 76A-76D). Two magnesium ions are coordinated by residues E541, D383, N385, and D606 and by the terminal nucleotide phosphate backbone of the TS strand. Notably, a putative water molecule was coordinated by the catalytic residue D606 and the G20 phosphate backbone of the ωRNA (FIG. 76C). The interactions of D606 with the ωRNA through the putative water molecule indicate that the active site is stabilized by the ωRNA and suggest that the ωRNA plays a role in the catalytic function of the protein. These results provide insight about the cleavage mechanism of SpuFz1, which potentially involves the ωRNA.

### Discussion

[1429] RNA-guided systems couple programmable nucleic acid recognition with enzymatic activity, enabling a single protein or protein complex to target multiple sites. For example, in prokaryotes, the RNA-guided CRISPR-Cas system provides adaptive immunity against a range of invading foreign genetic elements. Although eukaryotes also employ this coupling strategy, such as in siRNA and miRNA-mediated gene regulation, mechanistically, these systems are distinct from prokaryotic systems. The recently described OMEGA systems appear to combine RNA-guided recognition with transposition of mobile elements⁴¹⁵. Here we showed that the eukaryotic Fanzor (Fz) protein, which shares remote homology with the OMEGA effector TnpB, is an RNA-guided endonuclease, revealing a universal RNA-guided mechanism that spans all kingdoms of life.

[1430] Distinct TnpBs gave rise to both Cas12s and Fzs, with Cas12 evolving for adaptive immune function and guided transposition in prokaryotes^{14,16} while Fzs became adapted for function in eukaryotes (FIG. 67). Multiple horizontal gene transfer events led to the formation of Fz1 and Fz2 from diverse TnpBs, and ongoing transfers seem to also occur, as suggested by the presence of prokaryotic-eukaryotic symbiotic hosts (and the presence of TnpB within Fz branches). Fz also appears to have propagated among eukaryotes, likely via eukaryotic viruses (FIG. 68) and eukaryotic symbionts. For example, we found Fzs in viruses with potential algae or mollusk hosts, both of which contain Fzs (e.g., GtFz1 and MmeFz2) (Tables 15 and 20). Similar to TnpB and some Cas12 family members, we found that Fz1 from the fungus S. punctatus has RNA-guided dsDNA cleavage activity. Structurally, all three effectors adopt a bilobed architecture and recognize DNA duplexes as well as RNA-DNA heteroduplexes in a similar manner (FIG. 67). However, Cas12a possesses several domains that are missing in the corresponding regions of Fz and TnpB. The ωRNA scaffolds functionally substitute for some regions of Cas12a domains, such as the WED domain. This evolutionary relationship, characterized by the partial replacement of RNA with protein, parallels the transition observed in IscB and IsrB, where ωRNA scaffolds are supplanted by protein components in their evolutionary descendant, Cas9^{5,17,18}.

[1431] The biological role(s) of Fz's RNA-guided endonuclease activity remains unknown. In the case of TnpB, it seems to help TnpA-mediated transposition of the IS200/IS605 insertion sequences^{4,6,15}. After TnpA-mediated peel-and-paste insertion, a TnpB-mediated double strand break (DSB) at the sister chromosome allows the insertion sequence to copy itself through homologous recombination. Some Fzs have been reported to co-occur with transposases with TnpA-like HUH endonuclease activity such as Helitrons⁷, drawing a parallel to this peel-and-paste/cut-and-copy mechanism¹⁵. Thus, like TnpBs, it is possible that the RNA-guided DNA cleavage by Fzs acting at the sister chromosome could generally promote propagation of ssDNA transposons. Although we did not find any transposases flanked by the IRs of the Spu-1 elements in the genome of S. punctatus, (Table 21 and Example 16), it is also possible that Fzs may help other transposons in trans. This is consistent with our observation of ghost loci, in which the ωRNA is present but not the protein. In this scenario, a repertoire of guide sequences of ωRNAs, including from ghost loci, could allow Fzs to target diverse sites, and their target transposons may not maintain their copy numbers over generations without Fz. Although transgene expression in S. punctatus has been reported^{19,20}, more sophisticated genetic manipulation strategies to remove multiple copies of Fz genes in such eukaryotic host organisms would be required to answer this question. The loci of GtFz1, NlovFz2 and MmeFz2 seem to lack IRs, and no clear transposase association was detected in their genomes (Table 22 and Examples 17, and 18), suggesting Fzs may also potentially be linked to a function distinct from TnpB. Further analysis of Fz IRs and gene associations may provide more insight into the biological function(s) of Fz.

TABLE 22

| | LOCUS - Guillardia theta | | |
|---|---|---|---|
| | CCMP2712 unplaced | | |
| SEQ ID NO: | genomic scaffold | Notes (Locations/Qualifiers) From Geneious | |
| 3840 | NW_005434667.1 | wrna | 2000..2473 |
| 3841 | | /original_coord=“NW_005434667.1:893317_893790:1” | |
| | | wrna | complement(2148..2175) |
| | | /original_coord=“NW_005434667.1:893465_893492:−1” | |
| | | gene | <3114..>5186 |
| | | | /locus_tag=“GUITHDRAFT_101477” |
| | | | /db_xref=“GeneID:17309716” |
| | | mRNA | <3114..>5186 |
| | | | /locus_tag=“GUITHDRAFT_101477” |
| | | | /product=“hypothetical protein” |
| | | | /transcript_id=“XM_005839957.1” |
| | | | /db_xref=“GeneID:17309716” |
| | | CDS | 3114..5186 |
| | | | /locus_tag=“GUITHDRAFT_101477” |
| | | | /codon start=1 |
| | | | /product=“hypothetical protein” |
| | | | /protein_id=“XP_005840014.1” |
| | | | /db xref=“JGIDB:Guith1 101477” |
| | | | /db xref=“GeneID:17309716” fz |
| | | 3114..5156 | |
| | | /original_coord=“NW_005434667.1:894431_896473:1” | |
| | | | /fz=“1 142.76729559748426_1 681 |
| 3842 | NW_005434329.3 | wrna | 2000..2412 |
| 3843 | | | /original_coord=“NW_005434329.1:3910_4322:1” |
| | | gene | <3019..>5978 |
| | | | /locus_tag=“GUITHDRAFT_122506” |
| | | | /db_xref=“GeneID:17288017” |
| | | mRNA | join(<3019..4744,5350..>5978) |
| | | | /locus_tag=“GUITHDRAFT 122506” |
| | | | /product=“hypothetical protein” |
| | | | /transcript_id=“XM_005818216.1” |
| | | | /db xref=“GeneID:17288017” |
| | | CDS | join(3019..4744,5350..5978) |
| | | | /locus_tag=“GUITHDRAFT_122506” |
| | | | /codon_start=1 |
| | | | /product=“hypothetical protein” |
| | | | /protein_id=“XP_005818273.1” |
| | | | /db xref=“JGIDB:Guith1_122506” |
| | | | /db xref=“GeneID:17288017” fz |

| 3019..5052 | |
|---|---|
| | /original_coord=“NW_005434329.1:4929_6962:1” |
| wrna | /fz=“1 142.76729559748426_1 681” |
| | complement(5137..5166) |
| | /original_coord=“NW_005434329.1:7047_7076 :- |

1”

[1432] A comparison of the structures of SpuFz and ISDra2 TnpB reveals the preservation of key mechanistic features during their evolution from prokaryotes to eukaryotes. For example, both SpuFz1 and ISDra2 TnpB share a bilobed structure, consisting of the REC and NUC domains (FIG. 77A-77I). However, there are differences between these proteins in the loading of ωRNA and target DNA. Specifically, the ωRNA of SpuFz1 lacks the pseudoknot structure, which is a common feature in TnpB and Cas12s (FIG. 77A-77I). The three short alpha helices present in the WED domain of the SpuFz1 structure are absent in the ISDra2 TnpB structure, and this crucial segment facilitates the recognition of the DNA duplex by SpuFz1 (FIG. 77F). The enlarged REC and RuvC domains of SpuFz1, coupled with the interactions between the ωRNA backbone and these domains (FIGS. 77G and 77H), provide enhanced protection for the RNA/DNA heteroduplex, in contrast with ISDra2 TnpB where a portion of the heteroduplex is exposed to solvent^{8,11}. These structural insights deepen our understanding of the diverse mechanisms these proteins utilize and provide valuable evolutionary perspectives. Future studies focusing on the structural differences between Fz1 and Fz2 will similarly advance our understanding of this protein family and the evolution of their cognate ωRNA may reveal mechanistic differences between these variants. FIG. 78A-78B show uncropped gel images used in this example.

[1433] From a bioengineering standpoint, the eukaryotic origin of Fz and its relatively small size compared to Cas9/12 make it an attractive starting point for further development. However, given the possible function of Fzs (and OMEGA effectors more broadly) in helping transposons propagate, they could be evolved for low activity and/or tightly regulated in their native organisms to prevent toxicity to the host. Reported engineering strategies for Cas12, such as systematic mutagenesis to introduce glycinxes^{14,21} and guide RNA engineering²², combined with in-depth screening of more Fzs could further improve their genome editing performance. Nevertheless, we show here that introduction of positively charged residues enhances activity, with our optimized SpuFz1-v2 achieving up to 18.4% indel activity on the human genome, highlighting the potential of Fzs for genome editing tools.

### Materials and Methods

Sequence mining of Fanzor Protein

[1434] Multiple sequence alignments of Fanzors were extracted from a previous article⁷, trimmed using trimal version 1.2²³ and converted into a hmm profile using hmmer version 3.3.2²⁴. One sequence each of Fanzor 1 and Fanzor 2 were analyzed with HHPred (web server) showing hits with HH probability greater than 90% for COG0675 and PF07282 and PF01385. These three profiles along with a custom profile made from Fanzor proteins were used as a seed for a hmmsearch to search for homologs in the NCBI non-redundant database (frozen in September 2022). Hits with a bit score equal to or greater than 20 were retained.

### Construction of a Non-Redundant Eukaryotic Structural Database

[1435] The sequences of the 214 million models of eukaryotic protein contained within the Alphafold EBI database²⁵ were extracted and clustered at 50 percent of sequence identity and 50 percent of coverage with mmseqs2 v12²⁶. Taxids of each sequence extracted from this database were mapped to the NCBI taxonomy database to extract only structures from eukaryotic proteins. Finally, only predicted structures with at least 30 aa associated to a pLDDT greater than 50 were selected in order to filter out low quality predictions. The resulting database, which we named EukAFdb50, contains 11,693,265 predicted structures.

### Structural Mining for Fanzor

[1436] Structural mining was performed from globular regions curated and extracted from predicted models (Alphafold2 default parameters) of Fanzor 1 and Fanzor 2 and compared to EukAFdb50. The predicted structures were manually split into 2 main sets of seeds: the RuvC region and the WED-Rec region for each Fanzor. Each seed was compared to EukAFdb50 using Dali v5 software with reciprocal comparison^{27,28}, and hits with a score equal to or greater than 5 were curated using PyMOL version 1.2 (The PyMOL Molecular Graphics System, Schrodinger, LLC).

### Phylogeny of Fanzor

[1437] The 162,187 Fanzor homologous sequences (detected via sequence mining and curated from structural mining) were gathered and clustered at 50 percent of sequence identity and 50 percent of sequence coverages using mmseqs2 v12 into 4,498 clusters. A representative of each group was extracted and aligned using Muscle v5 software²⁹ with the super5 algorithm. The resulting sequence alignment was trimmed with trimal v1.2 (gappyout)²³ and curated manually using the Geneious platform. We mapped the catalytic site positions of the RuvC domain on the alignment and discarded sequences that harbored gaps in these positions, leading to a final alignment of 3,003 sequences. A structural model of each candidate was computed using Alphafold2 and each structural model was compared to the structure of the RuvC domain of ISDra2 TnpB using Dali. 166 candidates did not align structurally to RuvC, indicating they are potentially partial proteins (lacking the RuvC domain) or false positives detected during the profile mining. A tree was computed from the final alignment using IQtree³⁰. The best model made on the final set was VT+T+R10 and bootstrap values were estimated with ultra fast bootstrap with 1000 iterations.

### Fanzor Loci Analysis for Spu, Gt, Nlov and Mme

[1438] To identify all instances of Fz in Spu, all contigs from Spizellomyces punctatus DAOM BR117 were downloaded from NCBI. First a translated blast³¹ was performed using a previously identified Spu Fanzor 7. Hits with e-value <0.05 were selected. IRs (RE and LE) seeds were extracted from the same Spu seed locus and used as input to search for ends in all contigs from Spu using blastn with a word length of 7. Hits were selected if their scores were greater than 20 and if they covered at least 17 nt. The distance between hits (Fanzor and end) in the genomes were calculated, and hits less distant than 25 kb were aggregated to form a locus. Loci that do not encompass IRs (at least two hits in inverted orientation) were manually curated to search for IRs using a motif search within the vicinity of a hit up to 50-kb upstream and downstream with the Geneious software. This analysis yielded 42 loci containing at least one Fanzor hit, and 134 loci with at least one end. A similar analysis was performed from assemblies downloaded from NCBI for Guillardia theta CCMP2712, Naegleria lovaniensis strain ATCC 30569 and Mercenaria mercenaria isolate YKG-2019.

### Cloning

[1439] Plasmids used in this study were cloned using general cloning methodologies including Gibson assembly with NEBuilder HiFi DNA Assembly Master Mix (New England Biolabs, E2621L) and golden gate assembly (GGA) with a variety of type IIS restriction enzymes. The Stbl3 E. coli strain (Thermo Fisher, C737303) was used for DNA cloning. The sequences of cloned constructs were confirmed by whole-plasmid sequencing following Tn5 tagmentation after mini-prep of plasmids³² with QIAprep reagents (QIAGEN, 27106). Human-codon optimized Fanzor was cloned into two types of pCMV plasmids: one containing N-terminal NLS and HA tag, and the other containing C-terminal HA and NLS tag. Fanzor point mutants were constructed using site-directed mutagenesis with KLD Enzyme Mix (NEB, M0554S). The Fanzor ωRNA was optimized as follows. Their secondary structures were predicted by mFold. Each scaffold region of the ωRNA variants was cloned under the U6 promoter with two inverted BbsI type IIS restriction sites behind the U6 promoter. Guides were cloned into the scaffolds by GGA as two annealed complementary oligonucleotides. For human genome targeting by Cas12a and Cas12f, two vectors pY108 (#84739) and pCMV-AsCas12fl (#171614) were obtained from Addgene.

### Fanzor RNP Affinity-Purification

[1440] Fanzor orthologs were expressed in Saccharomyces cerevisiae and affinity purified. Fanzor ORF and predicted 3′ inverted repeat (IR) regions were cloned under GAL-GAPDH hybrid promoter in pRS426-URA3. A tag for protein purification (10×His-maltose-binding protein (MBP)) was inserted between the start and second codons of Fanzor. The expression vector was transformed into a yeast BCY123 strain³³ (a kind gift from Nagai K lab, MRC Laboratory of Molecular Biology, Cambridge) and selected on SD-URA plates. Colonies on half of the petri dish were scraped and transferred into a 50-mL starter culture of YM4 LMB media (0.67% yeast nitrogen base without amino acids, 0.5% casamino acids, 0.002% adenine and 0.002% tryptophan) supplemented with 2% raffinose for 17 hours, which was used to inoculate 1 L of YM4 LMB media supplemented with 2% raffinose and 100 μg/ml ampicillin for growth at 30° C. and shaking at 180 rpm until an OD600 of 1.0 was reached. Then, protein expression was induced in the presence of 2% galactose for 16 hours. The cells were harvested by centrifugation for 10 minutes at 4° C. at 4000 rpm (Beckman Coulter Avanti J-E, rotor JLA8.100). The cell pellet was resuspended in 500 mL of MQ water to remove residual media, pelleted again by centrifugation for 10 minutes at 4° C. at 4000 rpm. All subsequent steps were performed at 4° C. The cell pellet was resuspended in an equal volume of 2× lysis buffer (100 mM Tris-HCl, 500 mM NaCl, 2 mM MgCl2, 20 mM 2-Mercaptoethanol, 2 mM imidazole and 10% glycerol, pH 8.0) supplemented with cOmplete ULTRA Tablets (Millipore sigma 6538282001). Cell suspension was added dropwise into liquid nitrogen in an ice bucket, and the resulting frozen yeast beads were ground with a few pellets of dry ice in a pre-chilled coffee grinder (CG-618-SHARDOR). The yeast frozen powder was thawed and cleared by centrifugation for 15 minutes at 4° C. at 15000 rpm (Beckman Coulter Avanti J-E, rotor JLA-16.25). The cleared lysate was applied to 1 mL of packed Ni-NTA (Qiagen) after its pH was adjusted to 8.5 by Tris base and incubated with rotation for 1 hour, followed by washing of the protein-bound resin in 100 mL of lysis buffer. The resin was resuspended in 5 mL of elution buffer (50 mM Tris-HCl, 250 mM NaCl, 1 mM MgCl2, 10 mM 2-Mercaptoethanol, 500 mM imidazole and 5% glycerol, pH 8.0). The resulting elution was tested for the presence of the protein by NuPAGE (Invitrogen) and eStain L1 Protein Staining System (GenScript). The protein was concentrated using an Amicon Ultra-15 Centrifugal Filter Unit (50 KDa NMWL, Millipore UFC905024) to 200 μL, and used for downstream analysis. For the in vitro cleavage assays, Y-PER Yeast Protein Extraction Reagent (ThermoFischer 78991) was used instead of the protein extraction process with coffee grinder.

### Images of Organisms

[1441] For micrographs and photographs, Spizellomyces punctatus (Koch) Barr (ATCC 48900) and Naegleria lovaniensis Steven et al. (ATCC 30569) were obtained from ATCC. Guillardia theta Hill et Wetherbee was obtained from Bigelow (CCMP327). These organisms were cultured following the provider's protocols. Mercenaria mercenaria was obtained from a fish market in Cambridge, MA.

### Small RNA Sequencing

[1442] Spizellomyces punctatus (Koch) Barr (ATCC 48900) was grown following the provider's protocol. The culture was spun down, and total RNA was extracted using a Direct-zol RNA kit (Zymo). Extracted RNA was treated with 10 units of DNase I (NEB) for 30 minutes at 37° C. to remove residual DNA and purified again with an RNA Clean & Concentrator-25 kit (Zymo). Ribosomal RNA was removed using a RiboMinus Transcriptome Isolation Kit, yeast (Thermo Fisher Scientific). The purified RiboMinus RNA was then treated with 20 units of T4 polynucleotide kinase (NEB) for 1 hour at 37° C., purified and treated with 20 units of 5′ RNA polyphosphatase (Lucigen) for 30 minutes at 37° C. and purified again. The purified RNA was used as input to an NEBNext Small RNA Library Prep for Illumina (NEB). Amplified libraries were gel extracted and sequenced on an Illumina NextSeq with Read1 42 cycles, Read2 42 cycles and Index1 6 cycles. Adapters were trimmed using CutAdapt v2.4 and mapped to loci of interest using Bowtie2. For RNP-RNAseq, Fanzor RNPs were purified from S. cerevisiae as described. One hundred μL concentrated RNP was used as input. The above protocol was followed without the RiboMinus Transcriptome Isolation Kit process.

### Fanzor RNP TAM Screen

[1443] Purified Fanzor RNP and 25 ng of TAM library plasmid were supplemented with MgCl₂, and the 10 μL reaction mixture (10 mM Tris-HCl, 50 mM NaCl, 5 mM MgCl₂, 2 mM 2-Mercaptoethanol and 1% glycerol, pH 8.0) was incubated at 37° C. for 4 hours, then quenched by adding 10 ug RNase A (Qiagen) and 8 units Proteinase K (NEB) each followed by a 15-minute incubation at room temperature. DNA was extracted by PCR purification and adaptors were ligated using an NEBNext Ultra II DNA Library Prep Kit for Illumina (NEB) using the NEBNext Adaptor for Illumina (NEB). Following adaptor ligation, cleaved products were amplified specifically using one primer specific to the TAM library backbone and one primer specific to the NEBNext adaptor with a 12-cycle PCR using NEBNext High Fidelity 2×PCR Master Mix (NEB) with an annealing temperature of 63° C., followed by a second 18-cycle round of PCR to further add the Illumina i5 adaptor. Amplified libraries were gel extracted and subject to single-end sequencing on an Illumina MiSeq with Read1 80 cycles, Index18 cycles and Index2 8 cycles. TAMs were extracted, and an enrichment score for each TAM was calculated by filtering for all TAMs present more than once and normalizing to the TAM frequency in the input library. A position weight matrix based on the enrichment score was generated and Weblogos (https://weblogo.berkeley.edu/logo.cgi) were visualized based on this position weight matrix using a custom script.

### In Vitro Cleavage Assays

[1444] Double-stranded DNA (dsDNA) substrates were produced by PCR amplification of pUC19 plasmids OR synthesized DNA fragments containing the target sites and the TAM sequences. Cy3 and Cy5-conjugated DNA oligonucleotides (IDT) were used as primers to generate the labeled dsDNA substrates. Single-stranded DNA (ssDNA) substrates were ordered as Cy3-conjugated oligonucleotides (IDT). Single-stranded RNA (ssRNA) substrates were in vitro transcribed by HiScribe T7 Quick High Yield RNA Synthesis Kit (NEB) and purified using an RNA Clean and Concentrator-5 kit (Zymo). They were further labeled with pCp-Cy5 (Jena Bioscience) on their 3′ end. For the 3′ end labeling, 50 pmol of ssRNA was incubated with 100 pmol of pCp-Cy5 and 50 U of T4 RNA ligase 1 (NEB) in the reaction buffer at 16° C. for 24 hours. Labeling reactions were purified using an RNA Clean and Concentrator-5 kit (Zymo). Through annealing of the ssRNA and its complement ssRNA, double-stranded RNA (dsRNA) substrates were prepared. Target cleavage assays were performed in a 10-μl reaction mixture containing 100 ng of substrate, 2 μg of protein in a final 1× reaction buffer of 25 mM Tris pH 8.0, 50 mM NaCl and 5 mM MgCl₂. Assays were allowed to proceed at 37° C. for 2 hours. Reactions were then treated with RNase A (Qiagen) and Proteinase K (NEB) and purified using a PCR cleanup kit (Qiagen). For RNA substrates, RNase A treatment was skipped. For screening metal ions, MgCl₂ was eliminated from the reaction buffer through Amicon Ultra-0.5 Centrifugal Filter Unit, and the indicated metal was added. Collateral cleavage assays were performed using 100 ng of unlabeled dsDNA substrate along with 100 ng of Cy5.5-labeled collateral ssDNA/dsDNA/ssRNA/dsRNA substrates at 10 μl reaction volume. Purified DNA and RNA substrates after the assays were resolved by gel electrophoresis on E-gel 2% (dsDNA substrates), 15% TBE-Urea polyacrylamide gels (Thermo Fisher Scientific) for ssDNA, dsRNA and ssRNA substrates.

### Mammalian Cell Culture and Transfection

[1445] All transfection experiments were performed in the HEK293FT cell line (Thermo Fisher, R70007) grown in Dulbecco's modified Eagle medium with high glucose, sodium pyruvate and GlutaMAX (Thermo Fisher, 35050061), additionally supplemented with 10% fetal bovine serum (VWR Seradigm, 8951_0-194). Transfections were performed with Lipofectamine 3000 (Thermo Fisher, L3000015) in 96-well plates unless otherwise noted. Cells were plated at approximately 2.0×10\hat{ }4 cells per well 16-20 hours before transfection to ensure 90% confluency at the time of transfection. For each well on the plate, transfection plasmids (100 ng in total) were combined with OptiMEM Reduced Serum Medium (Thermo Fisher, 31985062) to a total volume of 5 μl and mixed with 0.2 μl of P3000 reagent. Separately, 5 μl of OptiMEM was combined with 0.3 μl of Lipofectamine 3000 reagent. Plasmid and Lipofectamine solutions were then combined, incubated at room temperature for 10 minutes and pipetted onto cells.

### Human Genome Cleavage Assay

[1446] For human genome cleavage assays, 2.0×10\hat{ }4 of HEK293FT cells in 96-well plates were co-transfected with combinations of Fanzor expression plasmid (80 ng) and ωRNA expression plasmid (20 ng). After 3 days of incubation at 37° C., the supernatant was removed and cells were resuspended in 40 μL QuickExtract DNA Extraction Solution (Lucigen, QE09050) and cycled at 65° C. for 15 minutes, 68° C. for 15 minutes, then 95° C. for 10 minutes to lyse cells. Twp μL of lysate was used as the template for each 12.5 μl-PCR reaction. Target sites were amplified with NEBNext High-Fidelity 2×PCR Master Mix (NEB, M0541L) under the following thermal cycling conditions: 1 cycle, 98° C., 30 seconds; 15 cycles, 98° C., 10 seconds, 65° C., 20 seconds, 72° C., 30 seconds; 1 cycle, 72° C., 30 seconds; 4° C. hold. One μL of this first PCR product was used for the template for each 10-μl second PCR reaction: 1 cycle, 98° C., 30 seconds; 15 cycles, 98° C., 10 seconds, 63° C., 20 seconds, 72° C., 30 seconds; 1 cycle, 72° C., 30 seconds; 4° C. hold (total 30 cycles for first and second PCR reactions). Amplicons were sequenced using a MiSeq Reagent Kit v2, 300-cycle (Illumina, MS-102-2002). Indel efficiency was quantified using the established CRISPResso2 v2.0.20b pipeline³⁴.

### Preparation of the SpuFz1-ωRNA-Target DNA Ternary Complex

[1447] The yeast cell pellet was resuspended in a buffer containing 20 mM HEPES pH 7.5, 150 mM NaCl, 2 mM MgCl₂ and 4.5 mM TCEP supplemented with EDTA-Free Protease Inhibitor Cocktail (MedChem Express HY-K0010). The cell suspension was then added dropwise into liquid nitrogen in an ice bucket, and the resulting frozen beads were ground with a few pellets of dry ice in a pre-chilled coffee grinder (CG-618-SHARDOR). The frozen yeast powder was thawed and cleared by centrifugation for 35 minutes at 4° C. at 15000 rpm (Beckman coulter Avanti J-E, rotor JLA-16.25). The cleared lysate was applied to 3 mL of packed Amylose Resin (NEB), followed by washing of the protein-bound resin in 100 mL of buffer containing 20 mM HEPES pH 7.5, 150 mM NaCl, 2 mM MgCl₂ and 4.5 mM TCEP. The MBP-tagged SpuFz1-ωRNA RNP was then eluted with the same buffer supplemented with 10 mM Maltose (Sigma 6363-53-7) and concentrated using an Amicon Ultra-15 Centrifugal Filter Unit (50 KDa NMWL, Millipore UFC905024) to 400 μL. A 54-nt target DNA strand (TATTTGTAATTTGATTTCATAACCTATAGATATGCCCGGGTACCGAGCTCGAAT (SEQ ID NO: 4203)) and a 24-nt non-target DNA strand (ATTCGAGCTCGGTACCCGGGCATA (SEQ ID NO: 4204)) were purchased from GENEWIZ. For the reconstitution of the ternary complex, the purified RNP was mixed with the target DNA strand and non-target DNA strand at the molar ratio of 1:2:2 and incubated at 37° C. for 1 hour. The sample was then loaded on a Superose 6 Increase 10/300 column (Cytiva) equilibrated with a buffer containing 20 mM HEPES pH 7.5, 150 mM NaCl, 2 mM MgCl₂ and 4.5 mM TCEP. The eluted fractions of the ternary complex were pooled and concentrated for cryo-EM experiments.

### Cryo-EM Grid Preparation and Data Acquisition

[1448] Three μL of the purified SpuFz1-ωRNA-target DNA complex at around 3 mg ml⁻¹ was applied onto glow-discharged CryoMatrix® R1.2/1.3 300-mesh gold holey grids with amorphous alloy film (Zhenjiang Lehua Technology Co., Ltd). The grids were blotted for 3 seconds under 100% humidity at 4° C. and then vitrified by plunging into liquid ethane using a Vitrobot Mark IV (Thermo Fisher Scientific). The prepared grids were then transferred to a EF-Krios (Thermo Fisher Scientific) operating at 300 kV with a GatanK3 imaging system collecting at 105,000× nominal magnification. The calibrated pixel size of 0.4125 Å was used for processing. Movies were collected using Leginon 3.6³⁵ at a dose rate of 28.56 e−/Å2/s with a total exposure of 1.80 seconds, for an accumulated dose of 51.41 e−/Å2. Intermediate frames were recorded every 0.03 seconds for a total of 60 frames per micrograph. A total of 8,727 images were collected at a nominal defocus range of 0.5-2.6 μm.

### Image Processing and Structure Determination

[1449] Image processing was performed on CryoSPARC v4.2.0³⁶ and RELION 4.0³⁷. Image stacks were subjected to beam-induced motion correction using MotionCor2.0³⁸. Contrast transfer function (CTF) parameters for each non-dose-weighted micrograph were determined by Gctf 1.18³⁹. Automated particle selection yielded 3,455,057 particles and were extracted on a binned dataset with a pixel size of 3.3 Å and were subjected to reference-free 2D classification, producing 945,611 particles with well-defined averages. These particles were re-extracted with a pixel size of 0.825 Å and were subsequently subjected to Ab-initial reconstruction for three classes. The best subset showing clear structural features was subjected to heterogenous refinement for six rounds, producing a high-quality subset accounting for 501,142 particles. These particles were subsequently subjected to non-uniform refinement⁴⁰, which generated a map with an indicated global resolution of 2.7 Å at a Fourier shell correlation (FSC) of 0.143. DeepEMhancer⁴¹ was used for generating the sharpen map. The structure of the SpuFz1-ωRNA-target DNA ternary complex was determined using a model of SpuFz1 predicted by AlphaFold2^{42,43} and an ωRNA model predicted by RNAcomposer⁴⁴ as initial models. The models were docked into the cryo-EM density maps using ChimeraX 1.4⁴⁵, followed by iterative manual adjustment and rebuilding in ISOLDE 1.2⁴⁶ and Coot 0.8.9⁴⁷, against the cryo-EM electron density maps. Real space and reciprocal refinements were performed using PHENIX 1.18⁴⁸. The model statistics were validated using MolProbity 4.5⁴⁹. Structural figures were prepared in ChimeraX 1.4. and PyMOL (https://pymol.org/2/). The final refinement statistics are, provided in Table 19.

TABLE 19
Cryo-EM data collection, refinement and validation statistics

| | SpuFanzor-wRNA-target DNA |
|---|---|
| | (EMDB-40184) (PDB 8GKH) |
| Data collection and processing | |
| Magnification | 105,000 |
| Voltage (kV) | 300 |
| Electron exposure (e−/Å²) | 51.41 |
| Defocus range (μm) | −0.5 to −2.6 |
| Pixel size (Å) | 0.825 |
| Symmetry imposed | C1 |
| Initial particle images (no.) | 3,455,057 |
| Final particle images (no.) | 501,142 |
| Map resolution (Å) | 2.7 |
| FSC threshold | 0.143 |
| Map resolution range (Å) | 2.5-5.0 |
| Refinement | |
| Initial model used (PDB code) | AlphaFold Model |
| Model resolution (Å) | |
| Map sharpening method | DeepEMhancer |
| Model composition | |
| Non-hydrogen atoms | 7,550 |
| Protein residues | 600 |
| Nucleotide residues | 124 |
| Ligands | 3 |
| B factors (Å²) | |
| Protein | 106.43 |
| Nucleotide | 208.49 |
| Ligand | 59.29 |
| R.m.s. deviations | |
| Bond lengths (Å) | 0.002 |
| Bond angles (°) | 0.505 |
| Validation | 1.27 |
| MolProbity score | |
| Clashscore | 5.07 |
| Poor rotamers (%) | 0.00 |
| Ramachandran plot | |
| Favored (%) | 98.66 |
| Allowed (%) | 1.34 |
| Disallowed (%) | 0.00 |

### REFERENCES FOR EXAMPLE 15

[1450] 1. Hille, F. et al. The Biology of CRISPR-Cas: Backward and Forward. Cell 172, 1239-1259 (2018).
[1451] 2. Ozata, D. M., Gainetdinov, I., Zoch, A., O'Carroll, D. & Zamore, P. D. PIWI-interacting RNAs: small RNAs with big functions. Nat. Rev. Genet. 20, 89-108 (2019).
[1452] 3. Kiss, T. Small nucleolar RNAs: an abundant group of noncoding RNAs with diverse cellular functions. Cell 109, 145-148 (2002).
[1453] 4. Altae-Tran, H. et al. The widespread IS200/IS605 transposon family encodes diverse programmable RNA-guided endonucleases. Science 374, 57-65 (2021).
[1454] 5. Hirano, S. et al. Structure of the OMEGA nickase IsrB in complex with ωRNA and target DNA. Nature 610, 575-581 (2022).
[1455] 6. Karvelis, T. et al. Transposon-associated TnpB is a programmable RNA-guided DNA endonuclease. Nature 599, 692-696 (2021).
[1456] 7. Bao, W. & Jurka, J. Homologues of bacterial TnpB_IS605 are widespread in diverse eukaryotic transposable elements. Mob. DNA 4, 12 (2013).
[1457] 8. Nakagawa, R. et al. Cryo-EM structure of the transposon-associated TnpB enzyme. Nature 616, 390-397 (2023).
[1458] 9. Yamano, T. et al. Crystal Structure of Cpf1 in Complex with Guide RNA and Target DNA. Cell 165, 949-962 (2016).
[1459] 10. Swarts, D. C., van der Oost, J. & Jinek, M. Structural Basis for Guide RNA Processing and Seed-Dependent DNA Targeting by CRISPR-Cas12a. Mol. Cell 66, 221-233.e4 (2017).
[1460] 11. Sasnauskas, G. et al. TnpB structure reveals minimal functional core of Cas12 nuclease family. Nature 616, 384-389 (2023).
[1461] 12. Zetsche, B. et al. Cpf1 is a single RNA-guided endonuclease of a class 2 CRISPR-Cas system. Cell 163, 759-771 (2015).
[1462] 13. Wu, Z. et al. Programmed genome editing by a miniature CRISPR-Cas12f nuclease. Nat. Chem. Biol. 17, 1132-1138 (2021).
[1463] 14. Strecker, J. et al. Engineering of CRISPR-Cas12b for human genome editing. Nat. Commun. 10, 212 (2019).
[1464] 15. Meers, C. et al. Transposon-encoded nucleases use guide RNAs to selfishly bias their inheritance. bioRxiv (2023) doi:10.1101/2023.03.14.532601.
[1465] 16. Makarova, K. S. et al. Evolutionary classification of CRISPR-Cas systems: a burst of class 2 and derived variants. Nat. Rev. Microbiol. 18, 67-83 (2020).
[1466] 17. Schuler, G., Hu, C. & Ke, A. Structural basis for RNA-guided DNA cleavage by IscB-ωRNA and mechanistic comparison with Cas9. Science 376, 1476-1481 (2022).
[1467] 18. Kato, K. et al. Structure of the IscB-ωRNA ribonucleoprotein complex, the likely ancestor of CRISPR-Cas9. Nat. Commun. 13, 1-10 (2022).
[1468] 19. Swafford, A. J. M., Hussey, S. P. & Fritz-Laylin, L. K. High-efficiency electroporation of chytrid fungi. Sci. Rep. 10, 15145 (2020).
[1469] 20. Medina, E. M. et al. Genetic transformation of, a resource for studying chytrid biology and evolutionary cell biology. Elife 9, (2020).
[1470] 21. McGaw, C. et al. Engineered Cas12i2 is a versatile high-efficiency platform for therapeutic genome editing. Nat. Commun. 13, 2833 (2022).
[1471] 22. Kim, D. Y. et al. Efficient CRISPR editing with a hypercompact Cas12fl and engineered guide RNAs delivered by adeno-associated virus. Nat. Biotechnol. 40, 94-102 (2022).

### Example 16—Supplementary Data to Example 15

### Example 19

### Introduction

[1472] Fanzor (Fz) is a eukaryotic programmable ωRNA-guided endonuclease (Jiang et al. 2023; Saito et al. 2023). Fzs and the prokaryotic CRISPR-Cas12 systems evolved from distinct variants of TnpB, a widespread prokaryotic Obligate Mobile Element-guided Activity (OMEGA) system (Bao and Jurka 2013; Altae-Tran et al. 10/2021; Jiang et al. 2023; Saito et al. 2023; Yoon et al. 2023; Altae-Tran et al. 2023; Shmakov et al. 2015). Like Cas12, there is significant diversity in the Fz family. Fzs are mainly found in protostomia, algae, fungi, and unicellular eukaryotes and are grouped into two distinct families: Fz1 and Fz2. Fz2 exhibits strong structural similarities at the protein level to TnpB, whereas Fz1 is considerably larger, hinting at potentially unique functions and mechanisms (Saito et al. 2023).

[1473] To explore this diversity at the structural and functional level, Applicant resolved the cryo-EM structures of three Fz1 proteins from different species spanning two kingdoms of eukaryotes: Guillardia theta (GtFz1) (algae), Spizellomyces punctatus (SpuFz1) (fungus), and Parasitella parasitica (PpFz1) (mycoparasite). Fz1s were captured in various conformational states, creating a collection of 11 structures. These structures reveal both common and unique aspects of ωRNA binding and DNA recognition, offering insights into the diverse mechanisms by which Fz1 proteins achieve specificity and efficiency in their endonuclease activity. The examination of different conformational states sheds light on the activation and cleavage mechanisms of Fz1 proteins, elucidating the structural transitions that facilitate their function as RNA-guided endonucleases.

### Results

Structures of GtFz1, SpuFz1, and PpFz1 complexes

[1474] Applicant previously showed that GtFz1 and SpuFz1 have RNA-guided DNA cleavage activity in vitro, with transposon-associated motifs (TAMs) 5′-CATA-3′ and 5′-TTAA-3′, respectively (Saito et al. 2023). For PpFz1, Applicant conducted a TAM screen and identified a 5′-ATN-3′ TAM, confirming its ability to cleave DNA in vitro (see Methods). To investigate the structural diversity of Fzs, Applicant expressed the GtFz1, SpuFz1, and PpFz1 ribonucleoproteins (RNPs) in Saccharomyces cerevisiae, purified them and determined the structures (with and without target DNA) by single particle cryo-EM. Applicant determined the structures of the GtFz1-ωRNA binary complex and the GtFz1-ωRNA-target DNA ternary complex at resolutions of 4.7 Å and 3.0 Å, respectively. For SpuFz1, Applicant aimed to capture different R-loop binding states by using four different DNA substrates in which phosphorothioate modifications had been introduced, rendering them uncleavable: partial modification of the DNA target strand (TS), partial modification of the non-target strand (NTS), complete modification of the TS, and complete modification of the NTS. This approach allowed us to capture six SpuFz1 complex structures in different DNA binding states, with resolutions ranging from 2.9 Å to 3.4 Å. Applicant obtained density maps of the PpFz1-ωRNA-DNA complex in four states, with resolutions ranging from 3.2 Å to 3.5 Å.

[1475] The overall structures of the three Fz1 proteins show notable similarities, all featuring a bilobed architecture and accommodating the ωRNA and target DNA in comparable ways (FIG. 79A-79C), consistent with TnpB structures (Nakagawa et al. 2023; Sasnauskas et al. 2023). The REC lobe, encompassing the REC and WED domains, clamps down on the DNA TAM duplex. A large cleft is formed by the REC lobe and NUC lobe, which contains the RuvC nuclease and target nucleic acid binding (TNB; previously referred to as Nuc) domains. The RNA-DNA heteroduplex is accommodated by a positive trench deep within the cleft. The interface by which the protein interacts with the RNA is similar across all three Fz1s, suggesting a conserved RNA-guided DNA-targeting mechanism among different Fz1s (FIG. 79A-79C).

[1476] The majority of Fz1 proteins are between 600 and 700 amino acids (Saito et al. 2023) and have relatively conserved domain organization and structure (FIG. 79A-79C). A notable exception is PpFz1, which features an insertion of approximately 100 amino acids within its RuvC domain, which Applicant refers to as the Fanzor RuvC Insertion (FRI) domain (FIG. 79C and FIG. 80A). The structure of the PpFz1 ternary complex reveals that this insertion constitutes a small domain comprising three helices, three beta-sheets, and an extensive loop (FIG. 80A). Intriguingly, an unidentified density, resembling a small protein, was observed binding to the loop of the FRI domain. To identify this protein, Applicant extracted the density from the overall structure and conducted unbiased structural matching against the yeast proteome, encompassing 6,039 proteins. This analysis identified a match with a subset of cyclophilins (Cyps), a family of peptidyl-prolyl cis-trans isomerases with highly conserved structures (Wang and Heitman 2005). Mass spectrometry analysis of the PpFz1 ternary complex identified Cyp1, but not other yeast Cyp proteins. Based on this result, Applicant built the model of S. cerevisiae Cyp1 into the structure of the PpFz-ωRNA-DNA complex (FIG. 79C). The model shows that the active pocket of Cyp1 engages the loop in the FRI domain of PpFz1, with residues P614 and P616 from PpFz1 forming hydrophobic interactions with A99, F111, and F58 of Cyp1. Furthermore, residue K80 of Cyp1 forms a charged interaction with U26 of the ωRNA scaffold (FIG. 80C). Pull-down experiments with the PpFz1 FRI domain with 11 cyclophilin homologs from S. cerevisiae, P. parasitica, and Homo sapiens showed that PpFz1 binds to a range of cyclophilins across species but has some selectivity. Sequence alignment of the 11 cyclophilins reveals a highly conserved sequence, including the residues that interact with the FRI domain, suggesting that the FRI domain could bind to different homologs of cyclophilins.

ωRNA Structure and Interaction with Fz1

[1477] Fzs from different species have significantly different ωRNA lengths (Saito et al. 2023; Jiang et al. 2023; Yoon et al. 2023). For example, GtFz1 ωRNA is 150 nucleotides (nts), SpuFz1 ωRNA is 90 nts, and PpFz1 is 75 nts (Saito et al. 2023). Despite these substantial differences, however, all Fz1s exhibit a relatively uniform ωRNA binding interface, mainly comprising two parts. The first is the surface of the RuvC/TNB domains distant from the REC domain, and the second is the junction between the RuvC and WED domains (FIG. 80B) The ωRNA structures show that the first stem loop (SL1) of the GtFz1, SpuFz1, and PpFz1 ωRNAs consistently contains seven base pairs (FIG. 80C). Across all three Fz1 structures, SL1 adopts a similar conformation (FIG. 80B) and interacts with the same protein interface, the RuvC and TNB domains. This conservation implies that the first stem loop may play an important role in the function of Fz1 across different organisms. Interestingly, however, the orientation of the 5′ ends of ωRNAs differs across these three species. The 5′ end of the GtFz1 ωRNA points outward from the core of the complex, whereas those of the SpuFz1 and PpFz1 ωRNAs face towards a large cleft formed by the protein. This difference may be due to the smaller TNB domain of GtFz1, which does not provide stabilization for the 5′ end of the ωRNA.

[1478] In the scaffold region between SL1 and the 3′ end of the guide sequence, the three Fz1 ωRNAs display different structures (FIG. 80B-80C). The GtFz1 ωRNA structure in this region contains three stem loops, with the distal and loop regions of SL2 forming extensive interactions with SL4, folding together (FIG. 80B). However, SL3 does not interact with other parts of the ωRNA or the protein; its structure is distant from the core of the complex, and its loop and distal base pairs are disordered in the structure (FIG. 80B-80C). In the SpuFz1 and PpFz1 ωRNA structures, there is only one stem loop, SL2, between SL1 and the guide (FIG. 80B-80C). PpFz1 has the smallest known ωRNA scaffold, with only four base pairs in its ωRNA SL2 in the structure, similar to the shortest engineered SpuFz1 ωRNA structure (Saito et al., 2023). These results suggest the region beyond SL1 is not critical for Fz1 function and may not be constrained during evolution.

[1479] All three Fz1 complexes exhibit conserved structures at the junction of the ωRNA scaffold and guide. In each structure, the four beta-sheets of the WED domain position the first three nts of the guide sequence, while the fourth to eighth nts of the guide sequence are bound to the REC domain. This interaction mode between the protein and the RNA guide segment is conserved in TnpB (Nakagawa et al. 2023; Sasnauskas et al. 2023) and Cas12 family effectors including Cas12a (Yamano et al. 2016), Cas12b (Yang et al. 2016), Cas12c (Kurihara et al. 2022), Cas12e (Liu et al. 2019), Cas12i (Zhang et al. 2020), and Cas121 (A1-Shayeb et al. 2022), despite the diversity in the overall structures of the WED and REC domains, indicating this mode of recognition of the guide RNA may be a hallmark of TnpB and its derivative systems.

### Mechanism of Target DNA Recognition

[1480] The three Fz1s recognize target DNA similarly, reflected in the shared recognition of the TAM region, DNA unwinding mechanism, and heteroduplex recognition. Fz1s recognize the DNA TAM duplex through a combined effort of the WED and REC domains (FIG. 81A). A conserved arginine (R) residue, located on a loop of the REC domain, anchors into the groove of the DNA TAM duplex, providing non-base specific stability to the DNA (FIG. 81B). Applicant introduced an R85A mutation into GtFz1 and then performed a DNA cleavage assay, observing complete loss of activity, indicating this conserved R residue is critical for DNA binding. The sequence specificity of the TAM is determined by interaction with the DNA and the α4 of the REC domain and WED domain. Mutating the residues in GtFz1 that form interactions with TAM base groups, including S123A, H126A, Y130A, and Q278A, strongly reduced cleavage activity. Furthermore, GtFz1 showed no cleavage activity for target DNA variants in which each base of the 5′-TTAA-TAM was mutated, supporting our structural observations. Although the WED domain of all three Fz1s has conserved beta-sheets, the remaining parts of the WED domain structure differ substantially, including the helix providing interactions with the TAM. This portion consists of 73, 29, and 28 amino acids in GtFz1, SpuFz1, and PpFz1, respectively, and lacks sequence conservation, resulting in clear differences in the interaction patterns with the TAM sequence. This variable region of the WED domain may evolve to enable recognition of diverse DNA sequences.

[1481] Following target DNA recognition and binding, the DNA duplex is unwound for Cas9 and Cas12a (Shi et al. 2022) (Swarts 2019; Swarts and Jinek 02/2019; Jeon et al. 2018). In Fz1s, the loop region between the WED and RuvC domains interacts with the region between the TAM duplex and the guide/DNA heteroduplex (FIG. 81C). Specifically, residue F392 in GtFz1, Y345 in SpuFz1, or R448 in PpFz1 forms a stacked interaction with the last base of the target strand (TS) in the TAM duplex (FIG. 81C). This interaction stabilizes the unwound DNA state and allows the TS to base pair with the guide. Mutating F392 to alanine in GtFz1 significantly reduced DNA cleavage activity. To test the tolerance of Fz1 to mismatches between the guide sequence and target DNA, Applicant performed cleavage assays with target DNA variants containing single mutations from dA(−1) to dG(−19), finding that only the 3^{rd} bp mismatch significantly reduced activity. Correspondingly, the structure of GtFz1 shows that the 3^{rd} guide/DNA bp is stabilized by α4 of the REC domain by forming interactions with residues T137 and N141.

[1482] The guide/DNA heteroduplex is 9-bp long in GtFz1 and 15-bp long in both SpuFz1 and PpFz1 (FIG. 81A). To understand this difference between GtFz1 and SpuFz1/PpFz1, Applicant aligned the GtFz1 and SpuFz1 proteins and discovered that alpha helices 5 and 6 of the SpuFz1^{RuvC} domain interact with 6 bps at its end, a region where GtFz1 and SpuFz1 show conformational differences. Specifically, the two helices in GtFz1 are shifted towards the interior of the complex, creating steric hindrance for the last few bps of the DNA. This suggests that the conformation of α5 and α6 at the end of the RuvC domain governs the number of bp of heteroduplex the protein can accommodate. This may explain why SpuFz1 preferentially binds to longer heteroduplexes than GtFz. Applicant observed a small fraction of the SpuFz1 particles (1.8%) with extended heteroduplex density, a variant Applicant classifys as State II. The density from State II allowed us to build an additional model with a total of 20 bps of heteroduplex. However, the additional 5 bp did not interact significantly with the protein and were exposed and flexible in solvent. This indicates that although the Fz1 ωRNA maturation process can produce a guide region up to 20-bp long, the lack of protection by the protein beyond 15 bp is limited, preventing the formation of a stable 20-bp heteroduplex.

### GtFz1 Has a Non-Canonical Catalytic Triad

[1483] Fz, TnpB, and Cas12a all use the same catalytic core in the RuvC domain to perform DNA double-strand cleavage (FIG. 82A). In vitro cleavage experiments showed that GtFz1 operates at a similar optimal temperature as SpuFz1 for DNA cleavage (Saito et al. 2023). However, GtFz1 specifically requires Mg²⁺ ions to cleave DNA, whereas SpuFz1 demonstrates a broader dependence on divalent cations for cleavage activity, functioning in the presence of Mg²⁺, Ca²⁺, Zn²⁺, and Mn²⁺ (Saito et al. 2023). In Fz, TnpB, and Cas12a, the RuvC core structure is primarily composed of five beta folds and one alpha helix. In this classic catalytic site pattern, the catalytic site consists of three residues: an aspartic acid (D) located on the second beta sheet, a glutamic acid (E) on the loop region between the fifth beta sheet and the TNB domain, and another D on the alpha helix (FIG. 82B). In the structure of GtFz1, however, Applicant found that the third catalytic residue of GtFz1 is not D but asparagine (N) (FIG. 82C). Even though this substitution does not provide a positive charge, as is provided by the D residue, it still maintains the cleavage activity of GtFz1. Notably, introducing a comparable mutation into SpuFz1 (D606N) led to even higher cleavage activity compared to wildtype (FIG. 82D). These results indicate that GtFz1 uses a non-canonical RuvC catalytic triad for DNA cleavage.

### Conformational Dynamics of GtFz1 in DNA Cleavage

[1484] In Cas12a, the recognition of the TAM sequence and local DNA strand separation allows hybridization with the guide segment of the ωRNA, thereby forming an R-loop structure (Paul and Montoya 2020-2). This process involves an RNA molecule infiltrating a dsDNA molecule, pairing with one strand while displacing the other, resulting in a three-stranded configuration. This R-loop creation is crucial for RNA-guided nucleases to precisely recognize and cleave target DNA (Pacesa et al. 2022; Cofsky et al. 2020).

[1485] To elucidate the conformational changes before and after R-loop formation in Fz1, Applicant compared the binary and ternary complexes of GtFz1. Although the overarching structures of GtFz1 and its ωRNA are similar in these complexes (FIG. 83A), there are clear conformational changes in the REC domain and the RNA guide region. Following DNA binding, the REC domain undergoes a shift of approximately 4.5 Å away from the core complex. The guide region of the ωRNA, which is stabilized by both the WED and REC domains before and after DNA binding, shifts toward the REC domain by roughly 3 Å upon base pairing with the TS (FIG. 83B). The unsharpened map of the GtFz1-ωRNA-DNA ternary complex reveals partial weak density of the NTS, spanning from the TAM duplex to the peripheries of the REC domain and RuvC (FIG. 83C). These areas are characterized by positive surface charges, suggesting their role as interaction hubs for the NTS. Morphologically, GtFz1 exhibits a well-defined cleft structure essential for binding and stabilizing the RNA/DNA heteroduplex, with the cleft's periphery allocated for binding the single-stranded NTS, thus securing the R-loop structure (FIG. 83D).

[1486] Applicant previously found that GtFz1 and SpuFz1 give rise to different patterns of cleavage products, with SpuFz1 consistently generating 5′ overhangs and GtFz1 generating more heterogeneous products (Saito et al. 2023). To investigate if this difference in the cleavage products arises from the flexibility of the active domain of GtFz1, Applicant conducted a 3D Variability Analysis (3DVA). Applicant found significant dynamics in SL1 of the ωRNA as well as the RuvC and TNB domains of GtFz1 (FIG. 83C-83D). This is in contrast to the stability observed in the corresponding region of SpuFz1, supporting the finding that the cleavage site of GtFz1 is indeed flexible. Applicant also evaluated the conformational dynamics of SL1 and the RuvC/TNB domains (FIG. 83E).

### SpuFz1^{RuvC} Domain Demonstrates Double-Stranded DNA Binding Capabilities

[1487] To further explore the R-loop formation mechanisms in SpuFz1, Applicant conducted in vitro cleavage assays and cryo-EM analysis using target DNA substrates (ds) with various phosphorothioate modifications on the TS and NTS. With these modified substrates, Applicant observed that even when the cleavage site (Saito et al. 2023) and adjacent nucleotides on either both or one strand were blocked, cleavage of unblocked sites still occurred. For the TS, cleavage was observed at the first unmodified nucleotide on the 5′ end, whereas for the NTS, cleavage occurred at the first unmodified nucleotide on both the 5′ and 3′ ends adjacent to the blocked segment. This cleavage pattern correlates with the structure where the 3′ end of the TS is protected by duplex formation with the guide for 15 bps, whereas the NTS remains flexible.

[1488] To elucidate the structural basis for target cleavage of SpuFz1, Applicant reconstituted the ternary complexes with these different 54 bp target DNA substrates. Through cryo-EM single-particle analysis, Applicant unexpectedly discovered density consistent with double-stranded DNA accommodated by the RuvC domain, when either the TS or the NTS were partially modified. (FIG. 84A-84B). In all states, the 15-bp guide/DNA heteroduplex was resolved. With partial modification to the TS, a 20-bp DNA duplex was observed anchored within the large cleft formed by the RuvC, TNB, and REC domains, which are rich in positively charged residues (FIGS. 84A and 84C-84D). The DNA is bent by 137° around a putative scissile phosphate (or phosphorothioate), which is coordinated by two Mg2+ ions and the catalytic residues (D383, E541, and D606) of the RuvC domain. Non-continuous cryo-EM density between the putative scissile phosphate and the 3′ OH of the 5′ nucleotide suggests this may represent a post-cleavage state before product release. Of the 54 bp DNA substrate used for complex reconstitution, the cryoEM density unambiguously showed 12 bp for the TAM duplex and upstream bases and 15 nt of the TS within the guide/DNA heteroduplex. This leaves unassigned only 12 bp of further upstream DNA, and 15 bp downstream of the guide/DNA heteroduplex. Therefore, the >20 continuous basepairs visible for the RuvC-bound DNA likely correspond to a second DNA molecule.

[1489] Interestingly, in the structure with the partially modified NTS, the density for the strand nearest the RuvC active site terminates at the scissile phosphate, suggesting that the strand is cleaved and that the 5′ nucleotides are no longer stably bound (FIG. 84B). The complementary strand shows that two nucleotides, initially base-paired with nucleotides near the catalytic site, are now disassociated and forming interactions with residues Q152 and N159 of the REC domain and R514 of the RuvC domain (FIG. 84E). Correspondingly, the α5 of the REC domain shifts by approximately 2 Å (FIG. 84F), indicating its flexibility to accommodate various dsDNA conformations and implying that the REC domain facilitates the unwinding of dsDNA bound to the RuvC domain. Applicant named these states of SpuFz1 before and after nicked dsDNA product release and unwinding as State III (observed when the NTS was partially modified) and State IV (observed when the TS was partially modified), respectively. This evidence that dsDNA binds to the RuvC domain does not parallel findings in the structures of TnpB (Sasnauskas et al. 2023; Nakagawa et al. 2023) and most of Cas12s (Yamano et al. 2016)(Yang et al. 2016)(Kurihara et al. 2022)(Liu et al. 2019)(Zhang et al. 2020)(Al-Shayeb et al. 2022), suggesting a distinct mechanism of R-loop formation in Fz1 relative to TnpB and Cas12.

### The RuvC Lid Regulates R-Loop Structure and DNA Cleavage in SpuFz1

[1490] Given the capability of the SpuFz1 RuvC domain to cleave at positions other than the target site when the target site is chemically blocked, Applicant performed additional cleavage assays with DNA substrates in which either the TS or NTS was fully modified. These modifications included blocking both strands (ds4), only the TS (ds5), or only the NTS (ds6). The assays demonstrated that DNA could not be cleaved when both strands were modified, and cleavage was possible on one strand when its complementary strand was modified. Further cryo-EM analysis yielded two distinct conformational maps for the SpuFz1-ds5 and SpuFz1-ds6 samples, which Applicant classified as State V and State VI (FIG. 84G). These states showed that, despite complete modifications preventing cleavage on either the TS or NTS, Applicant could only observe partial DNA substrate density near the RuvC domain. This observation indicates a dynamic R-loop binding mode by SpuFz1.

[1491] To gain a more complete picture of the step-wise conformational changes of SpuFz1 cleavage, Applicant examined the cryo-EM particles for variants with altered conformations. In the ds2 sample (TS partially modified), a small fraction (2.8% of particles with well-defined structural features from the SpuFz1-ds2 sample) exhibited only an 8-bp heteroduplex. Here, the “lid” region, a loop spanning residues 506-522 of the RuvC domain, adopts a short a helix in an upward orientation (FIG. 84G). This helix interacts with another a helix (al) of the RuvC domain. No clear density indicative of DNA binding to the catalytic site was observed. Thus, Applicant classified this state as State I, as it is presumably the initial DNA-binding conformation.

[1492] Without being bound by theory, Applicant proposes that state V may represent the next downstream conformation that Applicant captured (FIG. 84G). In state V, the lid forms a finger loop in the downward orientation, sandwiched by the guide/DNA duplex and the downstream DNA duplex (FIG. 84G-84J). The downward conformation of the lid forms interactions with the backbone of the dsDNA (FIG. 84J). The lid releases the interactions with al of the RuvC domain, forming a small cleft between the lid and TNB domain. Thus, it appears that the formation of the 15-bp guide/DNA heteroduplex shifts the lid from an upward orientation to a downward orientation, creating space for the downstream target DNA to bind to the RuvC domain and reach the catalytic site (FIG. 84I). To gain additional detail into the formation of this small cleft, Applicant overlaid states I and V (FIG. 84K) and examined the changes in the ωRNA. The visible terminal nucleotide of the 5′ end (U5) of the ωRNA is shifted by 6.5 Å in state V due to the formation of the 15-bp guide/DNA heteroduplex. The base group of U5 forms a stacked interaction with W569. Meanwhile, the bp of the second visible terminal nucleotide, C6 and G20 at the SL1 of the ωRNA, together with the short helix of the TNB domain, were shifted by about 1 Å (FIG. 84K). These movements together with the flipped orientation of the lid, create the small cleft that stabilizes the DNA at the catalytic site. The comparison also shows that the REC domain accommodates downstream DNA binding by shifting the structure by about 3 Å, with charged interactions formed between the REC domain and the backbone of the DNA. In state VI, the density of the lid appears exceptionally weak (FIG. 84G), indicating a diminished role in facilitating NTS single-strand loading. These states emphasize the subtle yet significant roles of the lid in modulating DNA binding and cleavage.

### The Dynamics of ωRNA 5′ Regulation in Heteroduplex-Driven Activation in PpFz1

[1493] Multiple conformational states of PpFz1 were also obtained; four states were identified, with the guide/DNA heteroduplex 3-bp long in State I, 8-bp long in State II, 15-bp long in both State III and State IV (FIG. 85A-85D). In State I, the lid of PpFz1 remains in an upward orientation, and no DNA is bound to the RuvC domain. The ωRNA guide segment (C50-C58) encircles the lid and contacts the REC domain (FIG. 85A), which differs from the guide conformation observed in GtFz1 in its inactive state (binary complex) (FIG. 83A-83B). In State II, the lid shifts to a downward orientation due to the formation of an 8-bp guide/DNA duplex (FIG. 85E), although there is still no distinct density of DNA binding to the RuvC domain. This suggests that this 8-bp state represents an intermediate, which may not be favorable for DNA loading and cleavage (FIG. 85B). In State III, a 15-bp guide/DNA heteroduplex is formed, and a dsDNA duplex is loaded onto the RuvC domain (FIG. 85C), indicating an active state. In State IV, the loaded DNA is cleaved, and a ssDNA product binds to the small cleft formed by the RuvC lid and TNB domain, with the end nucleotide contacting the catalytic site (FIG. 85C).

[1494] Structural comparisons of the inactive state (I), intermediate state (II), and active state (III) reveal that the REC domain shifts to widen the large cleft by 8 Å from State I to State II, and by an additional 2 Å from state II to state III (FIG. 85F). The 5′ nucleotide A5 and the short helix of the TNB domain are pushed outward by the lid's conformational change and by the formation of the guide/DNA duplex, moving 5.7 Å between State I and State II, and an additional 2.3 Å between State II and State III (FIG. 85G). The conformational changes in the RuvC/TNB domains create a small cleft, in which the DNA substrate is stabilized and gains access to the catalytic site. Concurrently, the outward shift of the REC domain enables the downstream dsDNA to be stabilized within the large cleft of PpFz1. These structures capture the process of target DNA cleavage and illuminate how the large and small clefts formed by the RuvC, REC, and TNB domains, along with the lid, regulate DNA binding, unzipping, and cutting. The diverse structural states demonstrate the critical role of the lid region of the RuvC domain in DNA binding and strand switching.

[1495] Previous research on Cas12s and TnpB has revealed the lid region of these proteins is structurally dynamic (Yamano et al. 2016; Nakagawa et al. 2023). Our current study illustrates how the lid region influences the activation of Fz1 by examining structures in various states. To delve deeper into the role of the lid in Cas12 family proteins, Applicant analyzed the predicted Local Distance Difference Test (pLDDT) scores and lid lengths across various Cas12, Fz, and TnpB AlphaFold (AF) models. The findings show that, irrespective of the protein, the lid region consistently exhibits lower pLDDT values compared to the adjacent alpha-helices and beta-sheets (FIG. 85H), suggesting a propensity for multiple conformations. The predicted lid lengths for these three protein families are notably similar, with median lengths ranging from 20 to 22 amino acids (FIG. 85I). Applicant also compared the active states of GtFz1, SpuFz1, and PpFz1 (FIG. 85J). In the available Cas12 protein structures, the lid regions of the RuvC domain are strategically situated between the guide/DNA heteroduplex and the catalytic site, implying that a common mechanism may underlie protein activation across these families. The utilization of the lid as a regulatory “switch” could represent a conserved evolutionary feature, possibly derived from TnpB.

### Discussion

[1496] The structures of the three Fz1 complexes are largely similar, sharing a common protein domain architecture and shared folding patterns in key ωRNA regions. This uniformity underlies their analogous mechanisms for DNA recognition and cleavage. However, there are distinct structural features among these three proteins, highlighting the diversity within the Fz protein family. A unique aspect of GtFz1 is the presence of asparagine (N) in the catalytic triad, contrasting with the canonical aspartic acid (D) at the same position in SpuFz1, mutation of which to N enhances in vitro activity. This observation provides new insights into the catalytic dynamics of the RuvC domain and suggests strategies for engineering other RuvC endonucleases to enhance their activity.

[1497] The Fanzor RuvC Insertion (FRI) domain in PpFz1 is another distinct feature. Applicant only found the FRI domain in Parasitella parasitica and Rhizopus, a genus of the Mucorales order. Interestingly, Parasitella are mycoparasites of other fungi, including those of the Mucorales order (Schultze et al. 2005). The presence of the FRI domain in these organisms suggests Fz1 may play a role in this parasitic relationship, possibly by facilitating transposon-mediated gene transfer. The FRI domain mediates binding to a cyclophilin (Figure S2E). The structure of the PpFz1-cyclophilin complex hints at the significant roles cyclophilins may play in regulating Fz function across various biological processes, such as splicing, meiosis, plant pathology, pathogen infection, and sporulation (Wang and Heitman 2005; Nigro, Pompilio, and Capogrossi 2013; Rajiv and Davis 2018).

[1498] Although Fz and Cas12 share a common ancestor with TnpB, our structural analyses delineate clear distinctions in the DNA recognition and cleavage mechanisms among these families. Fz1 proteins utilize a unique loop insertion strategy to bridge the gap between the TAM and guide sequences, initiating DNA unwinding. This contrasts with the strategies employed by Cas12 and TnpB proteins, where Cas12a uses a short helix-loop-helix (HLH) for DNA unwinding (Stella, Alcón, and Montoya 2017), and TnpB relies on the intrinsic propensity of DNA to unwind spontaneously (Nakagawa et al. 2023). Moreover, our structures elucidate unique capabilities of Fz1 in stabilizing R-loop structures. Unlike the more expansive REC domain in Cas12a, which stabilizes a roughly 20-bp heteroduplex (Yamano et al. 2016), the smaller REC domain in Fz1 can stabilize at most a 15-bp heteroduplex. The REC domain is smaller yet in TnpB. The additional REC domain structure in Fz1 does not significantly contribute to heteroduplex stabilization but rather to the R-loop stabilization of target DNA loaded onto the RuvC domain. This dynamic shift from an inactive to active state in the REC domain is crucial for stabilizing the single-stranded NTS in GtFz1 and the double-stranded DNA in SpuFz1 and PpFz1. Together, these insights advance our understanding of the mechanisms used by RNA-guided endonucleases and provide a solid foundation for engineering Fanzor for gene editing technologies.

### Star Methods

### Materials Availability

[1499] Plasmids generated in this Example will be deposited in Addgene upon publication. All other reagents are available upon request.

### Data and Code Availability

[1500] The atomic coordinates will be deposited in the Protein Data Bank. The EM map will be deposited in the Electron Microscopy Data Bank.

[1501] This script is used for the unbiased matching of the yeast proteome to the target electron microscopy density map:

```
#!/bin/bash
# Load necessary modules or set the environment
export PATH=/path/to/situs/bin:$PATH
# Assuming EM density map file is fixed and stored in a variable
EM_MAP=“path/to/your/em_map.mrc” # Specify your EM map file path
# Directory containing PDB files
PDB_DIR=“path/to/pdb_files” # Specify your directory of PDB files
# Output directory
OUTPUT_DIR=“path/to/output” # Specify your desired output directory
mkdir −p ${OUTPUT_DIR}
# Count the total number of PDB files and initialize processed file count
TotalFiles=$(ls −1 ${PDB_DIR}/* .pdb | wc −l)
FilesProcessed=0
for pdb_file in ${PDB_DIR}/* .pdb; do
  FilesProcessed=$((FilesProcessed+1))
  pdb_base=$(basename “$pdb_file” .pdb)
  mkdir −p ${OUTPUT_DIR}/${pdb_base}
  # Run colores for docking and direct output to the created directory
  colores ${EM_MAP} ${pdb_file} −res 5.0 −nprocs 10 −out
${OUTPUT_DIR}/${pdb_base}/
  # Update the status for each processed file
  echo “Files processed: $FilesProcessed / $TotalFiles. Output at
${OUTPUT_DIR}/${pdb_base}/”
done
echo “Script completed. Total files processed: $TotalFiles”
```

### Experimental Model and Study Participant Details

### Cell Culture

[1502] S. cerevisiae BCY123 strain (a kind gift from the K. Nagai laboratory, MRC Laboratory of Molecular Biology, Cambridge) was cultured in YM4 LMB media (0.67% yeast nitrogen base without amino acids, 0.5% casamino acids, 0.002% adenine, and 0.002% tryptophan) supplemented with 2% raffinose for growth at 30° C. with shaking at 180 rpm until an optical density at a wavelength of 600 nm of 1.0 was reached. Protein expression was then induced in the presence of 2% galactose.

### Method Details

### Cloning

[1503] Plasmids used in this study were cloned using general cloning methodologies including Gibson assembly with NEBuilder HiFi DNA Assembly Master Mix (New England Biolabs, E2621L) and KLD Enzyme Mix (New England Biolabs, M0554S). The Stbl3 E. coli strain (Thermo Fisher, C737303) was used for DNA cloning. Fanzor1 (Fz1) ORF and predicted 3′ inverted repeat (IR) regions were cloned under a GAL-GAPDH hybrid promoter in pRS426-URA3. A 10×His-maltose-binding protein (MBP) tag was inserted between the start and second codons of Fz1. The sequences of cloned constructs were confirmed by whole-plasmid sequencing following Tn5 tagmentation after mini-prep of plasmids (Schmid-Burgk et al. 2020) with QIAprep reagents (QIAGEN, 27106).

### Fz1 RNP Expression and Purification

[1504] Fz1 orthologs were expressed in S. cerevisiae and MBP-affinity purified. The expression vector was transformed into a yeast BCY123 strain (Galej et al. 2013) and selected on SD-URA plates. Colonies on half of the petri dish were scraped and transferred into a 50-mL starter culture of YM4 LMB media supplemented with 2% raffinose for 17 hours, which was used to inoculate 1 L of YM4 LMB media supplemented with 2% raffinose and 100 μg/ml ampicillin for growth at 30° C. and shaking at 180 rpm until an OD600 of 1.0 was reached. Protein expression was induced in the presence of 2% galactose for 16 hours. The cells were harvested by centrifugation for 10 minutes at 4° C. at 4000 rpm (Beckman Coulter Avanti J-E, rotor JLA8.100). The cell pellet was resuspended in 500 ml of MQ water to remove residual media and pelleted again by centrifugation for 10 minutes at 4° C. at 4000 rpm. The pellet was kept frozen at −80° C. for further usage.

[1505] All purification steps were performed at 4° C. The yeast cell pellet was resuspended in a buffer containing 20 mM HEPES pH 7.5, 150 mM NaCl, 2 mM MgCl₂, and 4.5 mM TCEP supplemented with EDTA-Free Protease Inhibitor Cocktail (MedChem Express HY-K0010). The cell suspension was then added dropwise into liquid nitrogen in an ice bucket, and the resulting frozen beads were ground with a few pellets of dry ice in a pre-chilled coffee grinder (CG-618-SHARDOR). The frozen yeast powder was thawed and cleared by centrifugation for 35 minutes at 4° C. at 15000 rpm (Beckman Coulter Avanti J-E, rotor JLA-16.25). The cleared lysate was applied to 3 mL of packed Amylose Resin (NEB) for 3 hours, followed by washing with 100 mL of buffer containing 20 mM HEPES pH 7.5, 150 mM NaCl, 2 mM MgCl₂, and 4.5 mM TCEP. The MBP-tagged Fz-ωRNA RNPs were then eluted with the same buffer supplemented with 10 mM Maltose (Sigma-Aldrich, M9171) and concentrated using an Amicon Ultra-15 Centrifugal Filter Unit (50 KDa NMWL, Millipore UFC905024). The resulting elution was tested for the presence of the protein by NuPAGE (Invitrogen) and eStain L1 Protein Staining System (GenScript). For testing the presence of RNA, 1 μl Proteinase K (NEB) was mixed with 15 μl eluted RNP for 15 minutes and evaluated by 15% TBE-Urea polyacrylamide gels (Thermo Fisher Scientific).

### Fanzor RNP TAM Screen

[1506] Purified Fz1 RNP and 25 ng of TAM library plasmid were supplemented with MgCl₂, and the 10 μL reaction mixture (10 mM Tris-HCl, 50 mM NaCl, 5 mM MgCl₂, 2 mM 2-Mercaptoethanol and 1% glycerol, pH 8.0) was incubated at 37° C. for 4 hours, then quenched by adding 10 μg RNase A (Qiagen) and 8 units Proteinase K (NEB) each followed by a 15-minute incubation at room temperature. DNA was extracted by PCR purification and adaptors were ligated using an NEBNext Ultra II DNA Library Prep Kit for Illumina (NEB) using the NEBNext Adaptor for Illumina (NEB). Following adaptor ligation, cleaved products were amplified specifically using one primer specific to the TAM library backbone and one primer specific to the NEBNext adaptor with a 12-cycle PCR using NEBNext High Fidelity 2×PCR Master Mix (NEB) with an annealing temperature of 63° C., followed by a second 18-cycle round of PCR to further add the Illumina i5 adaptor. Amplified libraries were gel extracted and subject to single-end sequencing on an Illumina MiSeq with Read1 80 cycles, Index1 8 cycles and Index2 8 cycles. TAMs were extracted, and an enrichment score for each TAM was calculated by filtering for all TAMs present more than once and normalizing to the TAM frequency in the input library. A position weight matrix based on the enrichment score was generated, and Weblogos (Crooks et al. 2004) (https://weblogo.berkeley.edu/logo.cgi) were visualized based on this position weight matrix using a previously published custom script (Saito et al. 2023). A 5′-ATN-3′ TAM for PpFz1 was confirmed.

### In Vitro Cleavage Assays

[1507] Double-stranded DNA (dsDNA) substrates were produced by PCR amplification of plasmids or synthesized DNA fragments containing the target sites and the TAM sequences. Target cleavage assays were performed in a 10 μl reaction mixture containing 50 ng of substrate, 2 μg of protein in a final 1× reaction buffer of 20 mM HEPES pH 7.5, 150 mM NaCl, and 5 mM MgCl₂. Assays were allowed to proceed at 37° C. for 1 hour. Reactions were then treated with RNase A (Qiagen) and Proteinase K (NEB) and purified using a PCR cleanup kit (Qiagen). For screening metal ions, MgCl₂ was eliminated from the reaction buffer through Amicon Ultra-0.5 Centrifugal Filter Unit, and the indicated metal was added. Purified DNA substrates after the assays were resolved by gel electrophoresis on E-gel 2% (dsDNA substrates), 15% TBE-Urea polyacrylamide gels (Thermo Fisher Scientific).

### Preparation of the Fz1-ωRNA-Target DNA Ternary Complexes

[1508] For GtFz1-ωRNA-target DNA ternary complex, two samples were prepared with different guide sequences (Sample 1: native guide, Sample 2: PSP1 guide). The purified GtFz1 RNP1 with native guide and GtFz1 RNP2 with PSP1 guide were loaded on a Superose 6 Increase 10/300 column (Cytiva) equilibrated with a buffer containing 20 mM HEPES pH 7.5, 150 mM NaCl, 2 mM MgCl₂, and 4.5 mM TCEP. The fractions of RNP complexes were pooled and concentrated to 3 mg/ml using Amicon Ultra-15 Centrifugal Filter Unit (50 KDa NMWL, Millipore UFC905024) for ternary complex formation. For ternary complex reconstitution of sample 1, the GtFz RNP1 (native guide) was mixed with a 48-nt DNA target strand (GtFz_ntv_TS) and an 18-nt non-target strand (GtFz_ntv_NTS) at a molar ratio of 1:2:2 and incubated at 37° C. for 30 min. For ternary complex reconstitution of sample 2, the GtFz1 RNP2 (PSP1 guide) was mixed with an 81-nt DNA target strand (GtFz_PSP1_TS) and an 81-nt non-target strand (GtFz_PSP1_NTS) at a molar ratio of 1:2:2 and incubated at 37° C. for 1 hour. The mixture of GtFz1 ternary complexes was applied onto glow-discharged UltrAuFoil R 1.2/1.3, 300 mesh, Gold (Quantifoil). The grids were blotted for 3 seconds under 100% humidity at 4° C. and then vitrified by plunging into liquid ethane using a Vitrobot Mark IV (Thermo Fisher Scientific).

[1509] For SpuFz1-ωRNA-target DNA ternary complexes, the SpuFz1 RNP was concentrated using an Amicon Ultra-15 Centrifugal Filter Unit (50 KDa NMWL, Millipore UFC905024) to 5 mg/ml and mixed with 4 different dsDNA substrates, resulting in 4 ternary complex samples. The 4 different dsDNA substrates share the same TAM and guide sequence but had different lengths and phosphorothioate modifications. For SpuFz1-ds2 complex, the DNA target stand was partially modified and the non-target strand was unmodified. For SpuFz1-ds3 complex, the DNA where target strand was unmodified and the non-target strand was partially modified. For SpuFz1-ds5, the DNA target strand was fully modified and the non-target strand was unmodified. For SpuFz1-ds6, the DNA target strand was unmodified and the non-target strand was fully modified. The dsDNA substrates were annealed and mixed with SpuFz1 RNP at 37° C. for 1 hour. The mixture of SpuFz1 ternary complexes was applied onto glow-discharged CryoMatrix® R1.2/1.3 300-mesh gold holey grids with amorphous alloy film (Zhenjiang Lehua Technology Co., Ltd). The grids were blotted for 3 seconds under 100% humidity at 4° C. and then vitrified by plunging into liquid ethane using a Vitrobot Mark IV (Thermo Fisher Scientific).

[1510] For PpFz1-ωRNA-target DNA ternary complexes, purified RNP was mixed with TEV protease at 4° C. for 6 hours. The mixture was incubated with 1 ml TALON resin (Takara Clontech) at 4° C. for 3 h in a buffer containing 20 mM HEPES, pH 7.5, 150 mM NaCl, 5 mM MgCl₂, 4.5 mM TCEP, and 15 mM Imidazole. The resin was washed with 20 mL of a buffer containing 20 mM HEPES, pH 7.5, 150 mM NaCl, 5 mM MgCl₂, 4.5 mM TCEP, and 20 mM Imidazole. The flow-though was collected and concentrated using an Amicon Ultra-15 Centrifugal Filter Unit (50 KDa NMWL, Millipore UFC905024) to 500 ul. The sample was mixed with a 57-nt DNA target stand (PpFz_TS) and a complementary 57-nt non-target strand (PpFz_NTS) at 37° C. for 1 hour. The mixture of PpFz1 ternary complexes was applied onto glow-discharged CryoMatrix® R1.2/1.3 300-mesh gold holey grids with amorphous alloy film (Zhenjiang Lehua Technology Co., Ltd). The grids were blotted for 3 seconds under 100% humidity at 4° C. and then vitrified by plunging into liquid ethane using a Vitrobot Mark IV (Thermo Fisher Scientific).

### Cryo-EM Data Collection

[1511] For the GtFz1-ωRNA-target DNA ternary complex sample 1, the prepared grids were transferred to Thermo Scientific Titan Krios G3i cryo TEM using a K3 direct detector (Gatan) operated in super-resolution mode with 2-fold binning, and an energy filter with slit width of 20 eV. Micrographs were collected automatically using EPU in AFIS mode, yielding 12,579 movies at 130,000× magnification with a real pixel size of 0.663 Å, with defocus ranging from −0.8 μm to −2.2 μm with an exposure time of 1.01 second, fractionated into 40 frames and a flux of 25.8 e−/pix/s giving a total fluence per micrograph of 59.28 e−/Å2. For the GtFz1-ωRNA-target DNA ternary complex sample 2, the prepared grids were transferred to the EF-Krios (Thermo Fisher Scientific) operating at 300 kV with a GatanK3 imaging system collecting at 105,000× nominal magnification. The calibrated pixel size of 0.4125 Å was used for processing. Movies were collected using Leginon 3.6 (Suloway et al. 2005) at a dose rate of 32.32 e−/Å2/s with a total exposure of 1.80 seconds, for an accumulated dose of 58.18 e−/Å2. Intermediate frames were recorded every 0.03 seconds for a total of 60 frames per micrograph. A total of 6,284 images were collected at a nominal defocus range of 0.5-2.5 μm.

[1512] For the SpuFz1-ωRNA-target DNA ternary complex samples, the prepared grids were transferred to the EF-Krios (Thermo Fisher Scientific) operating at 300 kV with a GatanK3 imaging system collecting at 105,000× nominal magnification. The calibrated pixel size of 0.4125 Å was used for processing. Movies were collected using Leginon 3.6 (Suloway et al. 2005). Data were collected at a dose rate of 29.17 e−/Å2/s for SpuFz1-ds2 complex, 28.33 e−/Å2/s for SpuFz1-ds3 complex, 26.67 e−/Å2/s for SpuFz1-ds5 complex, and 26.67 e−/Å2/s for SpuFz1-ds6 complex with a total exposure of 1.80 seconds, resulting an accumulated dose of 52.51 e−/Å2 for SpuFz1-ds2 complex, 51.0 e−/Å2 for SpuFz1-ds3 complex, 48.0 e−/Å2 for SpuFz1-ds5 complex, and 48.0 e−/Å2 for SpuFz1-ds6 complex. Intermediate frames were recorded every 0.03 seconds for a total of 60 frames per micrograph. A total of 19,873 images (SpuFz1-ds2), 3,070 images (SpuFz1-ds3), 5,628 images (SpuFz1-ds5), and 6,464 images (SpuFz1-ds6) were collected at a nominal defocus range of 0.5-2.5 μm.

[1513] For the PpFz1-ωRNA-target DNA ternary complex, the prepared grids were transferred to the EF-Krios (Thermo Fisher Scientific) operating at 300 kV with a GatanK3 imaging system collecting at 105,000× nominal magnification. The calibrated pixel size of 0.4125 Å was used for processing. Movies were collected using Leginon 3.6 (Suloway et al. 2005) at a dose rate of 26.92 e−/Å2/s with a total exposure of 1.80 seconds, for an accumulated dose of 48.47 e−/Å2. Intermediate frames were recorded every 0.03 seconds for a total of 60 frames per micrograph. A total of 7,678 images were collected at a nominal defocus range of 0.5-2.5 μm.

### Cryo-EM Data Processing

[1514] Image processing was performed on CryoSPARC v4.2.0 (Punjani et al. 2017) and RELION 4.0 (Scheres 2012). Image stacks were subjected to beam-induced motion correction using MotionCor2.0 (Zheng et al. 2017). Contrast transfer function (CTF) parameters for each non-dose-weighted micrograph were determined by CTFFIND4 (Rohou and Grigorieff 2015). On-the-fly particle picking was done by Warp (Tegunov and Cramer 2019).

[1515] For GtFz1 Sample 1. automated particle picking yielded 1,279,545 particles, which were extracted on a binned dataset with a pixel size of 1.326 Å and were subjected to reference-free 2D classification and 3 rounds of heterogeneous refinement, producing 468,892 particles with well-defined structural features of a ternary complex. These particles were re-extracted with a pixel size of 0.663 Å and subjected to non-uniform refinement (Punjani, Zhang, and Fleet 2020), which generated a map with an indicated global resolution of 3.28 Å at a Fourier shell correlation (FSC) of 0.143. The particles were subjected to 3D classification, a subset with 10,507 particles showing binary complex features. These particles were then subjected to non-uniform refinement, generating a map with an indicated global resolution of 4.70 Å at a FSC of 0.143.

[1516] For GtFz1 Sample 2, automated particle picking yielded 1,455,905 particles, which were extracted on a binned dataset with a pixel size of 2.475 Å and were subjected to reference-free 2D classification and 8 rounds of heterogeneous refinement, producing 328,609 particles with well-defined structural features of a ternary complex. These particles were re-extracted with a pixel size of 0.825 Å and subjected to non-uniform refinement (Punjani, Zhang, and Fleet 2020), which generated a map with an indicated global resolution of 3.00 Å at a Fourier shell correlation (FSC) of 0.143. The unsharpened map shows DNA non-target strand bound to the REC and RuvC domains compared to the ternary complex of GtFz1 sample 1. DeepEMhancer (Sanchez-Garcia et al. 2021) was used for generating the sharpened map.

[1517] For SpuFz1-ds2 complex, automated particle selection yielded 7,851,258 particles, which were extracted on a binned dataset with a pixel size of 1.65 Å and were subjected to reference-free 2D classification and 5 rounds of heterogeneous refinement, producing 1,729,361 particles with well-defined structural features. These particles were re-extracted with a pixel size of 0.825 Å and were subsequently subjected to an additional 2 rounds of heterogeneous refinement and 1 round of 3D classification. A subset with 201,468 particles was subjected to an additional round of 3D classification, resulting in a subset with 47,576 particles that showed an 8-bp heteroduplex formed. This was then subjected to non-uniform refinement (Punjani, Zhang, and Fleet 2020), which generated a map with an indicated global resolution of 3.29 Å at a Fourier shell correlation (FSC) of 0.143. We defined this map as SpuFz1 state I. DeepEMhancer (Sanchez-Garcia et al. 2021) was used to generate the sharpened map. Another subset with 171,210 particles was subjected to an additional round of 3D classification, resulting in a subset with 31,906 particles that showed 20-bp heteroduplex density. This subset was then subjected to non-uniform refinement, which generated a map with an indicated global resolution of 3.26 Å at a Fourier shell correlation (FSC) of 0.143. We defined this map as SpuFz1 state II. The unsharpened map of state II was used to visualize the extended heteroduplex density. Another subset with 193,966 particles showing clear structural features of dsDNA loaded onto the RuvC domain was subjected non-uniform refinement, which generated a map with an indicated global resolution of 2.88 Å at a Fourier shell correlation (FSC) of 0.143. We defined this map as SpuFz1 state III. DeepEMhancer was used to generate the sharpened map.

[1518] For SpuFz1-ds3, automated particle picking yielded 1,243,815 particles, which were extracted with a pixel size of 0.825 Å and were subjected to reference-free 2D classification and 6 rounds of heterogeneous refinement and 3D classification, producing 129,301 particles with well-defined structural features. These particles were subsequently subjected to 3D classification and non-uniform refinement, producing a class with 34,628 particles showing better density, which generated a map with an indicated global resolution of 3.27 Å at a Fourier shell correlation (FSC) of 0.143. We defined this map as SpuFz1 state IV.

[1519] For SpuFz1-ds5 sample, automated particle picking yielded 1,240,493 particles, which were extracted on a binned dataset with a pixel size of 2.475 Å and were subjected to reference-free 2D classification and heterogeneous refinement, producing 558,533 particles with well-defined structural features. These particles were re-extracted with a pixel size of 0.825 Å and were subsequently subjected to additional heterogeneous refinement for improving the orientation issue. A subset with 245,331 was subjected to non-uniform refinement, which generated a map with an indicated global resolution of 3.22 Å at a Fourier shell correlation (FSC) of 0.143. We defined this map as SpuFz1 state V.

[1520] For SpuFz1-ds6 sample, automated particle picking by Warp yielded 851,391 particles, which were extracted with a pixel size of 0.825 Å and were subjected to reference-free 2D classification and 3 rounds of heterogeneous refinement, producing 227,222 particles with well-defined structural features. These particles were subsequently subjected to non-uniform refinement, which generated a map with an indicated global resolution of 3.41 Å at a Fourier shell correlation (FSC) of 0.143. This map we defined as SpuFz1 state VI. DeepEMhancer was used to generate the sharpened map.

[1521] For the PpFz1-ωRNA-target DNA ternary complex, automated particle selection yielded 3,535,752 particles, which were extracted with a pixel size of 0.825 Å and were subjected to reference-free 2D classification, Ab-initial reconstruction, and 9 rounds of heterogeneous refinement, producing 88,338 particles with well-defined structural features. These particles were subsequently subjected to 3D classification, with 4 maps with distinct conformations, which we defined as PpFz1 state I to state IV. For each one, non-uniform refinement was conducted, resulting in a map of state I with 15,797 particles with an indicated global resolution of 3.47 Å, a map of state II with 14,604 particles with an indicated global resolution of 3.52 Å, a map of state III with 18,003 particles with an indicated global resolution of 3.20 Å, and a map of state IV with 16,430 particles with an indicated global resolution of 3.15 Å.

### Model Building

[1522] For the structures of the GtFz1 complexes and PpFz1 complexes, protein models predicted by AlphaFold2 (Jumper et al. 2021; Mirdita et al. 2022) and an ωRNA model generated by RNAcomposer (Antczak et al. 2016) were used as initial models. For SpuFz1 complexes, the model of the SpuFz1-ωRNA-target DNA ternary complex (PDB: 8GKH) was used as the initial model. For the complexes with DNA substrates loaded onto the RuvC domain and undetermined DNA sequences, complementary poly A and poly T DNA sequences were used for model building for analysis. The models were docked into the cryo-EM density maps using ChimeraX 1.7 (Pettersen et al. 2021), followed by iterative manual adjustment and rebuilding in ISOLDE (Croll 2018) and Coot 0.8.9 (Emsley and Cowtan 2004), against the cryo-EM electron density maps. Real space and reciprocal refinements were performed using PHENIX 1.18 (Adams et al. 2010). The model statistics were validated using MolProbity 4.5 (V. B. Chen et al. 2010). Structural figures were prepared in ChineraX 1.7, and PyMOL (https://pymol.org/2/). The final refinement statistics were calculated.

### Unbiased Matching of Density Map to Models

[1523] The unbiased matching of density maps to protein models was performed using a modified method as described previously (Z. Chen et al. 2023). Briefly, to identify the density associated with the FRI domain in the PpFz1-ωRNA-target DNA ternary complex, the target density was extracted using UCSF ChimeraX 1.7. The PDB library of the yeast proteome, containing 6,039 proteins, was downloaded from the AlphaFold2 database (Jumper et al. 2021). The unbiased matching was conducted using the COLORES program (part of the Situs package; see Data and Code Availability section in the STAR Methods) (W. Wriggers, Milligan, and McCammon 1999; Willy Wriggers 2012). The matching was scored and ranked based on cross-correlation scores, and the top 50 hits were individually inspected alongside the target densities in UCSF ChimeraX.

### Pull-Down Experiments of Cyclophilins

[1524] To test the binding between the Fanzor RuvC Insertion (FRI) domain of PpFz1 and cyclophilins, eleven cyclophilin genes, including four homologs from Saccharomyces cerevisiae (ScCyp1, ScCyp2, ScCyp3, and ScCyp5), four homologs from Parasitella parasitica (PpCyp1, PpCyp2, PpCyp3, and PpCyp4), and three homologs from humans (hCypA, hCypF, and hCypH), were cloned with a N-terminal hexahistidine (His)-tag into multiple cloning site 1 (MCS1) of pETDuet-1 plasmid and a truncated version of the FRI domain was cloned into MCS2 with a N-terminal MBP tag. The expression plasmids of His-tagged cyclophilins and MBP-tagged FRI domain were transformed into E. coli Rosetta 2 competent cells (Novagen) and cultured at 37° C. in Terrific Broth supplemented with 100 μg/mL ampicillin and 34 μg/mL chloramphenicol. When the OD600 reached 1.8, the protein expression was induced by the addition of 1 mM IPTG (Gold Biotechnology) and the E. coli cells were then allowed to grow further at 21° C. overnight. The cells were harvested and resuspended in buffer A (50 mM Tris-HCl, pH 8.0, 150 mM NaCl, 15% [v/v]glycerol) supplemented with EDTA-free cOmplete protease inhibitor (Roche). The cells were lysed using a LM20 microfluidizer device (Microfluidics), and the cleared lysate was bound to Amylose Resin (New England Biolabs). The resin was washed with buffer A then eluted with buffer B (50 mM Tris-HCl, pH 8.0, 150 mM NaCl, 10 mM imidazole, 15% [v/v]glycerol) containing 40 mM maltose. The proteins were next bound to HisPur Ni-NTA magnetic beads (Thermo Fisher Scientific). The resin was washed with buffer B then eluted with buffer B supplemented with 500 mM imidazole. The resulting elution was analyzed by NuPAGE (Invitrogen) and eStain L1 Protein Staining System (GenScript).

### REFERENCES FOR EXAMPLE 19

[1525] Adams, Paul D., Pavel V. Afonine, Gábor Bunkóczi, Vincent B. Chen, Ian W. Davis, Nathaniel Echols, Jeffrey J. Headd, et al. 2010. “PHENIX: A Comprehensive Python-Based System for Macromolecular Structure Solution.” Acta Crystallographica. Section D, Biological Crystallography 66 (Pt 2): 213-21.
[1526] Al-Shayeb, Basem, Petr Skopintsev, Katarzyna M. Soczek, Elizabeth C. Stahl, Zheng Li, Evan Groover, Dylan Smock, et al. 2022. “Diverse Virus-Encoded CRISPR-Cas Systems Include Streamlined Genome Editors.” Cell 185 (24): 4574-86.e16.
[1527] Altae-Tran, Han, Soumya Kannan, F. Esra Demircioglu, Rachel Oshiro, Suchita P. Nety, Luke J. McKay, Mensur Dlakić, et al. 10/2021. “The Widespread IS200/IS605 Transposon Family Encodes Diverse Programmable RNA-Guided Endonucleases.” Science 374 (6563): 57-65.
[1528] Altae-Tran, Han, Sergey A. Shmakov, Kira S. Makarova, Yuri I. Wolf, Soumya Kannan, Feng Zhang, and Eugene V. Koonin. 2023. “Diversity, Evolution, and Classification of the RNA-Guided Nucleases TnpB and Cas12.” Proceedings of the National Academy of Sciences of the United States of America 120 (48): e2308224120.
[1529] Antczak, Maciej, Mariusz Popenda, Tomasz Zok, Joanna Sarzynska, Tomasz Ratajczak, Katarzyna Tomczyk, Ryszard W. Adamiak, and Marta Szachniuk. 2016. “New Functionality of RNAComposer: An Application to Shape the Axis of miR160 Precursor Structure.” Acta Biochimica Polonica 63 (4): 737-44.
[1530] Bao, Weidong, and Jerzy Jurka. 2013. “Homologues of Bacterial TnpB_IS605 Are Widespread in Diverse Eukaryotic Transposable Elements.” Mobile DNA 4 (1): 12.
[1531] Chen, Vincent B., W. Bryan Arendall 3rd, Jeffrey J. Headd, Daniel A. Keedy, Robert M. Immormino, Gary J. Kapral, Laura W. Murray, Jane S. Richardson, and David C. Richardson. 2010. “MolProbity: All-Atom Structure Validation for Macromolecular Crystallography.” Acta Crystallographica. Section D, Biological Crystallography 66 (Pt 1): 12-21.
[1532] Chen, Zhen, Momoko Shiozaki, Kelsey M. Haas, Will M. Skinner, Shumei Zhao, Caiying Guo, Benjamin J. Polacco, et al. 2023. “De Novo Protein Identification in Mammalian Sperm Using in Situ Cryoelectron Tomography and AlphaFold2 Docking.” Cell 186 (23): 5041-53.e19.
[1533] Cofsky, Joshua C., Deepti Karandur, Carolyn J. Huang, Isaac P. Witte, John Kuriyan, and Jennifer A. Doudna. 2020. “CRISPR-Cas12a Exploits R-Loop Asymmetry to Form Double-Strand Breaks.” Edited by Cynthia Wolberger, Scott Bailey, Ailong Ke, and Malcolm F. White. eLife 9 (June): e55143.
[1534] Croll, Tristan Ian. 2018. “ISOLDE: A Physically Realistic Environment for Model Building into Low-Resolution Electron-Density Maps.” Acta Crystallographica. Section D, Structural Biology 74 (Pt 6): 519-30.
[1535] Crooks, Gavin E., Gary Hon, John-Marc Chandonia, and Steven E. Brenner. 2004. “WebLogo: A Sequence Logo Generator.” Genome Research 14 (6): 1188-90.
[1536] Emsley, Paul, and Kevin Cowtan. 2004. “Coot: Model-Building Tools for Molecular Graphics.” Acta Crystallographica. Section D, Biological Crystallography 60 (Pt 12 Pt 1): 2126-32.
[1537] Galej, Wojciech P., Chris Oubridge, Andrew J. Newman, and Kiyoshi Nagai. 2013. “Crystal Structure of Prp8 Reveals Active Site Cavity of the Spliceosome.” Nature 493 (7434): 638-43.
[1538] Jeon, Yongmoon, You Hee Choi, Yunsu Jang, Jihyeon Yu, Jiyoung Goo, Gyejun Lee, You Kyeong Jeong, et al. 2018. “Direct Observation of DNA Target Searching and Cleavage by CRISPR-Cas12a.” Nature Communications 9 (1): 2777.
[1539] Jiang, Kaiyi, Justin Lim, Samantha Sgrizzi, Michael Trinh, Alisan Kayabolen, Natalya Yutin, Weidong Bao, et al. 2023. “Programmable RNA-Guided DNA Endonucleases Are Widespread in Eukaryotes and Their Viruses.” Science Advances 9 (39): eadk0171.
[1540] Jumper, John, Richard Evans, Alexander Pritzel, Tim Green, Michael Figurnov, Olaf Ronneberger, Kathryn Tunyasuvunakool, et al. 2021. “Highly Accurate Protein Structure Prediction with AlphaFold.” Nature 596 (7873): 583-89.
[1541] Kurihara, Nina, Ryoya Nakagawa, Hisato Hirano, Sae Okazaki, Atsuhiro Tomita, Kan Kobayashi, Tsukasa Kusakizako, et al. 2022. “Structure of the Type V-C CRISPR-Cas Effector Enzyme.” Molecular Cell 82 (10): 1865-77.e4.
[1542] Liu, Jun-Jie, Natalia Orlova, Benjamin L. Oakes, Enbo Ma, Hannah B. Spinner, Katherine L. M. Baney, Jonathan Chuck, et al. 2019. “Author Correction: CasX Enzymes Comprise a Distinct Family of RNA-Guided Genome Editors.” Nature 568 (7752): E8-10.
[1543] Mirdita, Milot, Konstantin Schtitze, Yoshitaka Moriwaki, Lim Heo, Sergey Ovchinnikov, and Martin Steinegger. 2022. “ColabFold: Making Protein Folding Accessible to All.” Nature Methods 19 (6): 679-82.
[1544] Nakagawa, Ryoya, Hisato Hirano, Satoshi N. Omura, Suchita Nety, Soumya Kannan, Han Altae-Tran, Xiao Yao, et al. 2023. “Cryo-EM Structure of the Transposon-Associated TnpB Enzyme.” Nature 616 (7956): 390-97.
[1545] Nigro, P., G. Pompilio, and M. C. Capogrossi. 2013. “Cyclophilin A: A Key Player for Human Disease.” Cell Death & Disease 4 (10): e888.
[1546] Pacesa, Martin, Luuk Loeff, Irma Querques, Lena M. Muckenfuss, Marta Sawicka, and Martin Jinek. 2022. “R-Loop Formation and Conformational Activation Mechanisms of Cas9.” Nature 609 (7925): 191-96.
[1547] Paul, Bijoya, and Guillermo Montoya. 2020-2. “CRISPR-Cas12a: Functional Overview and Applications.” Biomedical Journal 43 (1): 8-17.
[1548] Pettersen, Eric F., Thomas D. Goddard, Conrad C. Huang, Elaine C. Meng, Gregory S. Couch, Tristan I. Croll, John H. Morris, and Thomas E. Ferrin. 2021. “UCSF ChimeraX: Structure Visualization for Researchers, Educators, and Developers.” Protein Science: A Publication of the Protein Society 30 (1): 70-82.
[1549] Punjani, Ali, John L. Rubinstein, David J. Fleet, and Marcus A. Brubaker. 2017. “cryoSPARC: Algorithms for Rapid Unsupervised Cryo-EM Structure Determination.” Nature Methods 14 (3): 290-96.
[1550] Punjani, Ali, Haowei Zhang, and David J. Fleet. 2020. “Non-Uniform Refinement: Adaptive Regularization Improves Single-Particle Cryo-EM Reconstruction.” Nature Methods 17 (12): 1214-21.
[1551] Rajiv, Caroline, and Tara L. Davis. 2018. “Structural and Functional Insights into Human Nuclear Cyclophilins.” Biomolecules 8 (4). https://doi.org/10.3390/biom8040161.
[1552] Rohou, Alexis, and Nikolaus Grigorieff. 2015. “CTFFIND4: Fast and Accurate Defocus Estimation from Electron Micrographs.” Journal of Structural Biology 192 (2): 216-21.
[1553] Saito, Makoto, Peiyu Xu, Guilhem Faure, Samantha Maguire, Soumya Kannan, Han Altae-Tran, Sam Vo, Anan Desimone, Rhiannon K. Macrae, and Feng Zhang. 2023. “Fanzor Is a Eukaryotic Programmable RNA-Guided Endonuclease.” Nature 620 (7974): 660-68.
[1554] Sanchez-Garcia, Ruben, Josue Gomez-Blanco, Ana Cuervo, Jose Maria Carazo, Carlos Oscar S. Sorzano, and Javier Vargas. 2021. “DeepEMhancer: A Deep Learning Solution for Cryo-EM Volume Post-Processing.” Communications Biology 4 (1): 874.
[1555] Sasnauskas, Giedrius, Giedre Tamulaitiene, Gytis Druteika, Arturo Carabias, Arunas Silanskas, Darius Kazlauskas, Ceslovas Venclovas, Guillermo Montoya, Tautvydas Karvelis, and Virginijus Siksnys. 2023. “TnpB Structure Reveals Minimal Functional Core of Cas12 Nuclease Family.” Nature 616 (7956): 384-89.
[1556] Scheres, Sjors H. W. 2012. “RELION: Implementation of a Bayesian Approach to Cryo-EM Structure Determination.” Journal of Structural Biology 180 (3): 519-30.
[1557] Schmid-Burgk, Jonathan L., Linyi Gao, David Li, Zachary Gardner, Jonathan Strecker, Blake Lash, and Feng Zhang. 2020. “Highly Parallel Profiling of Cas9 Variant Specificity.” Molecular Cell 78 (4): 794-800.e8.
[1558] Schultze, Kornelia, Christine Schimek, Johannes Wöstemeyer, and Anke Burmester. 2005. “Sexuality and Parasitism Share Common Regulatory Pathways in the Fungus Parasitella Parasitica.” Gene 348 (March): 33-44.
[1559] Shi, Ya-Jing, Min Duan, Jun-Mei Ding, Fan-Qi Wang, Li-Li Bi, Cai-Xiang Zhang, Yi-Zhou Zhang, et al. 2022. “DNA Topology Regulates PAM-Cas9 Interaction and DNA Unwinding to Enable near-PAMless Cleavage by Thermophilic Cas9.” Molecular Cell 82 (21): 4160-75.e6.
[1560] Shmakov, Sergey, Omar O. Abudayyeh, Kira S. Makarova, Yuri I. Wolf, Jonathan S. Gootenberg, Ekaterina Semenova, Leonid Minakhin, et al. 2015. “Discovery and Functional Characterization of Diverse Class 2 CRISPR-Cas Systems.” Molecular Cell 60 (3): 385-97.
[1561] Stella, Stefano, Pablo Alcón, and Guillermo Montoya. 2017. “Structure of the Cpf1 Endonuclease R-Loop Complex after Target DNA Cleavage.” Nature 546 (7659): 559-63.
[1562] Suloway, Christian, James Pulokas, Denis Fellmann, Anchi Cheng, Francisco Guerra, Joel Quispe, Scott Stagg, Clinton S. Potter, and Bridget Carragher. 2005. “Automated Molecular Microscopy: The New Leginon System.” Journal of Structural Biology 151 (1): 41-60.
[1563] Swarts, Daan C. 2019. “Making the Cut(s): How Cas12a Cleaves Target and Non-Target DNA.” Biochemical Society Transactions 47 (5): 1499-1510.
[1564] Swarts, Daan C., and Martin Jinek. 02/2019. “Mechanistic Insights into the Cis- and Trans-Acting DNase Activities of Cas12a.” Molecular Cell 73 (3): 589-600.e4.
[1565] Tegunov, Dimitry, and Patrick Cramer. 2019. “Real-Time Cryo-Electron Microscopy Data Preprocessing with Warp.” Nature Methods 16 (11): 1146-52.
[1566] Wang, Ping, and Joseph Heitman. 2005. “The Cyclophilins.” Genome Biology 6 (7): 1-6.
[1567] Wriggers, Willy. 2012. “Conventions and Workflows for Using Situs.” Acta Crystallographica. Section D, Biological Crystallography 68 (Pt 4): 344-51.
[1568] Wriggers, W., R. A. Milligan, and J. A. McCammon. 1999. “Situs: A Package for Docking Crystal Structures into Low-Resolution Maps from Electron Microscopy.” Journal of Structural Biology 125 (2-3): 185-95.
[1569] Yamano, Takashi, Hiroshi Nishimasu, Bernd Zetsche, Hisato Hirano, Ian M. Slaymaker, Yinqing Li, Iana Fedorova, et al. 2016. “Crystal Structure of Cpf1 in Complex with Guide RNA and Target DNA.” Cell 165 (4): 949-62.
[1570] Yang, Hui, Pu Gao, Kanagalaghatta R. Rajashankar, and Dinshaw J. Patel. 2016. “PAM-Dependent Target DNA Recognition and Cleavage by C2c1 CRISPR-Cas Endonuclease.” Cell 167 (7): 1814-28.e12.
[1571] Yoon, Peter H., Petr Skopintsev, Honglue Shi, Linxing Chen, Benjamin A. Adler, Muntathar Al-Shimary, Rory J. Craig, et al. 2023. “Eukaryotic RNA-Guided Endonucleases Evolved from a Unique Clade of Bacterial Enzymes.” Nucleic Acids Research 51(22): 12414-27.
[1572] Zhang, Heng, Zhuang Li, Renjian Xiao, and Leifu Chang. 2020. “Mechanisms for Target Recognition and Cleavage by the Cas12i RNA-Guided Endonuclease.” Nature Structural & Molecular Biology 27 (11): 1069-76.
[1573] Zheng, Shawn Q., Eugene Palovcak, Jean-Paul Armache, Kliment A. Verba, Yifan Cheng, and David A. Agard. 2017. “MotionCor2: Anisotropic Correction of Beam-Induced Motion for Improved Cryo-Electron Microscopy.” Nature Methods 14 (4): 331-32.

[1574] Various modifications and variations of the described methods, pharmaceutical compositions, and kits of the invention will be apparent to those skilled in the art without departing from the scope and spirit of the invention. Although the invention has been described in connection with specific embodiments, it will be understood that it is capable of further modifications and that the invention as claimed should not be unduly limited to such specific embodiments. Indeed, various modifications of the described modes for carrying out the invention that are obvious to those skilled in the art are intended to be within the scope of the invention. This application is intended to cover any variations, uses, or adaptations of the invention following, in general, the principles of the invention and including such departures from the present disclosure come within known customary practice within the art to which the invention pertains and may be applied to the essential features herein before set forth.

[1575] Further attributes, features, and embodiments of the present invention can be understood by reference to the following numbered clauses of the disclosed invention. Reference to disclosure in any of the preceding clauses is applicable to any preceding numbered clause and to any combination of any number of preceding clause, as recognized by appropriate antecedent disclosure in any combination of preceding clause(s) that can be made. The following numbered clauses are provided:

[1576] Clause 1. A non-naturally occurring, engineered composition comprising a) a Fanzor polypeptide comprising a Ruv-C nuclease domain, the Ruv-C nuclease domain optionally comprising Ruv-CI, Ruv-CII, and Ruv-CIII subdomains, and b) an ωRNA component molecule comprising a scaffold and a reprogrammable spacer sequence, ωRNA component molecule capable of forming a complex with the Fanzor polypeptide and directing the Fanzor polypeptide to a target polynucleotide.

[1577] Clause 2. The composition of clause 1, wherein the Fanzor polypeptide further comprises a REC domain, a bridge helix domain, or both.

[1578] Clause 3. The composition of any one of clauses 1-2, wherein the Fanzor polypeptide comprises a non-native REC domain, a non-native WED domain, a non-native Ruv-C domain, a non-native NUC domain, or any combination thereof.

[1579] Clause 4. The composition of any one of clauses 1-3, wherein the Fanzor polypeptide comprises about 125 to about 1800 amino acids, optionally wherein the Fanzor polypeptide is about 400 to about 700 amino acids.

[1580] Clause 5. The composition of any one of clauses 1-4, wherein the reprogrammable spacer sequence comprises a spacer of 10 nucleotides to 50 nucleotides in length.

[1581] Clause 6. The composition of any one of clauses 1-5, wherein the ωRNA component molecule comprises a scaffold of about 20 to 200 nucleotides in length.

[1582] Clause 7. The composition of any one of clauses 1-6, wherein the Fanzor complex binds a target adjacent motif (TAM) sequence 5′ and/or 3′ of the target polynucleotide.

[1583] Clause 8. The composition of any one of clauses 1-7, wherein the target polynucleotide is DNA, optionally wherein the target polynucleotide is double stranded DNA.

[1584] Clause 9. The composition of any one of clauses 1-8, further comprising a homologous recombination donor template comprising a donor sequence for insertion into a target polynucleotide.

[1585] Clause 10. The composition of any one of clauses 1-9, further comprising a functional domain associated with the Fanzor polypeptide.

[1586] Clause 11. The composition of clause 10, wherein the functional domain is a transposase, an integrase, a nucleobase deaminase, a reverse transcriptase, a recombinase, an integrase, a topoisomerase, a retrotransposon, phosphatase, polymerase, a ligase, a helitron, a helicase, a methylase, a demethylase, a translation activator, a translation repressor, a transcription activator, a transcription repressor, a transcription release factor, a chromatin modifier, a histone modifier, an acetylase, a deacetylase, a reverse transcriptase, a nuclease.

[1587] Clause 12. The composition of any one of clauses 1-11, wherein the Fanzor polypeptide is operatively coupled to one or more nuclear localization signal polypeptides at a C-terminus, an N-terminus, or both of the Fanzor polypeptide.

[1588] Clause 13. The composition of any one of clauses 1-12, wherein the Fanzor polypeptide comprises one or more amino acid mutations as compared to a wild type, whereby the one or more amino acid mutations increase binding and/or interaction with a target DNA and/or an ωRNA component molecule, and/or increase Fanzor activity.

[1589] Clause 14. The composition of any one of clauses 1-13, wherein the Fanzor polypeptide comprises one or more mutations of one or more neutral and/or negatively charged amino acids to one or more positively charged amino acids, optionally wherein the one or more mutations is in a WED domain, REC domain, RuvC domain, NUC domain or any combination thereof, and optionally wherein one or more of the one or more mutations are in positions that correspond to a positively charged channel formed by the WED domain, REC domain, and RuvC domain when active and/or interacts with an RNA-DNA heteroduplex formed by the ωRNA component molecule and a target DNA.

[1590] Clause 15. The composition of any one of clauses 13-14, wherein the one or more amino acid mutations are made in and/or in effective proximity to a DNA interaction region of the Fanzor polypeptide.

[1591] Clause 16. The composition of any one of clauses 13-15, wherein the one or more amino acid mutations comprise one or more mutations of FIG. 10C-10E, FIG. 35, 56A-56D, 72D, 74E-74G, 75A-75C, 76B-76D, 77A-77C or any combination thereof, or wherein one or more of the amino acid mutations are at one or more amino acid residues identified in any one or more of FIG. 10C-10E, FIG. 35, 56A-56D, 72D, 74E-74G, 75A-75C, 76B-76D, 77A-77C or any combination thereof or are analogous thereto in a homologue, orthologue, or variant Fanzor polypeptide.

[1592] Clause 17. The composition of any one of clauses 1-16, wherein the Fanzor polypeptide comprises (a) a mutation at one or more amino acid residues selected from: W596NUC, R601NUC, N604NUC, S598NUC, Y602NUC, R550NUC, C611RuvC, M607RuvC, W603NUC, L583NUC, K562NUC, R564NUC, S567NUC, R572NUC, Q482RuvC, R315WED, R317WED, K312WED, R481RuvC, K25WED, R268REC and R157REC, Q148REC, R407RuvC, R420RuvC, S269REC, R268REC, K440RuvC, R260REC, R96REC, Q129REC, and N133REC, R291WED, Q130REC, and N133REC, relative to SpuFz1, or in corresponding positions thereto in a homologue, orthologue, or a Fanzor variant; (b) one or more mutations selected from: D300R, C310R, D487K, E498R, and T513K relative to SpuFz1 or in corresponding mutations thereto in a homologue, orthologue, or a Fanzor variant; (c) a mutation at one or more amino acid residues selected from E541, D383, N385, D606, or any combination thereof, relative to SpuFz1, or in corresponding positions thereto in a homologue, orthologue, or a Fanzor variant; or (d) any combination of (a)-(d).

[1593] Clause 18. The composition of any one of clauses 11-17, wherein Fanzor activity is increased 1 to 50 fold or more as compared to a wild-type Fanzor or a Fanzor lacking one or more nuclear localization signals.

[1594] Clause 19. The composition of any one of clauses 1-18, wherein the Fanzor polypeptide is a. a yeast Fanzor polypeptide; b. an amoeba Fanzor polypeptide; c. a protist Fanzor polypeptide; d. a metazoan Fanzor polypeptide; e. an algae Fanzor polypeptide; f. a fungi Fanzor polypeptide; g. a eukaryotic Fanzor polypeptide; h. a Mollusca Fanzor polypeptide; i. from an organism of the genus Eremothecium, Ashbya, Spizellomyces, Torulaspora, Naegleria, Rhizopus, Guillardia, Batillaria, Dreissena, Mercenaria, Batrachochytrium, or Parasitella; j. a virus Fanzor polypeptide, optionally a Bodo saltans virus Fanzor polypeptide, a Harvforvirus Fanzor polypeptide, Homavirus Fanzor polypeptide, Dishui Lake Large Algae virus 1 Fanzor polypeptide, or Yasminevirus Fanzor polypeptide; k. a Fanzor polypeptide selected from a polypeptide or comprises a polypeptide or is encoded by a polynucleotide set forth in any one or more of Table 1, Table 6, Table 7, Table 8, Table 9, Table 10, Table 11, Table 12, Table 13, Table 14, Table 15, Table 18, Table 20, Table 21, Table 22 Example 16, Example 17, Example 18, FIG. 18A-18B, FIG. 19A-19B, FIG. 20, FIG. 33, FIG. 35, FIG. 53A-53G, FIG. 56A-56D, FIG. 66, FIG. 72D, FIG. 74E-74G, FIG. 75A-75C, FIG. 77A-77C or any combination thereof, or is a homolog, ortholog, or variant thereof, and/or is or comprises a polypeptide that is 80-100 percent identical to a polypeptide sequence set forth in or that is encoded by a polynucleotide sequence set forth in Table 1, Table 6, Table 7, Table 8, Table 9, Table 10, Table 11, Table 12, Table 13, Table 14, Table 15, Table 18, Table 20, Table 21, Table 22 Example 16, Example 17, Example 18, FIG. 18A-18B, FIG. 19A-19B, FIG. 20, FIG. 33, FIG. 35, FIG. 53A-53G, FIG. 56A-56D, FIG. 66, FIG. 72D, FIG. 74E-74G, FIG. 75A-75C, FIG. 77A-77C, or any combination thereof, or 1. any combination of a-k.

[1595] Clause 20. A vector system comprising one or more vectors encoding the Fanzor polypeptide, the ωRNA component molecule, or both of any one of clauses 1-19.

[1596] Clause 21. An engineered cell comprising the composition and/or the vector system of any one of clauses 1 to 20.

[1597] Clause 22. A method of modifying a target polynucleotide sequence in a cell, comprising introducing the composition of any one of clauses 1 to 20 into the cell.

[1598] Clause 23. The method of clause 22, wherein modifying comprises cleaving a DNA polynucleotide.

[1599] Clause 24. The method of clause 23, wherein cleavage occurs distal to a target-adjacent motif (TAM).

[1600] Clause 25. The method of clause 24, wherein cleavage occurs at a spacer annealing site or 3′ of the target sequence.

[1601] Clause 26. The method of any one of clauses 24-25, wherein cleavage occurs about 20-22 nucleotides away from the TAM.

[1602] Clause 27. The method of any one of clauses 23-26, wherein the Fanzor polypeptide, the ωRNA component molecule, or both are provided via one or more polynucleotides encoding the Fanzor polypeptide, the ωRNA component molecule, or both, and wherein the one or more polynucleotides are operably configured to express the Fanzor polypeptide, the ωRNA component molecule, or both.

[1603] Clause 28. The method of any one of clauses 22-27, wherein modifying comprises introducing one or more mutations into the target polynucleotide sequence.

[1604] Clause 29. The method of clause 28, wherein the one or more mutations comprise substitutions, deletions, insertions, or any combination thereof.

[1605] Clause 30. An engineered, non-naturally occurring composition comprising: (a) a Fanzor polypeptide, wherein the Fanzor polypeptide is catalytically inactive, (b) a nucleotide deaminase associated with or otherwise capable of forming a complex with the Fanzor polypeptide, and (c) an ωRNA component molecule capable of forming a complex with the Fanzor polypeptide and directing site-specific binding at a target sequence.

[1606] Clause 31. The composition of clause 30, wherein the Fanzor polypeptide is selected from a polypeptide, or comprises a polypeptide, or is encoded by a polynucleotide set forth in Table 1, Table 6, Table 7, Table 8, Table 9, Table 10, Table 11, Table 12, Table 13, Table 15, Table 18, Table 20, Table 21, Table 22 Example 16, Example 17, Example 18, FIG. 18A-18B, FIG. 19A-19B, FIG. 20, FIG. 33, FIG. 35, FIG. 53A-53G, FIG. 56A-56D, FIG. 66, FIG. 72D, FIG. 74E-74G, FIG. 75A-75C, FIG. 77A-77C, or any combination thereof, or is a homolog, ortholog, or variant thereof, and/or is or comprises a polypeptide that is 80-100 percent identical to a polypeptide sequence set forth in or that is encoded by a polynucleotide sequence set forth in Table 1, Table 6, Table 7, Table 8, Table 9, Table 10, Table 11, Table 12, Table 13, Table 15, Table 18, Table 20, Table 21, Table 22 Example 16, Example 17, Example 18, FIG. 18A-18B, FIG. 19A-19B, FIG. 20, FIG. 33, FIG. 35, FIG. 53A-53G, FIG. 56A-56D, FIG. 66, FIG. 72D, FIG. 74E-74G, FIG. 75A-75C, FIG. 77A-77C, or any combination thereof.

[1607] Clause 32. The composition of any one of clauses 30-31, wherein the nucleotide deaminase is an adenosine deaminase or a cytidine deaminase.

[1608] Clause 33. One or more polynucleotides encoding one or more components of the composition of any one of clauses 30 to 32.

[1609] Clause 34. One or more vectors encoding the one or more polynucleotides of clause 33.

[1610] Clause 35. A cell or progeny thereof genetically engineered to express one or more components of the composition of any one of clauses 30-34.

[1611] Clause 36. A method of editing nucleic acids in target polynucleotides comprising delivering the composition of any one of clauses 30-32, the one or more polynucleotides of claim 33, or one or more vectors of claim 34 to a cell or population of cells comprising the target polynucleotides.

[1612] Clause 37. The method of clause 36, wherein the target polynucleotides are target sequences within genomic DNA.

[1613] Clause 38. The method of clause 36 or 37, wherein the target polynucleotides are edited at one or more bases to introduce (a) a G→A, C, or T mutation; (b) a C→A, T, or G mutation, (c) a A→C, T, or G mutation; (d) T→A, C, or G mutation; or any combination of (a)-(d).

[1614] Clause 39. An isolated cell or progeny thereof comprising one or more base edits made using the method of any one of clauses 36 to 38.

[1615] Clause 40. An engineered, non-naturally occurring composition comprising: (a) a catalytically dead Fanzor polypeptide, (b) a reverse transcriptase associated with or otherwise capable of forming a complex with the catalytically dead Fanzor polypeptide, and (c) an ωRNA component molecule capable of forming a complex with the catalytically dead Fanzor polypeptide and directing site-specific binding of the complex to a target sequence of a target polynucleotide, the ωRNA component molecule further comprising a donor template encoding a donor sequence for insertion into the target polynucleotide.

[1616] Clause 41. One or more polynucleotides encoding one or more components of the composition of clause 40.

[1617] Clause 42. One or more vectors encoding the one or more polynucleotides of clause 41.

[1618] Clause 43. A method of modifying target polynucleotides comprising; delivering the composition of clause 40, the one or more polynucleotides of claim 41, or the one or more vectors of claim 42 to a cell, or population of cells, comprising the target polynucleotides, wherein the complex directs the reverse transcriptase to the target sequence and the reverse transcriptase facilitates insertion of a donor sequence encoded by the donor template from the ωRNA component molecule into the target polynucleotide.

[1619] Clause 44. The method of clause 43, wherein insertion of the donor sequence: (a) introduces one or more base edits; (b) corrects or introduces a premature stop codon; (c) disrupts a splice site; (d) inserts or restores a splice site; (e) inserts a gene or gene fragment at one or both alleles of the target polynucleotides; or (f) any combination thereof.

[1620] Clause 45. An isolated cell or progeny thereof comprising one or more modifications made using the method of clause 43 or 44.

[1621] Clause 46. An engineered, non-naturally occurring composition comprising: (a) a Fanzor polypeptide, (b) a non-LTR retrotransposon protein associated with or otherwise capable of forming a complex with the Fanzor polypeptide, and (c) an ωRNA component molecule capable of forming a complex with the Fanzor polypeptide and directing site-specific binding of the complex to a target sequence of a target polynucleotide, the ωRNA component molecule further comprising a donor template encoding a donor polynucleotide for insertion into the target polynucleotide and located between two binding elements capable of forming a complex with the non-LTR retrotransposon protein.

[1622] Clause 47. The composition of clause 46, wherein the Fanzor polypeptide is fused to an N-terminus of the non-LTR retrotransposon protein.

[1623] Clause 48. The composition of clause 46 or 47, wherein the Fanzor polypeptide is engineered to have nickase activity.

[1624] Clause 49. The composition of any one of clauses 46-48, wherein the ωRNA component molecule directs the Fanzor polypeptide to a target sequence 5′ of ta targeted insertion site, and wherein the Fanzor polypeptide generates a strand break at the targeted insertion site.

[1625] Clause 50. The composition of any one of clauses 46-48, wherein the ωRNA component molecule directs the Fanzor polypeptide to a target sequence 3′ of a targeted insertion site, and wherein the Fanzor polypeptide generates a strand break at the targeted insertion site.

[1626] Clause 51. The composition of any one of clauses 46-50, wherein the donor polynucleotide further comprises a polymerase processing element to facilitate 3′ end processing of the donor polynucleotide.

[1627] Clause 52. The composition of any one of clauses 46-51, wherein the donor polynucleotide further comprises a homology region on a 5′ end of the donor template, a 3′ end of the donor template, or both, wherein the homology region has homology to the target sequence.

[1628] Clause 53. The composition of clause 52, wherein the homology region is from 8 to 25 base pairs.

[1629] Clause 54. One or more polynucleotides encoding one or more components of the composition of any one of clauses 46 to 53.

[1630] Clause 55. One or more vectors comprising the one or more polynucleotides of clause 54.

[1631] Clause 56. A method of modifying a target polynucleotide comprising; delivering the composition of any one of clauses 46 to 53, the one or more polynucleotides of claim 54, or one or more vectors of claim 55 to a cell or population of cells comprising the target polynucleotide, wherein the complex directs the non-LTR retrotransposon protein to the target sequence and the non-LTR retrotransposon protein facilitates insertion of the donor polynucleotide from the donor template into the target polynucleotide.

[1632] Clause 57. The method of clause 56, wherein insertion of the donor polypeptide: (a) introduces one or more base edits; (b) corrects or introduces a premature stop codon; (c) disrupts a splice site; (d) inserts or restores a splice site; (e) inserts a gene or gene fragment at one or both alleles of the target polynucleotide; or (f) any combination thereof.

[1633] Clause 58. An isolated cell or progeny thereof comprising one or more modifications made using the method of clause 56 or 57.

[1634] Clause 59. An engineered, non-naturally occurring composition comprising: (a) a Fanzor polypeptide, (b) an integrase protein associated with or otherwise capable of forming a complex with the Fanzor polypeptide, and optionally a reverse transcriptase, and (c) an ωRNA component molecule capable of forming a complex with the Fanzor polypeptide and directing site-specific binding of the complex to a target sequence of a target polynucleotide, the ωRNA component molecule further comprising a donor template encoding a donor polynucleotide for insertion into the target polynucleotide and located between two binding elements capable of forming a complex with the integrase protein.

[1635] Clause 60. The composition of clause 59, wherein the Fanzor polypeptide is fused to the integrase protein and optionally the reverse transcriptase.

[1636] Clause 61. The composition of clause 59 or 60, wherein the Fanzor polypeptide is engineered to have nickase activity.

[1637] Clause 62. The composition of any one of clauses 59-61, wherein the ωRNA component molecule directs the Fanzor polypeptide to a target sequence, and wherein the Fanzor polypeptide generates a nick at a targeted insertion site.

[1638] Clause 63. The composition of clause 61, wherein the donor polynucleotide further comprises a homology region on the 5′ end of the donor template, the 3′ end of the donor template, or both, wherein the homology region has homology to the target sequence.

[1639] Clause 64. One or more polynucleotides encoding one or more components of the composition of any one of clauses 59 to 63.

[1640] Clause 65. One or more vectors comprising the one or more polynucleotides of clause 64.

[1641] Clause 66. A method of modifying a target polynucleotide comprising; delivering the composition of any one of clauses 59 to 63, the one or more polynucleotides of claim 64, or one or more vectors of claim 65 to a cell or population of cells comprising the target polynucleotide, wherein the complex directs the integrase protein to the target sequence and the integrase protein facilitates insertion of the donor polynucleotide from the donor template into the target polynucleotide.

[1642] Clause 67. The method of clause 66, wherein insertion of the donor polynucleotide: (a) introduces one or more base edits; (b) corrects or introduces a premature stop codon; (c) disrupts a splice site; (d) inserts or restores a splice site; (e) inserts a gene or gene fragment at one or both alleles of the target polynucleotide; or (f) any combination thereof.

[1643] Clause 68. An isolated cell or progeny thereof comprising one or more modifications made using the method of any one of clauses 66-67.

[1644] Clause 69. A composition for detecting the presence of a target polynucleotide in a sample, comprising: one or more Fanzor polypeptides possessing collateral activity; at least one ωRNA component comprising a sequence capable of binding a target polynucleotide and designed to form a complex with the one or more Fanzor polypeptides; a detection construct comprising a polynucleotide component, wherein the one or more Fanzor polypeptides exhibits collateral nuclease activity and cleaves the polynucleotide component of the detection construct once activated by the target sequence; and optionally, one or more isothermal amplification reagents.

[1645] Clause 70. The composition of clause 69, wherein the Fanzor polypeptide is a. a yeast Fanzor polypeptide; b. an amoeba Fanzor polypeptide; c. a protist Fanzor polypeptide; d. a metazoan Fanzor polypeptide; e. an algae Fanzor polypeptide; f. a fungi Fanzor polypeptide; g. a eukaryotic Fanzor polypeptide; h. a Mollusca Fanzor polypeptide; i. from an organism of the genus Eremothecium, Ashbya, Spizellomyces, Torulaspora, Naegleria, Rhizopus, Guillardia, Batillaria, Dreissena, Mercenaria, Batrachochytrium, or Parasitella; j. a virus Fanzor polypeptide, optionally a Bodo saltans virus Fanzor polypeptide, a Harvforvirus Fanzor polypeptide, Homavirus Fanzor polypeptide, Dishui Lake Large Algae virus 1 Fanzor polypeptide, or Yasminevirus r Fanzor polypeptide; k. a Fanzor polypeptide selected from a polypeptide, or comprises a polypeptide, or is encoded by a polynucleotide set forth in Table 1, Table 6, Table 7, Table 8, Table 9, Table 10, Table 11, Table 12, Table 13, Table 14, Table 15, Table 18, Table 20, Table 21, Table 22, Example 16, Example 17, Example 18, FIG. 18A-18B, FIG. 19A-19B, FIG. 20, FIG. 33, FIG. 35, FIG. 53A-53G, FIG. 56A-56D, FIG. 66, FIG. 72D, FIG. 74E-74G, FIG. 75A-75C, FIG. 77A-77C, or any combination thereof, or is a homolog, ortholog, or variant thereof, and/or is 80-100 percent identical to a polypeptide sequence set forth in or that is encoded by a polynucleotide sequence set forth in Table 1, Table 6, Table 7, Table 8, Table 9, Table 10, Table 11, Table 12, Table 13, Table 14, Table 15, Table 18, Table 20, Table 21, Table 22, Example 16, Example 17, Example 18, FIG. 18A-18B, FIG. 19A-19B, FIG. 20, FIG. 33, FIG. 35, FIG. 53A-53G, FIG. 56A-56D, FIG. 66, FIG. 72D, FIG. 74E-74G, FIG. 75A-75C, FIG. 77A-77C, or any combination thereof; or 1. any combination of a-k.

[1646] Clause 71. The composition of any one of clauses 69-70, wherein the isothermal amplification reagents are loop-mediated isothermal amplification (LAMP) reagents.

[1647] Clause 72. The composition of clause 71, wherein the LAMP reagents comprise LAMP primers.

[1648] Clause 73. The composition of any one of clauses 69 to 72, further comprising one or more additives to increase reaction specificity or kinetics.

[1649] Clause 74. The composition of any one of clauses 69 to 73, further comprising polynucleotide binding beads.

[1650] Clause 75. A method for detecting polynucleotides in a sample, the method comprising; contacting one or more target polynucleotides with a Fanzor polypeptide, at least one ωRNA component molecule capable of forming a complex with the Fanzor polypeptide and direct sequence-specific binding to one or more target polynucleotides and a detection construct, wherein the Fanzor polypeptide exhibits collateral nuclease activity and cleaves the detection construction once activated by the one or more target polynucleotides; and detecting a signal produced by cleavage of the detection construction thereby detecting the one or more target polynucleotides.

[1651] Clause 76. The method of clause 75, further comprising amplifying the one or more target polynucleotides using isothermal amplification prior to contacting.

The application's sequence listing, which the Patent Office published only in electronic form, follows.

SEQUENCE LISTING (4935 sequences)

SEQ ID NO: 1 - DNA, 18688 bp, Klebsormidium sp.
  source 1..18688: mol_type = other DNA
  variation 8181: note = n is a, c, g, or t
  variation 8161..8180: note = n is any nucleotide
gcttctgacccctgagaagcgccatccaacccacagtgccagtaaaatctacatgggcctttgtatagaaccccttgtcagttgcaataaagctgagcgaggacttctcgggatctttgagcatgtcaggcaggatatccttacttagagggaaaggcttgaccagctccaggacaggagaggttttgagaaaataatgctccagcacagccctggatcgacttctcttttcacaaggctccaggaatgactccaaggggcatggtggattgatgatatcctgctctgctgtttcatgatcctgaaagaatgccttgaacacaaggtctttgccatggtactttaccagatcagcctccaaagtacgaccacataactgccaggtgccccctcggacgatctgaggaaggtggagcgtctctctggtgaacccaaagtctactctctgctgagcatttcccccaatccaatacatttttaagcgcctatccaagctctccttgcagcttgaaaatgcgtcgaggcaccaaaacaaacttcgcagccatttaatctaccgcgttgtagcgctaaatgacgatttttgaccgaaactctgaagttcggacctccatgtcagggttttcgtgtcaagatccaaaccctaacagggagtaacggccttattccaacagaaatttctgagtttcacctgagtttgaccggagtttcaccggagtttgcaggtttactagcagccaatcaaagtagccggtatgtccaactcagcggtcacatggcaaggaaatgtttttgcaatcccaactcttggaaaaggacaatttctgagtttcaccggggtccggattctggcaaaaaactgtacacttatggtacactgtgatgtacagaattgatcgtgaccgtggctacggccaccgtggcatcacatgtgctccgcgcagccaatcaatgcgcggcttcaaactcaggcgaaactcagagggcttttgaggcgtctgagttttttgcccctagcttgagtttcgccggagtttgacctgagtttggaaatccgacgtggcaccgaactcaggcgaaactcaggcaggaaacgcactttttcggagttttggcaaactcaggtgaaactcaagtctgttggaataaggccgtaagtctattgcctaaagttctcgtcaaaaaccctaaatctcttggggccctttcgcgaaagagtgagtggaacttgcaggacgtttcgtgtgtccacagctcgatggcaaggacatggcaaacggcgccattcatggtgattttctgacaggtatagatgtgacatggacgtggggctcttgaccgaccaggattcgccgactcacggctttcgaacttcatctctcaataagcaaaattctcgcgaccacgatgagtttgcaataaggctggaacgccttaggtcgtttcacaccaccaccgactctctaaaacggtcacaccaagagtctgtagcaaagacattcgatgaggagatactcgcgataccgcatatcaagttgagagtgcccacggcagagaggctcaggcgtgagtgccatgatgcgaacgtgagcagggccgtgacaaagcatatggcaatctacgagtcacgtgcatccgatgctctggcacgatatcatgccttgcagaacatactgcaggaactgagggacgctggaaaattcacctcaattcgtctctgacaccgagttgtaaccattatcttctcttgtcttgtgtagtgaaggtttttgtcaggacgaacattgatggcgtcaacgggtaggcattctttggaaacgtctggatacacgagaacagaagaaagcaggcttttagaaccgtaccaagtcccaacatatgttctatgaaagaaagtcattgtgtactatgcagtttcgctacctctgttatggactccgaacaagtattatctctgtgtgcttcttcctgtaccataccgcagagtccagtacggctctctgattatgcttcactatcttatccaggaaatcagaacgtctttgcttgcctgtagcaacgtgtttagcttctgactgacgtccatgtgaacacctgaagcaccttcagcttctaccgttatgcctccgaaagtctccaccgctctcgttgtctcctcatgcgaatgaagcgctgcagagaagcgttgagtgacttgctattttttgtcgatgatgaaagtgtatgtgagcccttgcagaagaaatccatcaccgtgaggtatgttgatgctatcttaaatcctacaggaacgattgtgccgaaaagggagacatggaaaatttcactgtgaaggatagtgagatttatgtattgcaccctgcagggtggcagtttcaatgaacacaagtacttcatttggatcgcgtaatattgattattttgtttcttgagttacaatcagtgcggtacttcatggacgagcgcgctaaggatcgtgtcagagagatactcgttgcacatgatgcacgtttcgaaagcacatggaccatcctgtggcgaaaaatgataagacccaagaaagattggacgattacgtgtccgagatcgataggcgtcaaagaaccggactcatgaactcatgcgaccagtatttggcctacatgtacttggcagagagagggacactgtttcgcagattgcacgaaaagagagttacacttcgttgaaagagtcaattcactaaataaccagatcattgtggacataaactttaagcaccaaaatcaaaggtctgcagaatgcatatggcccgtcaacctatgtacacgcgccgcggcactgtggctggagagccccgtggaccggatcagcaacgatatatcgcctcctctttctatgtatctccgcaccagcgagtggtccgtagtcgatttggacgggatgccgatgacatcgacctccatccgcctcatgaagacgcacgccagttccaacttgctcttttcccctttcaaaaagagaccgagggacacgtcgcagaggtcatcctttcgtaagtccacgtgcgccacccgcgccatgtcatcggctgtcttcaggtccttgtggatgccggcggcctgcctgatgatctcatccgccttccctagccccaacttcacataatcgaaggtgttcacgtacttcgacactcgagggtcgaacgactttaagatcttatgcacctctcgctccctagcgtcttccctccgctgcgccgcacgcgccgccgctgccgctcgcacctccagcctggaaatgtacgcccgcagaccagacaccccgccgtgcttccccgcggctacttccaccaacagcgccagatcgtagcggaacccgacgacgttgggaaagccctgggcctccctgtaagcttgcaggtcgcgcgaagtcaccctcaaatacgccctcgcttccgtcacgttcatagtatccccagcatgcccacgcaacagccgcaggagccacagggcgtctgccggcacgcacgggacggaccccttgagcctttttgagagaagggcattccagcccaccgaccgcatggcatccttccagtctttgcagaccagcgccatgctcgcagcactctgctttgctaactgcatggactcctcctctgcgacggggacaggcgggtccatcagccctggggaagcatccttagtctcctccgacatcaggaccatcaccactatcttttccagaagctcggggggtatgcaccctgcataattcaccgccatcagtgcagaggagaccgggctgagctaggctgcgaatttgcgatccggaaaataaggattctcacggtcgaattccgaaggtcattcgtggacttgtctgcgaagagtcccggtccgcgatttttaaccttattgattttcgccataccccggtccaaaaatggaacgtaaaaagaccccgggcccgtgcaggttcgtacggtgagacctgaattcgcttttcggactaggctaggcagtatactggcagggaagtagtgcaccagtactacttccctacttgtctacgagtagtctgactcaactgtacctggtctttctctttgctagatcgatctcgcgctgcttgatcctttccttctctatcaagaacgtagtgtcatgaacagctgcctgaaactcggattgtgctttcgagggcgaactgcaactctccgttcggttctcttttggaagcgactcagcggtctctcgaccatcttcggaagctgcgagcgccgctccgggcgtgttattcgctctcaggatagcaagatatgcttccttcaccttagggtcctttatctgaacgtccatctcgccccctccccttttgggattcgacggtcaccccgaggtttccttaagcctctccctctcgtctcatccagacggcaaaagacgagccgcggacgtcggccatttttctaaagcactgagagattcactaagagaattactttctgtccttcagtcctctcgaaaaccaacaaaagtgaagttgtgaaaaatacagtcgaggcgatatggggtgtatccgaggaggcgtggcaggatcccggttggcatggctgtaaatcgtatgcgcgaaaagttggttccctccgctgacgggaaggacagcatgtagttcgcaggtcattcgccagtgcttcttccgcagccccggctggtctggagccgtccttccggccgcttgcccctagcccttaggatcctgccacgtggcgcgttctgactggctcaaatccctgcaggacgctccggacgccgtcgacttgggcacccactggttctccagggactgccccgcatccggtctgggggcccagcagcgggcttgggcgtacctgcaggcacgcggccatcgaatcctggccgccggcgacgcgcgcgaggattccgccacgaagaggtacaccaccttccccgacgtggcggcgctgcaggagtacgacgatcacctggcggagttccgggtggagcgcagcatgtacgaggtgctatacccggagctgcccacccgcctctacttcgacatcgagtactcggtcgcccagcgtgatgacaacggcttcgcggagcgactctctcgcttcgctgagctccgggcggccttctgtgccgaggttctgggcgtggcggcctcggacctgacttttcagaccagcacggcacatggggaatctaagggcgagtacaagcacagcatgcacgaggtgctggagggcttctatgtaaccaaccaggaagagcgccgcctattcaaggagtgcttcgagagcttcctccaggaccccccctccagcgagctcgcagagagcgtcgcgttcctggactgcgagcgtaacgggaagaccgagcggatctgggacagcggggtgtacaccaagtttcgctgcttccgcatgctgggttcctgcaagaagggctccggcaggccgctcgtccctgccaaagggagctcgcccaagctgcgcgatcacctggttggcgtctacgacgaacgacagcggaagggcttgcagaagattgacatgggaaccgctcgcgcattcctggcagtcaaggctcagccaggctctgagcgatgatcgcgctcgagtggtactccctcacgcagcgctatgtcatttggaccgtagccctttccgattcggtaactacgatccatggttcatgcatcatactcttaccacataccactcttgtctcggattttcccatgtctgggcacttttctgtgccgcaccctccaagatgaccaaacacctgtctagagtagcgacggagacctcgcagcccagactgatttgcttcttgctcgggctcaagcctctcctcttggctacgctccaaattgctgctgcagcgagcgacgctggcgtcctcccttgcagtgccacgaccccgttcaagtcggcgcacagctgtctgcattgtaagaggagactcttcgtcgcggcgacctgccctaccatgatccgcttgcagcagcggggcaggatgtctcccggccgggcgggccgccccctatagccccccgcacggcgtccctctacgaaactcgccatccgcttgcaggacgtcatcggcataccaccggccttgcaggcatagaacgaggccgcaactaccgcctcccgcctggcaccgcccctctgaacgtgctgcgacagccacccggccagatagtcgcaggcggcgtcggcgaccgacttcgaaagtcccagctgaagcgcccacgaggagacgtcgtttcgctcttctcgctcctttctcctcggccttcgatctgcgatgccagtgcctcccggcgggtccggcgaagggccgcacagagcgagcaggttgagcgcgcctctgacacgggtcgtaggagccacatgagtcctctctcagaagtcctcaccgagagagtgacggcgcttccgtatattggtcgccacagacgaacatcagtacggactgatcatgggaaccaagtaagtgcatgcgtcactcataatcgccagccgagaccgagcgccgtgccttgcgacgaagggcgacggagtgcacgcgaccataacatcatgcccacggcgagtacgtgatgcgaagagagtttgagtggcaaggctatggccgtcagattcatcagaactatcagcaagcggatgatccgttgcgtccctatacgattcctcgcgtatctcgcgcctccctagacccctggttccactaaatccacctccagctgtcttcgtcgtcgtttgacgcctgaaaaaaaagcaagaagggaagttatcgtctcaataacctgtcgtgaccgtcgagctggaggaaggaagtcacgacgggttctcgtcatcatcaaaggacacggaaaatgattagattgtagcactcacatcattcagcgcagctatcgtgtcgtccctcgccttgatctcccgcatcaaatagtcgtaacagccgcggatgagaccgaagcgctggggcgtcccgatcgggcaggcgtgggagtatctctcgctcctgttgcctctccaggagcaccccagctgcgtaccgtccggagcagcgagcgcaaatctgcagctgatggactcgcaggctcgcgcgtgagcgtctttgtccttatgggcgtacctgcggggtgggaagcgccgtgtctttatgtccgtccgagaatcgtcatagaccgttgcgggcagcatcactcagacggcgcctgtccagcccagttcaccgcgtccaagccagtccctcacctgacggagcagccgggctcgccgcaccggatcaggttgaagggacactgggacagaaggtgcgactccatgtcgttcaccgtgaccagttccgggcactgggggctggtacactcgacgagggcggtgctttttagtagcgccgtggcggtcggatccggcacggtcgaggctggcttcttgcaagtaacacaatagctctcgaaacgaggatcgagtgtgtgcgaggtgcataggtaggtccgacactggcaccgctgcaccggggcattgcagaccaacctactcacgtcgccctggtcccagccgagacagatgaagcaccgaatgtcgtacatgctcgactcgaagcctttgatgctgtaaggctcttcgtgcacgaccaccgtcgtcgtagccttgcgtttggccgaaggcttgaggagaagaggcgccatcctgctcgaccgcttgttcctggccatgtctcgtcggaatgtctcgacgcggaccgtgtcgagccacttgtaggtggacggaccagactctacgacaaagtgtccgtcggacctgtcgaagcagcccgactcttctgcgaagagtctcatcgggctttctgcgtaaacagagtctaccctacattttccggcaaagataatgaagggtggcgagtgtccacgcatcatctcgctcctcgctcggctgtcactaggctgatatgggcgcgatgacagcttccgtccggatcgtcgcaaagatcaatgacaggatggaccacctcaacgacgccatgcagacactcgggctctcttgggcgagcatcccgctagcccaggacgacgcggcggagtacgtgcgcaacggtcggacgggcgagggcgctctgctgggaaaactcgtnnnnnnnnnnnnnnnnnnnnaaacaaggattctcacggtcgaattcctaaggtcattcgtggacttgtctgcgaagagtcccggtccgcgatttttaaccttattaattttcgccgtaccccggtccaaaaatggaacgtaaaaagaccccgggcccgtgcagcttcgtacgatgagacccgaattcgcatttcggactaggctaggcagtatactggcagggaagtagtgcacaagtactacctccctactcgtctacgagtagtctgactcaacggcccgggtacctggtacctaccggtcgaattaaagttcggccgtacggcagtttacgaaaatcgcccctactcgaaagtcagtagctatgctcagctacaccagctatccttcaccaggactcgtctcgcatgactactacaacccgaaggtcaggcagatccactggggggtgcccccggccgcaccctccaagatgaccaaacacctgtctagagtagcgacagagacctcgcagcccagactgatctgcttcttgctcaggctcaagcctctcctcttggctacgctccagatcgctgctacagcgagcgacgctggcgtcctcccttgcagtgctacgaccccgttcaagtcggcgcacagctgtatgcattccaagaggagactcttcgtcgcggcgacgtcccgccctaccatgatccgctcgcagcagcggggcaggatgtctcccagccggacgggtcgccccctgtagccccccgcacggcgtccctctacgaaactcgccatccgcttgcaggccgcttttatcgatctcgacggcacccccgtcgcccgcgcgagctccgaggacgtcatcggcataccaccggccttgcaggcatagaacgaggccgcaactaccgccccccgcctggcaccgcccctctgaacgcgctgcgacagccacccggccagatagtcgcaggcggcgtcggcgaccgacttcgaaagtcccagctgaagcgcccaagaggagacgtcgtttcgctcttctcgctcccttctcctcggccttcgatccgcgatgccagagactcctggcgggtccggcagagggtcgcatagagcgggcaagtcgcgcggtgcatctgattcggagtgagggagccacatgatgtctccctcggaagttcgtcgacgagaaagcgacggtagcttccttatatcggtcgccgcaaggagcatcagtacggactgaccacgacaaaaccgaatgtcgcgtcagcagaatatagcgtctcgtggagaaatctctgtgttttttccttgattaatcccttcgtgagaatttgtacaagacggtaagacagtaagacgcattttttagaaagtttctgagatccggagacgggatctcggaacttcaggatcctgggaccgtccccagaaatgcgtctttgtgtcttgcgtctttacgaggggttatgggtgggttggtgccacgtcagcagaataaagcgtcttgtggtggaacccgatgttttttcctcttagtggatcccctagtgataagtggtacgagacagtaagacagcaagacgcattttttggaaactttctgagatctggggacggaatcgcgggaaacttcaggatcctgggaccgtccccagaaatgcgtctttgtgtcttgcgtcttacggggtggtacgggtgggtcgccttatacggggggatcccccatgtgccacgtcagcaaattatagcgtctcgtgtggagtctctgtgtttttcccttgatgataatcgtacaagagtgtaaagcttacaactgtggcatgtttcataggataatgagtggacacgacgtaccaaagcagaacgcacagtgcccccgaaaattcccaaaggggtacaccaaggaaggcatggggtatgtctctctctcgggcgcaaggcaccactttggcgtctcggggaagactctataccgatgggaggcatctggcaaagtcacagtcaagaggagcccagggggcaggcgactcttcctcatcgacgacccgctggctcaggccgagccaaggagggagtcggtcgtctacgttcgggtctcgagcggcaagcaacaggacgacatgcgacgccaggaggcgtatctacttgaccaacatcccggatccaaagttgtcagggacatcggctcgggcctcaacttcaagagagcgggacttctatcccttctggaacgaagtgaggagggacagctacgccgagttgtggttgcctcgaaggacaggctgtgtcgtttcggcttcgatctcctcgcttggcaattcaagagacacggtgtcgagctcgtggtttgcgacaaggcagataagtcaccggaggcggagctggcagaggacgtgctcgccaccattcgagttttcggtcgtcgatggaacggcaagcgaagatatgccaacagacgcgccggtgataagaaccaggaagatccgcctgctaccgaacaaggcacagaagaagctcctggatcggtggagacacgccgcgcgatacagctacaataaagcggtgttcctcatgaacgaaacggccagctacaacaagctgtacctccggaacctcatcacacccgcggaagtcaacagggacaaaccatggctcctcgagaccccgaaagacatccgagcgggagccgtgttcgaggccgccaagaacgtgaaggcggcgatcacgatcctcaccaggaacaacatcgagcacttcagtatgggttacaagggcaggaagaaggaagacgggcacggctggacgatagacgtacccaagagcgcgctgagagtgcgggggttccgccgcttgcaggtgttcggagactactgtccgtgggtgttcgagacgctgtcccgtattggaccgctcgcaatggactgcaagatccaatacgacggggtcaagtacttcctgatcgtgccgtacgagagacatgtagtcccaccgcgaagggagggtgtggtcgcgctagatccgggagtgaggacgtttcagaccgcctacacacccaagggaaactgctacgagctgggcaaggggtgttgtaggaagctggaggccctctgcgtccacctggacaggctgatatcgagggagagctccgtgcccaatcgattgcggaggacgaagtgggcactgaggacgcagatgaaaaagttgcggcggcggttgcgggacctgagaaacgagctgcactacaagaccgcggaatacttgacgaggacggcaaacatcatcctccctcccaccttcgatactagaaacatgactcgaagaacgaccagacggatacggagcaggacggtgcggaatctgtcactcctgtcgcactacaagttcaaacagcggctgaaagccaaggccgccgtacggggggtgagagtcatggaggtcagcgaacactacacgagcaagacgtgcgggaggtgcggtcacatgcacgagatgctgggagggaggagagtgttcgagtgcccgaggtgtggtgtagtactagacagggactgtaatggtgctcgcaatgtgctacttagagccatgcgggaagacccccctcgaggggggcaatgcgagatggagccacggtagatatatcgtgcttagcctggacgaacgaaggacctgagtgtctaggtttgtccagtgattgatccatcggacggaccagactctacgacgaagtgtccgtcggacctgtcgaagcagcccgactcttctgcgaagagtctcatcgggctttctgcgtaaacagagtccacccttcattttccggcaaagataatgaagggtggcgagtgtccacgcatcatctcgctcctcgctcggctgtcactaggctgatatgggcgcgatgacagcttccgtccagatcgtcgcaaagatcaatgacaggatggaccacctcaacgacgccatgcagacactcgggctctcttggccgagcatcccgctagcccaggacgacgcggcggagtacgtgcgcaacggtcggacgggcgagggcgctctgctgggaaaactcttgaggcacgccgccctcaacgagttcctcgccggcaagatacacggcgacgcgcatacattggacgcgtgccggtcgtacgtccaacacgggggcgaactcgctgagctcatcgaagtggtacggattcacgagttcttccgagtgcacgtgggctgcagtaagatcgaggacagggagcgcgcactgtacggttggatgtgtaagaacagcgtaatcagggatcttagaattgacgcctagcatcatccagtctaataggagttttgacgttttattagtacgtagagctttagcgtttgggttcagcccggtttgagattagctgcgcctcgttaacggttcgggggtgctctccgatcatcaaacaagctgaacatatatgcgggtgacggaaaaatttcttcgttctttctttcgctcgacgaagacgccattttgggatacagccatgcacgcatcatgcgctctcccgcattcgtgacgtttcgcacatgcagacttgcttgtgtgtgtcatgattgaccaatttggaactgtgtagtcgcgaaaactggtgagtaaggcagtaaaacgcattgtttcgagtatatatgtgggtcggttattgtaagcccacaccagtagtatctaatttcagagattggagaggatgcccatgagaatggccgccccgacgaggtcgacgaccaggctcgcagaacccgaggtctcgaccagccgtatgccggtctcgaggccgcactcggggttcgaccggtcggggtcgtcgtcgaccgtcctggcgacgcctccgaagcgacatttggacgcgtcttgctctccgtcctgaaagtagccattgaaggcgagggaagcgtgtctcctgaggttgggcggcgagtagcaggaagcgtgctgttgtatggacgtgcagtccgtggcgttgcaagcgaacgacagggcggcgatcagggttgcgtccgtggcatcgctccgcgcgacacagaacttgcgggcggtagcttcgtaatcgacgtcgcgcaccagggcgtacgtgcccaccatactgccgttcagtttcgagcgggccctggagtcgtagatgccccaccgtctcgcccacggcgcgtcctccgtgagagcagcggcgtctgagtccacgagctggcgatagacggctgagttctccgccccgggccgcttgggcgtcccggcttcggctccggcccagcgcgccactcctgccagaaagtttcccgccagctcgggagtggctcgctcgacgccgtcggtcggccagcccgtggtgaggatcacggtttcgtcgccgaatccgagcgcttccagagcatagacggccgcgtcgtggagcgaagagaggacatcggggtaccacaggcctcccccgtcgtcccagaacccctgcgcatccggttccatcgccagaaaggagaaggtggcgggatcgtcggcatccagggcgaggaggaacgggtacgcttccaaggagagggctcctgcggagggcagcgcctcggcgagcacccgggcgacgctcggggagaaggctcccgcagacggcggataagaaaccgagaggtccgtcaagctgaccgatacggtcacgctgatcccgagggggttcaccaggctcgccaagttcctgagggcggccggcatggattcgtaaaatcgcgccccgtactcctccgacagcggcgcctcgcccagctggaccgcatcgattcggaaccctcgagccaggggcgtcttcacctccttctcgacccactcgtacaaggccggggacggcagctccgagaactgctctatgtagtcgttcggtatcacgagcgagacgctgacgttcgattccggcctcaggaataggcagtcggcagtagagtgcacggctaggccccggaatgcaccggcaccgacgagcttcgagacgaggccgtccggaacggcgcgcacctggtccctgttcaacgcggcgaggaggcttccctgggtggtcccggcgaggagcgccaaggtcgcgaggcaagccagcgcgttcactctcatcgacgctcgcaacggtacgagtaggcggagaaaaagccacgacccctctgcgtcccgccgacccctctcgttctcgacgctaccgtcagaggggactcgacatgcctccgatctcagcatgctggcgcgcatcgcctctctcgacgccgcgcctccaagacatcttcgtcgacgcgagtctgaaggtggatcgagcgggcatcggaatcaactatcatacgcggcaggagttcgagaagtacagcctcgtccgccgcccagaccgccgcccggacagcaaccacgcagagctcgccgccatcttcgtcgcgctcctccattctagagggagcgggaagactgcagtctttacggacagccagacgagcatcgatctgatccgcaagggcacgctcgacccgcgcttcgccgtcctggtcggatgctcgcgctggctactggcggagagtgaggagacgctgctgttcaaagtcaagggccactccggggtccctggcaacgaggtggcacatcggctcgcggccatgggaaggcgcgacggcgcgatcgtactccccgactacttgataggccgcgccgagtgccgtgaccgactcatcccggcgctcatcgacgagtgcgcccgcctgaaccagtggcagatcgagtcattcaagcggacgcaggcaggtcggcttcgtcaaggtgatagcacatcagcatggaggccccgggggccttgagggacaggaggagagttccgggagatgcgatgcagacgcgggcgtctctcgtgctcgctcgcatgagcttctcggtgagcgcctccgccgtgtcggagcgcttctccagatccaccacgaatgccgccttgtaaggagcgtcctcgcaagcggagatcatgagcagcagctcggtctgcaccaagaaccggacgatgcccgccatctcgggcgaggtgtcttcctcggaagcagccagttcgcgaagctccctgacgcggctcctgacgtcgagggcctccactcccatcggttttctcgagagcgagagcaatctactgggtctcatgctcgctttcttgacatatatggatgacaatgtgtggggaacgagggctcgcttgtacggagatcatcaccgaaaatctcgacaaccttcatggtggtcattgtttttctcacgacaaccatgaaggcgtctcatgggacaatgcttttcgagggcggacgagccaaaggttccggttcagcagaagaggccaccgagcctcgagcacaggacgttcgacttcaaaccacactttcacagggcgttccaactggcagaggagatcgggagcgggagcttcggacgcacccacgtggcctttgccaggaaggtgggagatggggacggcaagcgagtggccgtgaaggtcattcccaagcgccggatgtcgagccaggtcgagatcgacgacgtggttcgagaggtggaaatcctgcgcgtgctccagcgcaatgagaacgtggtcgagttcatagacgcctacgaggacgccattaacgtatatataatcatggagctgtgcgcgggcggggacctgtcggacaggatcctggacgccggagggcggtgctcggaggagagcgcggtgcccttggtgtggcagatcctcagcgcagtcgcatacatgcacaggcgcggcgtcattcacagggacatcaagcccgagaactttctctttgcatcggaggacaagaactcgatcctcaagaccatcgactttggcctctccgactactgccgagaaggggacgtgctcagtgacatcgtggggagcccttacttcgtcgcgccggaggtactgaagaaggcatacgacctaaaggcggacgagtggagtataggcgtcatgacgtacatcatgctggtaggagcccggccgttctatggccgcacgcaatcggaggtattcaggtcggtcctagacgaaaagccgaatctggaggaggtggaaataacggcagaggccagggactttatagaaaagttactgacgcgggatgtgcgaggaagactgacggccgctcaggccctgacgcatccatggatgagagacgtccggaaccgataaacggccgtttacaacctcctgctaaagtgccccaaagtctttctgatagtagaagactgcctacacgagcagatcttcctcaaccgacgccgcccctcgagagtatctaccaggacgtagacggccctagccttccctctgcccggcgttccacctccttccacgatcgcctgctcgtgagtgtaggcagccttgtcgaaatagtagaaaacggtcatgaagtcagccccggttcgcttcggagggacgccgtatacctgcgagaagacgtgccggttcaccactcgggagcagctctcgtccaattcaagacctaaaagcgaacgcatgtcacaaacgccgaaaacgggagtgcgagactcagtcgtttcaacccacgcgtcagacaacggtctcgagctttaccttctcgagctgatggatagcccacaggttgattttcgtccagggtcggaagcctcgcccttgctttggtgcctccttgtccagggtctcccaagtaacgacgatctgaaaaagacgcacagagctctcagcatctagctcgacgtgctctgtgttgccacctactccgtattgcactcatcagcattcagagtcgactgtaagaatctggttaggtgtatcgactgttaccaagctggcattgtaacgaaccgcggagatttcatgaggagaagtgaaccgtgcagggaaagctgactaggctcagtctgtagggggtcctgacaacagtactcaccggctcgtagcccgcgccagggttccaggccagctttcgagcgaggtcgacaggagagggtctcggctgacactgcgccgatcggtctcggcgcgcctgggctctcctgaaagctgtgtagcacgtctccaattcagccttatagatcaacatggcggtcttgaattccaccaggaagcggaattcgttctggtaatcctcgatgatgctctcagagctgttagagacggatatatagaacctgaagctcgactctttatccaacagcttggagaacagactaccgaccgcttctgtaatacgcgctatctggagctccatgtaaccagtgggattttctacagcaaaggcacgcagtgcagcttccagctctctccaaggggccgctccatcatcagacgagaacggcattttatattcatgaaagtagcttcgctccaaaaagttaagcagctgtgagcaccttggaagtctcctatcagaagccactaagaaatcagcacagtcccctgccttgagtgaggtttcttgccaatgaagcatgtagccctccatgtgccctcgttaaagttgggggcaagctgcctgggattgaacgaaagctgagtcggaagcggaactgctgaaggaacccactctgagaattggaatagctcaaaaatacacttcagccgcttttatgaggcagacaagggcaaaatgagttgacgtcagctcaaatgtccacctgcgacgatcgctctgctccattcacagtgtacagttcggtaggtactgatacgccacaggtaggtgtggtccgaccgtaccaggttatcatgaccgcacgttgacgtataatttaataggtttttgcatgcaaccgtcgattcgataatttttcatttgccgactttacagaccgtcgatatcgcgtacggttactcggtagtgaaatgtttacgtcagcagtgcaaacctgtcacgattgtcgtgcatgcagaggttgacaagacgtcaacaaagttaccaagggtaagaccgcgggctgtgcgcgcatgtaggaagactgtaggactctttgtcgaagactacatctacttaaggctcattccgcttgcattcagctcattttcaaaccctgaagtctccagcattcgccatggatcgtcacgttcacatcaggtgttctttcagcccggacgactgggttcctccggaatccaagcactactctcgctttcggaacataatcagagcggcgctggggctcgaaaggctcaccgtagattcacctgggctctttgaagctctgcgtgacgcctttggaatcaagcagacggatatggatcagtacctgaatcagaaggttcccgtcatacgggaccttttcccagaacaactggcgtcaaccagcccttacctcaatgctttcgacacgagaacgtacttcaacaaattccaggtggacccagctcagctgaagaaagccatgctcaaggttgcgggggaggagggtcctcaggtcgttatcaatggggatgaggtgagagagcggtcagcgagtgagtgcacagctgacggcgagtc

SEQ ID NO: 2 - DNA, 10182 bp, Klebsormidium sp.
  source 1..10182: mol_type = other DNA
aggaacatgagaagcatcatgtctacaccatggacgacgagacggtcgtggagactggcttcctgtacgcagcccgggcgcccggatctacgataatgaaagtcggaatgtccaaacagcgggaccccagcttatacatagcgagacggtacgcattcgttctagagccattcgccatcatgggagtggccgacgccaacatggcggaaaagatcgcattccacaagctgaagccatggcacgtcacgcacgagatcttcgaggcactagattgggagttggtccaagacatattcgaagagactgcttatctagtggctgacagagaccgttgcttagaatattgcagcgaacacggtataccattggtgacagagggcaggaataccaagacgatacatcatttcgaagacttcgcactctgattgcacatttcaacgtttgatgcccaccaccctagaaccatccggcaactctacctctatgactacatcaggcggcttcgtattctctgctcgtactacgctaggtggttctacgacgggtcctgataatggcactagtgtcaacggagtcgtatcgtctctgttacaatatcctacgatcatcgcgactgcaatcagcatctctaagaaacctatacctatgcacccgtacacgaagagtctgccgggttgccgagtagatccctccgtcaggaatcctatcaccaggagcaagaacttttgacagccgaatctgacgtccgagttgtattccagacagggggatagaatgaaatagaggatgtctaagacgatgggaaccaagtaagataggggaatttcgttccccagggtggacaccaccaccaacatgaggctcgctactaccgcgtccaatgcgaagagcacggacgccagcatcatcctcctcagaagtcgtcctctacgaaatcgccgtacgtcaggcctcccttcttccccttgttcagcgtctcgatcacaccagccttttgataagagctcacgtgcgactcgaacatgttattcttggacgtcagggagattagttccataaacccgaaggggttcttgctgccgtagtgagtctcgtaaccgaggctatggagcaagcggtccgccacgcactcgatgtatgcggacatcaacttctggttcatcccaatgagggaaacagggagtgcgtcgcaagcgaattccttctctatgtccacagcccccttcacgatctccaggatcctctcggacgacagcttccgtaccagcaggtcgcggtacaggtggcaggcaaagtccgtgtggagcgcctcgtccttggcgatgagctcgttggaaaatgtcagccccggcagcaggttcttgctcttcagccaatagatggcgcagaaggagctgctaaaaaggatgccctcaacgcacgcaaacgcgaccagcctctcagcaaacgagtcggaactctctatccacctcacggcccagtccgccttcttcttcacgcacgggatgctgtctatcgcctcgaacaacctgtccttctcctcggggtccttcacgtaggtgtcgatcagcaggctgtagacctctccgtggatgctctctatgaaggcctggcaggtgtagaaagccctggcttcctgtatctgcacctccgtcaggaacctggtcccgaggttctctatgactatgccatcagctccagcgaagaaggccaagacgtgcttgatgaagtggcgctcgtccgcggacagcctatgctcccactcgtaggcgtcctgatccagctggatctcctccactgtccagaaattggcgaccgccttcttgtagaacgaccaggtcttggggtatttgatggggaaggtgcagtacctgtgaggatccgtctcgaggaggggttctcgttctgccatgtctcagaatgacgccctcgtaccttacgactgcacaacttatacacggtttcggacgcgagccgaccgtttcggacgccccgcgagaaacattctgtggaagccctttcggacgccgctttcgggcgtctcaggcttcgccgtggtagatgtcgtccaccaactgatagtccacctttttcactccatatctcctcttgaattcctcgatgagtctcccccgcaaatacttctcgttggcactcgtcatgtgcccgaaatccttgtgcgtcgtccggatcaattgcgcgaactccaagcgagagtctccctttcgggcggcgaagccgaaatcgatcaacagaactcgtccgatatatttagtgcccggtctgtacttgaatgctatgttctcccagtggagatcgccgtgagcgagtcgcttcttctgcatcttgtcgatgaatgatatgaggactttgagcatgacgtctagctcccacctcttgcgatcccgtctcagccacgatgacagcgtggaatccacctgctgcatgaggacgaccgacactttcttctgcttacggccgtgcttgatctcgtcgaagtctaatccgaacgctcgcggcgccaatccattgcgccagaattcgttctgtatgtccatctccactctatctcgtgctctgtcgagtttcttggagatctttgcgacgcgcctctggccggtcttcctgtttcggacgaggatcaccgacccactcgccccctcgcccaagtgctttacgaaagcccacttcttccaaagcttcatcgtaaagcacctctccgccgccaggcacggggccatgctgccggtgcctttctgaccgttcatagctttcttccattcggtgacggagaaccctccctcgaataagtcgcgccccatcttctgagcaccttcgaccccggcttcacacagattctgcttcacgccgagctccgcgagtccctctcccgtgatccagttcaccttcttcccagtcttaagcacggccggcttcaaggctttccttggtctcctctcgcgccgggtcctccgtctcctcgggacttcgagtctctcacggtgcactctacagtatcgatagtcgcccgacccgcaggccgccttgttcttgcaccgcgtaccgttcttggtcggagctatgcagcgtccgcacgcctttttcttacgagctcgcgccatgtatctctcgtatgattgaacgcgatatatttttcgtccgttcagtgtaatcttcgaagcaaagagatatgatgcacttcataacattcggtactcatggaatctacaatgatttcgcacgtcagctggccaagagcgcgctagcagccggcttcgacaccgcgacggtctacgacgagacggatctagaccccgcgttccgggaatctcacagggacgtgctcgcactcccgcgtggcttcggagcgtggtgctggaagagctattgtatacttaagcgtctgagtgagttggaggaaggagacgtcgtgacttactgcgactctctgtacgcgttcaagagggactttagggaggccgcggaggactggctaaagacccaagacctggtcttgttcgagaacaagccttcggagccgagctacaaggagagacactggaccaagtacgaggccttctgcatcttgggtgcagaccccgaggtgcatggacagacgtcgcaatgctggggtggatttctgatgttacgcaagactccagagaccgtgagattcatccaggagtggtacgatagatgtgccaacgtacgcctgatgagcgacgaaagaagcgttctaggagaagagcttccgggctttatcgaaccgcgccaagatcagatggtcctcagcctcgtaagcaagacgaagggtctaggatatcctttcttgcatttcccggcggatctcatgtataacgtcaggataggcaggtagcactagacgtgaaggttgcattagctgttttacggttggatgaactaacgcagacaagtgcgttcaaaccctgaccctttttctatagggatatgtcaaacacagatggggtatgtcaggttgtccgaagcagccaaccacttcggtgtatgtaccaggactctcatcagatgggaggcagccggaaagatcaaggtcgagcgtagccctggaggcaagcgtatctacgacctcaagagcctcgatccctccagcgagcgcgcctcctacatctataccagagtgtccagccagaaacagaagaacgatcttcgacgtcaagagtcatatctgcgtgaccagtaccccggacactcagttatcagcgacgtcggaacgggcctcaacttcaagaggaagggacttctatcccttctggaacagagcgagaagggacttgtacgagaggttgtggttgcctcaaaagacagactgtgtcgtttcggattcgatctgctctcgtggttcttcgaaagacacggtgtccgcctcgtggttctccaacaagacgataagtctccggaggcagagctggcagaggacgtgctcgcggtcgttcaggtgttcggttgtcgatggaacgggagaagaggttacggaggaggagaaacagaacgaagaaagcgagcaaaaagaagcagaggagttgatcaggatgcgaaaagttcggatcctcccgaagaagtatcagaagagaatgctgaacgactggaggcacgcggctcgatacagctacaacaaggccgttttcctcatgaatgagaccgcgagcttcaataagatgtacctccgagacatgatcaccccagcagaagtaaatggagacaagccacacctcttgaagacacccaaggacgtgagggccgctgcggttttcgaagcggccaagaatgccaaagcctgcttcagcaatcgagaacgtgggaacatcaccgggttccgactctccttcaagacgaggaaaagggaggactcgaaggggtggtgcttggggatcgcaaagactgctatcaagcgcaggggcgatcgcaccctgatcatctacggagattattgcccttgggagttcgagacattgggtgccatcggcgagatcaccaaggactgtcagctgcaattcgatggtgccaagtattatctcctggtgccctactcgaaagcgcatccagcaaaagtgaagggaaacgccagatctctcatcaacgagacacgagaggcagtgatagccctggacccgggagtcagaacattcctgaccgcctacagccccagcgaggcatacaaattgggcgatgggtgtgcgcaacgcctcttctcgttggctatcaccttggacagactgctcgctttcgagaagcgcattccgaaggaccataggaagaaacgaagagcagtgagattgcgaatcatcaagacacgaagaaagatagctcatctgcgtgacgagatgcactacaaggtcgcggacttcctcacacgaaaagcgaagatcattctgttgccgacattcgagaccagcgagatggttcgaagattccaatggcggatcgggagcaagagcgtcaggcagatgtcgttcctgtcacactacaagttcacacagcggctgatagccaaggctgctggaaggggagtgagagtcctgatcgtttccgagcattacacgagcaagacctgtggcaggtgtggggaagtgaagcaaaacctagagggtgcgaggatcttcaagtgcggaagctgcttcgcagtcatagacagggattgcaatggtgctcggaacatactacttcgtgcgatacgaaggaagtgattcgcccctcggggcgactgcaagatggagccatggcgaatatgtcatgcttagcctgacagaccaccggacgattgtatagatgtcacggtctgttcagtgattgatccatcagaccaagggaagccaccaaggcccagagcatagcatcagtaccactatcacccctatgagcagacccgttccccacttctcgactctcttgcctctcgccgcgacggtcgcattcgaggacctgctcatgtcccaacccacggccgtcaatacgattccgatgagtacgagcaaggtcactactgcaatggtagcaaactctaccgtacggtccatgatatatatatactacttttgaacaggaaataaaatgttcaacatctgttatgtatgcggatgaatgactacacgcttctcatccctggatttggttccacaaagacagctatagaatctataagagaaatgcttagagtaaagtgcacagggatgatcgaggtctttgactacgacacgagaggtatctgggatctcggcaactttttgcgtaatagactattcatcagcacaaagacggacaggttgacgaggctgctgactaagctctccgaaatcacgagcctgcctttggacgttcgcgtgcacatcatcgcacattcacatggggctctcttgctacacaaggctctcatgacgctgtcaatctcggctcgacaccagcttcaagtgcagaacgtcacggtggacgcatacggacctgcgaagctgatccctgcctcgtgcgagcattacgcgctccggggcgcgaccaatcactttcacgagaaggattggattctgaggttgcatggaaggttgcagaggaccgacgaacccgaattcgatcacaggtcttccgatgggaccgtctttcatatcaagatgaccaaagatccgcgttacgcttccggtagagatgcacaccaatcctactacgacgagagcatctgggacgccatgggctcttgcaagatttgagggtgggcagagccccaaaataaaatctttctatatagcaagaacgcatgtctaacatcacgatcgctccggggagtcgtgcatacgtaaaggataacgacttattcggaaccgtgacgcgtaccaatctcttaggcctgtcgaacactccggttatccagctggacgatgggaagagccaagcatacatcggaccactgaggaagaacgtggtggatgccgagaagaaggtagatttcgatggacagagcgtttcggtgccactggatgtgtttggcgtgggcagagaccaactgaccgcgttcggggtctcggcggagaagcagaaccagatgttccagaagtggagaacactgcctaagaatcagcaagaggcttacactcaaagctgggactccctggacaagaacgattctaccgctctgcaggggttccttcaagggatgatagatgctctctcctaattcatctagctcatcttcgaggctactacagctgcagctgctcgcagcacctcccgtgcactctgacgaccatctatgcggtacacctcgtcgaagtgagcttcctcgctggagaggaagtcgtgatacttcgcctccaacttcttcaaataggccagagtgagcggcgtctccgcctctctccccctcttgcgtgcgcgttcgaagcagacctcagctggagtgtccacccatatgcagatcttgggcacctccagctgctgcgtgctccggtcatatagctgcctgaaaagggcccattcctcagggtccagagttccgtcctcgtgcaggagctctccaaagacgaacctgcacgaggcgggtgatctctctatgaagctgagtccggtgcgcttgggcatagacatgaagctgcagaggaccttagtctgcagtgcaaaagcccatctcctttggtcttcataaaacctacgcaacataggtgcccactcatccacaggttccagctcgatagggcattcgaagagtcgccccagaccttcaaggagaagactcttgccactacctatggagccttcgatcgaaatattcattttcggaatctgtgtgtccgagacgcgccacacgcccctcttcttatatagactgccgcttttcgggcgctgctctcgggtccgcgtccgaacagcgtatttttcgctaccatgcacgcgacactcccgtctttagttccacgcttgccacttgtcgagacagggtgtcgaactatccgaaagtctgctggcttacatgaccctcacatggcagtggtgccacttgttcaacggtacatctaaatctctcttcttattggacgaatgtaccacctaattgtgaggaacgtgtgcgtggtacttgactggcgttgacttcgacgggattcttgcccatatctcggatatcaaccattagcgggagatattacgtcacaatatccaagtacaacattattaataacaatatcagtacggtgcccattggttcgtcatagaatgcacctgaagtacatgtcagcaaccctaattgatccgtatattctatcagaaatatatatttgctcggcagtgtctaaaattttctttcgtataccataagtccgaggtagtggtaaccgccgctgatgagcagtctgagtcacaactgagaatgatcattggcacttttcacgtgtatatttcagtttcgggcgcgatggctaccccaggcgcgttgcctatagccttctcggcttcccttccatttccactttgaagatacacataccacataaagcaagagctcaaacatcactgcttcctccagcatcgctcacgcctccacgcctcctgaaaagcgctcacctggctgacggaggagcatgccatcatggcatccgggttcttttcggcagcagacgatgcggggtgagaatcctggccgagctgtagcacacttccctctttctgtgcaattccaatcgctacgcatctgctgtgtgctagacctttgcaagagagagggtgggtggatctcaccaaattgcttctccagccctattatgtaggcagcctagaattgcattcagcagggtggtggggattaagaattgcattcagtagggtggtggggatcaagaattgcatccagtagggtggcttttaagaattgcatccaatagggtggtggggttttagtagttgcatccagtagggtggcggagtactgaatcttaagttcaaaaggtttcaccttgggtttctctcaaacaacccgtcgaccgatcagagcaaattcagattgcctacaattcagattcagattgtatatgctctaaacctgtaagcttgatctgagcagaatcgcagagttgcagggttagggttccttttccctgctctctgcttggatttcttcctagaaactcatcaaagctgcagagtggtggtgaagtctgatactttgtgtgtagggttctggattctgcgtggataaacccttctctctgcatatttgcagatatgaagctgcactcgcgattgagcacagtgtggctggagagatcaacgacgggtttgtgggtttccttctcggggatcgcttgaggctagaagcagagctggagttggccagacaggcagccgagaaggttaatgatgagaacacgcggttgcgcattcagatggagatgcgcgacgaggagatcaaaaggctgaagagcaaaagggggcgctctgatcatcttggcctggagctacctaacgccagcactcacacgcagtcaagctagataaggtcgaaagtgatcatgaggtaaccttttagcaatcgattgctatatgtgccaagcacgatcaatttcggacggcgttccgactcgcggatcagggcaaacctcttgttgtagaaggtgcaagtgtagagtcgtctgacttttgcaccgaggtttacgtggagttttggtagttgagaccacggatggaaggcagaaccggtgtttgaatagtaagttgagtcgaggtgtaacatagtttgtaacttagttgtacttgtaccaaggtttacgtggaggattggttgttggagatcacggatgtaagactaaaccggtgcttcgaatagctgggctgagtcaaggtgtaacttagtttgtaacttaactgtaagatgcgggttggggccgcgcaacttacagtggttctgtgtctgtacgaataggatagtctgatctatgctcgtcgatagaatccactcatctatagatacagtctgttcagagtaaaatggcacactcgccacagtacccagccgtatctcggattctcaccgaagtgcctagatgaactcgtttctaggcagctatgtctttcgactaattctcagtcatcctcacaatgctgctctcgtgaagtccgctggcctgccctcgcctctggctatgctcatacagatccaagctatgt

SEQ ID NO: 3 - DNA, 21146 bp, unidentified
  variation 5392: note = n is any nucleotide
  variation 5382: note = n is any nucleotide
  source 1..21146: mol_type = other DNA
  variation 5379: note = n is any nucleotide
  variation 5387: note = n is any nucleotide
  variation 5384: note = n is any nucleotide
  variation 5394..5547: note = n is any nucleotide
  variation 1088..1107: note = n is any nucleotide
  misc_feature 1..21146: note = Fanzor polypeptide
tgctggtgccggcgctccccggaagttgcgcgccggcctagttgccggccagtgcgatggtcacgaacctgctatacgaaaccgcatttcccggcgcgctgcatgcaagccgtccgatcgacagccgagcgaccagtcgacggttcgaaggatgtcagtgggttcgtgggtggtgcccaaagttttgcttacagggtcggtttacaacgtgtaactaagcttgttcagaagcctcctctggggcccgcctgttctgcctgctccatattaagatattagcaagcctggtatgcaaacaagttttcatagaaacccgcttaattcgggtcagtaagttgtgggcctcccttcgatttgtcaattggcttctgtgtaccttagtctttcgacgaatcatctgagtcaaggatctcctgtgcacacatatgtgtcgcttttaccggcctctcacacaagtcaagcaacctgcgctgccattgcagaccccgttcagtccgttctaccagctacaaagctgcagcatctagctaccagacttaccaggtctgccccgccgcctacaaatgagaattgattattagaacgaccggatcgaatggtgctattggaagcattcctgagagtagcaactcagatgcgattgtacgtgatgccgtcaccagcttttcaaataacatattcaaactgttctactgttcgtgcacaaattgttcagttcaaactcacccttaaacatgcatgtcgtgcacagattgtctgattcgaggtaccgaattcgtgaaggacaagtaagctccagcatttcagacatttcggtcacgcaatgtctgtacagacctgtccaactggtatgacttcattcaatattgagtggcagagtgcttcgtagtctgcttccttgccaggaacattacttgtccttgctcgccaagcgtcaagcgccaagatccggagcgcccccgctgcttccgcctgcacattctcatttttgctctccagcaggcccaccatcctctccaggaaccccggcacagcggctatggcactactgttggctgcatcatgagccaggctagagagcgcccatnnnnnnnnnnnnnnnnnnnnggcggctatggctatggcgcacaaataaaattcactcaggtgcgagagcaaccccgctgccgcctcctgcacaatctcgtcattgctccccagcaggcccaccagcctctcaaggctgccctgcactgtgagtaaagtacggaagtcacacttggcaacattctcaagcagaaaaagtgccgcccactgcacaacctcgctcaatcctcccaacaactccaccagcatttccaggaccgcccttcgatcaacttcgtccgtctctacaattgttttcaaaaccaacgctgcccgtttatgcgcgcctttgcctttgctcttgagcagattctccagcatctgcagcctcctcgattttatagccgcaactatgatcccttttatcctcctcctctcagcaaaatcctgcaaaagaagcaaaatcaaaatgtttaactgttgagagcttcccagaccaggacaaagagttaacttggaaaacactttgagtatgtacccagcaataaacaggaacatgataatacagctcaaaagaaacaagatgtcggaaacatgatatgatgcttcatgactttagacgttcagattgcactcgaattggagggacctttggacacgacttcagcaaccgccaacagtgcagagcggcttccaagaaaccgaatatttaaatgatggcattctgcaacaatgagatataagcttcaggttacacaggcacctgaatcttacctctacgaggcggcctcccaggatgtgcacaaagacatcatctgccgcagctgatgctccgatgtactgtggtctcagcttctcttctgtctgcatccatggaggtggtgagtagcaaaccttcttatttattcttcctgtgacttcaaaactgaaggggcctctcagatgttttgcttcgattccagtttctgacactgcttttctcttggaatcttcaacccgcttcatgattccccgaggtacatttagcaacttgttaccaggaagtccgtgcgcctcaaccctaacatagtgtccactttgccaaccatccatggctttcggactacaaaatagcagattgctcgtccgatgaaattttgtgagataggcgtagggacgcaaaaccttcacacacgtcccttaataaaggctgtcgttgctctaaacagtctgctctaagctgattgcaagtcatgagatgtctacagccatcgaggatgtgaccttgtaacgatctgtcccgcttccctgtgagggcttctgccaccgctgattgtgctacctctgaatgtttccctaaccatcttgctcttgcagccgtgtgacaaaaattaaaacatgtttgggccttttttctttttcttttttttcccgggcaccatttggcacaccggtagagcaggtaggtgcaccctgcatgccaactacgcccagggatttgaaccccggccaccttctcttcgaggaagtcgcaacccctctacctattttttcggcttcctcgggtctcgtccccgggggcggttcattgggaaaccagacccacccgggcgtccacctgaggagttacagcctggggcatccattttcctggactactatctggctgggcaggacagctctcgcgacaaacggatccccaaaacagtggccttgccgggaattgaaccgagacgcctgtggcgctacctgcgtcatgctgacgactacgcaaaagcgagcgcgctacggtcgctacgggggctaccgaaacaaaaaatcatgctgccagctaatacccggcgcgtcggacgacccgacattccatgaatgccgggtttgctgacaactacgcaaaagcgagcgcgctgccggcgctaccggcgctaccggcgctaccagaaaacctcggatcatgctgccagctagtacccggcccatcggacgacccgacgacatttcagctaatacccggcccatcggacgacccgacgacatttcaggaatgctttgcttcatttcaggaatgcaggatttcgtgagttcctgccccagggaaactgaggagcaggcgacggggtatactcctcttaaaaaagaggaggagtaagagttcccctaaggacgctcccatggaggactactgctcacatgaaagtctgcatgggctaaaaacgatggagatgctccaaagtgatcagcattataaaagcagaacagccagagaatgtttcatttccttcagctccttagggcttcgccatgcccaatctctagattcatcagagttctactgcgcttctctcggcgggctgctggacagttggtctacatcgagctggctgaacgatgccgcgaagttcaagtgtcccaatggcggacgacaacatggcggatgcccaggaagtatccgtagtgcagctaagcgttcttctgttgcagttttttcattcattgtttggggagcaagcgcatattctggagttctacgcatcggccttggcagacgacatcaccaaggcaacaagcgaagggtttgtctactgaatcctctcctgattgcagcatttgtatgttccgaattgtgtttgcgagcatgtactgctgaaagtttgggcacaaagtatccctttgatcagaagtgggactttggcaatgttcaggagtcagcctaaacttggctatggtttgcgcaagttcgattcaaactcgggttgcgccaacagcaagacatggctgccccgctgtattcgctgcagagacttcaaggtgaccgacagccagggaaagagattgccagcctctgcaatcttcacaaagaaagttagcaacaacaagtcagtggagatcattctcgtgggaatgtttgaggcgtacaacaagtatgccaaagacaagggattggagcaggtaggtttttgcgagctggatacaggcatgtaggaataacatattttgcttttcatcagacactggtcagaaagtgctatgcagccgacttctgcagcatacagcccatattcttatacgcacaccaaaatttaccaatttatcagtacagcgcctttctcatgttattctgggcactgaaacttctgtttgttcctacatgttttaccctgctgttcagcagcttcaacaagcttcttcgtacaggatggtggtcagaatgcttccaggcacacagtgtctcaaggggcactacactagcactctaaagccagacaagatctccaatttttatcgcagacaaatttttattcatgcgataagatgattctcaactgactttgcaaccagaattcaatcaatgatctgatacaatccccccttaccgtcttgccaccccatgtctgattggtgctcatttttgcagctgtactggtcggactttggggcaaagcgtggacagaaccttaagcgcagcctgatgatgtccaaattggacgtcttctttgactggtatgctgaagactccgagcttcgcaagtttacctgggatcgcctgattgaccacttgcggacacatcgcactgtggagtgcaacttgggcacccgagctcgcctcaatgctattttctcacacatggcgaacgacccagacgctctcccccagcttgacgacagttccagcagcgccccagccaacatggccgtaaacgcttcaaacagtgtgagctgctgtctttctttattgtaatctaccaataattctattatgagtatccttcgtctaatacactaaaggagaaggcaaataaggaagtacggcaatctgtttcaagaatgtgtttagcaggtttttccggttgaattcagggtactcatgcccagctaagaagagcaaggcctactctggcacctcaaagagtcggagtcctcaatttcttctatcattgcccactagagttctctttggttgcttaattttgcgcagggtctcagacaccactttgttcttgtgcagatggtggacttgaacgtcagtgaaaccggcattcccatggccgaccttgaagcgcttgagcccatttcaagggtggaaatttccacccagacttacccggaaaaccggactctactgggctcattctctgcccacgcgccggtaagagcgcataatagcgcattttggtccatcaagcttctcatgctcggagccttgtcggcaagcaggggcaggagtatcggatgcctctagcaagttgtcttttagcattctatctcacaattagccatcgttcgggaaagggacgacggaagggacccaacctacggggacggtagaggaccttnctntnggngatanannnnnnnnnnnnnnnnnnnnnnnnnnnnnnnnnnnnnnnnnnnnnnnnnnnnnnnnnnnnnnnnnnnnnnnnnnnnnnnnnnnnnnnnnnnnnnnnnnnnnnnnnnnnnnnnnnnnnnnnnnnnnnnnnnnnnnnnnnnnnnnnnnnnnnnnnngcctctagcaagttgtcttttagcattcatctcatattgcccatctcgaaaagaatgaggacccgactcggcctcagaaccttctcttctttgcagacggtgaattacaatatgagcgaagtggacgttcccgttccccttgccacacttgccttccccgaacctacccgaattgaccaggacgagtggaactgggactccttctctgcccacgcgccggtaagagcgcataatagcgcattttggtccttcaagcttctgatgctcggagccttgtcggcaagcaggggcagtagtatcggatgcctctagcaagttgtctttcagcattcatctcacaatgcccatctcgaaaagaatgagacctgactcggcctcagaaccttctctcttttgcagacggtaaattacaatgtgagcgaaatggacgttcccggtcccctcgccacacttgccttccccgaacctacccgaattgaccaggacgagtggaattgggactccttctctgcccacccgcctgtaagagctcatagcaaatcgtagtcctccaagcttctgattccatcaattgcggctcactttgcttgaaagaggctgtcaggttgccgttagacaacgggtcggctgaagttgaagtcaggcgttagtgagaatatacgggcaatggaaatacccttatacgatattccattctgccagcaggacccgcttgcggatgatccgctgctcgactgcgacgagcgtgcctcagtcgtcgaagattcgccggtcgtcaaggaaggcttattcgacttccagagcctctcaggattctagtcgatttgaagctgaaggcggcgtcgctgtgcgcggatccggcgcaaccacacctcgtcatcgtatcgtaagaggtggcagactcgtaactggttaaaagactaatggccaaccaatagattagcgcctgtcgtccaggcacaattttacgtgtgccattttattctggacagactgtaaacacaatcgagaacatgtcaagtcatgaggaaatttggaaggttagattttgcgggcaaaagcaatggcgtcctctatgtctaatctagcatttatatcatatataattcatggatctaattcatggcaatctaattcatggcgattggacggatctaaatcatagatctaatctatgtcattaatctatctatgacgccctcttcatggtatcgaaacgagttgctgaacgcatcggggaaggtccaactcgatgctaggctcgtcatgaacaaactcggtcactttccacattcacgctccggtcgagaaggatgtgaccgtcctcgagaaccaaggggacgcgatagtcactctcgattgtacgcaccttcctgacaggatacagtccgaccctaggagtggccatccgaatagcaccagggtgcatccaacgcttgatacgtctcgaggacactgcggatcggattcattccgagatcacccgactgcccgccacggagcagggcctatgccaggcggatgcagaaagcggagctgagggtgcatgatagggtccgaaatctggtgtcgaaagttcactggaagacggcacgatcttccagtgccggatactcacggatactttcgggagcctaatcttgcccccattcggaacgacgaggatgtgcactcggaatatacgtggtacacgccgggaggatcgggagagacacgagtaggaagatgtccatctggtcgcactatacttccagggcccagttggcgatgaagtgcaaggagcgaggggtcaatctgatggtgttggatgagccgtaagggacatgcacgaattgtggttggatccatgagacaatcggagggaggaaagtattcgagtgcggttggtgccgggtgaagatggaccgggacatcagtggagggaggaacatatacttgaagcatcatcagcgcctgacagggggatcggtttcgaccgggcctctggagggctctgcctcgctagggcctcgatatcgaatatcgtgattaggagctggcgaactcagccttggtgggttttgtgggccgacagtcgaaaaagtactttgacgatagaagggttacatttaggccatggaaggatacattgtttgtgaatatacagcttaaacttggcggcgaccaaagcatatgcttctggataacccaagggatgaagcgtctacgagtgcgtggttccagaccaatctcaaaaatatcggatagactaccagatcaattgccattcatatcaaccagagtcgcgaaaattcagctggtggtatgtaagcaaacatcgttctcgaaaaacgtgctggcttgtccgtttcgatcactttatgcagtcgacctttctaacagattgtttccacggcggtggccttatatagagtgagattctggtgcatcactgaaaaagacaagatgctttcagatggtcgcgcttgagcttccggaacttcctctcgtctatcctgattttccagtggcagtgttggtgagaattccatagccctttgttgtaaagcacctcaaaggaaacctcctaggaaaactccgtgaccatcctctcgatctctcgaagggcatccgccaagatctgcgggggaagatccgtcgggctcctcacgtgcatgaatgtcgtgtatataaggtatgtcctctgcttgaggtcgaagtggagcctcccgagaaggccatcggcgatgatataggccagagcacgcggtgtagaggggctacatgtgtagcacgcggtgtctcccatggtatgctcatccatttgcacatattgtcctaagtagcgactattacatctccgacgttacgcagaaccgctactgtggccatgctgcccaatgctaaggccgtcccagtcgatgcagcgagggaagcatcaccgaaccgtttgagtgcggtacacggaccgctcgaagcaactagcaaagatctccagtaaccgcgtgtgcaggtggtttgatataggtgatcggctccataccaaagtgtgtggtacgtgagaaatcccaagaccgcatatgtgtagggaaccagaaccagcaacatcgttcgacattctttcggaatgcccgacatgtaacccctaggatagaccctcgaaagcagggaccgattggaaccgcacgaaacgcgcacagaagctcgataaccgtttgactggtgtatatcaaaggggtcatggaaaagcggagcaacttccgatgcgtggaggtgcccgcggacggatcctgcatgtttcatgcgattgcggccaccctcgctggtagagacgtgacaccagacgaattgaagagagtgtcgggacggttgagagatgcggcgatcggttatgtgttgaggttttggcggtcgtctttgggaggcgtccgagggaatccgacggggagggacttggtcgaactagagtacaaatctgccgagggagaagacgcagccaagtcggtccgaggacccatatcgtatgcaaagtacatgcggcatcgcaaaacattcggcggtcacacggagctgttagctctcagtggtttgttaggtgcggtgatcgtagttcacaggagcgacgtcacgggtggttcggtctcgatcgattgtcgaaagtttttggaaagaaaagctgcctctggaaagtaccgtatcatacatatagctttcgatcctcagctactacattatgaagggttacgacggaaggtcccaataactgcttcgtgattgaatgaacaaacgcagacaagtgcggtcaaatcccacacccttttctataggggtatgccaaggtcgagtcggatgggatatgtcagactgtctgaggccgccagtcacttcggtgtctgcaccaggaccctcatcagatgggaggccgctggaaagattaaggtcgagcgaagtcccggaggaaagcggatctacgacctcaagagtctcgatccatccggtgagcgtgcctcctacgtctacgtccgagtttccagtcataagcagaagaatgaccttcgacgtcaagaggcgcatctgcgtgaccaatatcccagacactcagttgtttgcgacatcggatcaggcctcagcttcaagaggaagggacttttatcccttttggaacagagcgagagaggacttgtacgagagattgtggttgcctcaaaagacagattgtgtcgtttcggattcgatcttctcttatggttcttcgagagacacggtgtccaactcgtggttctcaaacaagacgataagtctccagaagcagagctggcggaggacgtgctcgcggtcgttcaggtgttcggctgtcgatggaacggaagacgatacggaagagatacgagctgtgccgaaaaaggacgaggacgaccaggagagcgacgaagaggaggtggagaaggaccaggagaagctaatcaggatgaggaaggttcggatcctcccaaagaagtatcagaagagaatcctgaacgactggaggcactcagctcgatacagctacaataaggcggtgtttctcatgaacgagacagcgagcttcaataagatgtaccttcgggacctcattactccggctgaggtgaacggagacaaaccacacctcttgaatacacccaaggacgtgagggccgctgcagtcttcgaagcggccaacaatgcaaaagcctgcttcactagtctcgcacgcggaaacatcgctcatttcgagctcgccttcaagtcgagaaaggaggaagattctaaagaatggtgtgttggtgtagcaaagaccgctatcaagagtagaggcaagcgcaccttgatcatctacggagactattgtccttgggagttcgagacgctgggtgcaatcggtgagattacgaaggactgtcggctacagttcgatggtgccagatactacctcctcatcccctatcggaaagctcgccctatgaaagtgaggagcgaaagcaagtcccttatcaacgaaaccaaggaggccgtgatcgccctcgatccggcggtgaggacgttccagacagcgtatagccccagcgaggcatacaagttgggcgatgggtgcgccaagcgtctcttctcattagccatcactttagatcgactcctggccttcgaaaagcgcatcccgaaggaacaccgcaggaagcgacgatcggtgcgactgagaatcatcaaggtccggaggaagatcgctaacttgcgtgacgagatgcattataaggtcgcagagttcctgactcgaaaggccaaggttatactcttaccgtcattcgagaccagcgagatggttcaaaaaatccgacgtcgcatcgggagcaagaccgtcaggcagatgtcctttctgtcgcactacaagtttaagcagcggctgatagccaaagccgctgaccgaggagtgagagttttgatcgtctccgaccactacacgagcaagacatgtggcagatgcggggaagtgaatgaaggtttgggagccgcgaggactttcagatgcggaagctgctccgcagtcgtagatcgggactgcaatggtgctcggaacatcttactacgtgcgattcgtagacgatgattcgtccctcgggacgactgcaagatggggccatggcagatatgtcatgcttagcctgtcagaccactggatgattgtaacgatgtcgcggtctgttcagtgattgatccatcggtcccataatgaccgtgtacatttgcaggatgtaaattgtctgaaaacacataggattatgtgtggtacatggtctaatcagcagctctttgatcgcgagatcgagattcggaaagttttctcgatgacttctatgtcactgaatggcttcgatcggcggagcggtcaagggcgagtgctgtcatttcatgaatttcatcagccgtggcaacatgttggatctcgccgtaggtacggtactaggtgggctgttcggcaagatcgtcactagtttcgtcgaagacatcatcggaccattcttgtccttggtatccactcacaccttagataattcgttctatactataaagaacggccccaatgcgccatacgactcgttcgaggaagcgaagaaagataaagcgttggtcgtgaactggggaccgtttgcgcagatagctctcaatttcttcatacaaggtctctgcctgtatttcttcgtcagaatggtagaccaggccaaaaaggttccagcggccctcctatcttcgacataacgccacaccgtatgtgttcgagtgtggtccccgtcgatcactaagtcacatgccgaaacgacttatggcaggatgacagtgaaagaccgaaagaccaagacgaaggccggggctaagacgaaggcaaagcccaagcccaaagctaagccaggcaggaaggggcccgctcgcagtgcactcgactttaccattggaacgaggaagaaagggctggatggcaagttctgggtgcaaatgggcatgggtgcatgcatcggacgtgagagctttctgatctcacatatgccagagtgctcgactagtgcaaatcctagcgtcctcaattcgtctttacagcctgagctcatctgtgcgctcttcacgattgtgaagctgtagattccactgctcgtgaccttgtcgtgttgctgaataaactggtgggcgtccatgcgtgcgcttatcgctaacttcctagtcaatcgttctgcctatatcgactcaagtgcttccgttgagaactgcctactgccatgaaccacacattgttcactttgctcggtttatggaaatttccccaatttttcaggcttcgatttcgaaaccgtccgcggataccacacatattcgtcgaacttccccggttggttaactttccatgacgttcaagatgggtggaccgtaaactcacccgatatgagggcacaatgctcccaaacttctcgaagccagacactagacatatttagaatatctatgaagcactgaatctgttcaccattttcgcaatatcctactttcctcccataatcctcatctacgaaagcttctcttagtcgcgtgagggctgcgatggcttctctttcgattttagctgaaagtcgcagagaaggagcagtaaacgggcaatagccgtttgctagtattcgttgtctcgctgcattctttcggagagccgtagattgagctgagacgtacagcccacacaggatgttggagagtcgcttggtgatccgaagcaataaagaggctgctgatgtacggcatgcactgaatctgccagtcagggtacgttttatccacggtgtcatggagctttcagggcacatcgaaactacctgaagagcgagctggatcaacggtgagatccagcccaacgagttcaacaaattgatgtatctagtgcattctctggctttttgcttccatataaggtgctgctctgcgtcttctagtctccacgacaataagacggtatcgatcagagcaatccgctcggaacacatatcgggaaagatctgcggtagcaagtctttcaacgagcactgaatgttgaggaaaacgatcattatccgtgcccactcagagtccgtgcatgcgagttccatgtctctctcctgcaaagatgttattttcaggtgaggaagagaacgcgacccattgggggctgttcacgcactctctatgctgaacgctccttctgtgattgccggcaggtgtcgaggatcttcagccgccgtgtctgacaacatacgtcgaaatcgcatgtcgagtctcgtccctcgtccgtctaatgagcggtacaggctgcctcccaattcctcacaaagagctagtggacgatcgtttgaaagtgtatcttcttctggaatgacactcttccaatcgaccgctttcgaaggagctgccgcgtagactttaaatcgaatttgaatctgacgttttggatgatcggaaccgaatgaactgccctccaaggggaccactctgaccttgaggtccaaggcgtccacttttccagccctgaaacaagtatccatgatcatctccatgagacagcggcggagttttaccgcatctccatacaccttcctcggaacatcgtccgtcgtattccaggttgcgcaatttatgaggtccggtcgtgactgactcaaagcgaggcggaaattctcgatggggtcgaactcgtactcgtcgatagacatccgtccggtctcagcgactccgacttcaatgagatcgtctaatctagagacgagaacttcgatgctctcccggtcgttcggaatacttccctctcctgaaaagctcaaggctgctagcggtgcccgcacctcttcttttatgcggcgtatgaaactgagtttgtggcggccagtgtcctccgcgcggtccatcgcagacgcggactcacgggtgcggtagtggagatgtgcctgaagttgcttgttcaaagtcgcgaccgtaaagttggtggcatcctgttcgcagactaaagctgccatgcatatactcgcagtgctcacgacgcatatgaagctctgttccagcacgagccaaaagaaaggagagtgaacactgccactgaacggaccctttccgttagaacttcctacaatcaccaagctcattgccagcaagattgctgcagtgacgccgcgtatgtccttgatggtagaggcgacgaagagaacgagcccgaatgcgggaaagacgaggggtcggagttgttcgctctcgaccagcccatatctattcagaaagacgaaagagaatacgatgacgatagccaggtagaccgcactcaatgagacgatccgacgtctgtccattccagtccaaggttgagtgagtgccgggactaaagcgcacgtggcaccgagacgtcctaagaatagagccgcaccatagagccctatttgcttcgcgttgctgatgcgaactgcgaccaagaggatagcgatgctgtatcccgatatcagaggggcgatgggcatcgccgcgaagaatgcgaatgcactatttctcgtgtcgaaccagttcttagtgcgtccactcagcaggcggactaatgtacaggatatggtcgcttccaagccattgatgaggccgatcacaggagcgatcgcgaggaatttaggatggcgatatcgtttggacgtgtaaaacatgacggttaaatgcaatatggaacccgtgaagacacctcctgcagcttgtatacggccaaaacgtagggccgctgccagtccgatcgcagatggagcccaaacggggacggagtgtgtgtctttttggacgagaagcctactgagttgtgccagactatagtaagctatcaggactgatagagtttgcagccagttggcaggtttcttccacgacgacggctgatgcatgaatggtcatactacgacaccacgaaaatatatggtaatcggacatgtgtgcgtggtacatctttcgtacagtttgtgttgtattgcgattttaagccttcaccgcgacgaattttaccacaaaaaaaatctagctaagtgacaagttacgaaaatggagtacgactatccatacgaacatgacacctcggatcctgatgttagcatcactggcgacccacgagaagcgtttgaacagcttcgatgccgaatgcgggttcttctgcgcgacagcccgagcaagatgaagcaagttctgaccagtattgatgaactagagaaccacctagatagaatcacttcgtggcaataggcaggttattgatccatacaacaagaaatctatcaaggaatcatggcttgcacaacctgcccaaacgcacgcgcgttcagtacaaacacaatttaacattgagcaaaatgtagaaatatgtgcatcaactgcaatatcgttgctcccttgtcacataaagtctgtgatctcctcggcatcccacggaacagatacggcgtcatttcaagtacgtttaggacactgatgacgttgatcctcgatatcaaatccaatgtaaaagatggagtgtacatcaagaatccgcgctttctgggaaagggagaggaggaactgctcaaatacctggaggacaataaccttcttcactacttgctcaaaatgtgcactgaagggattgatcatcctgctgtagtgagccagtacgtaatcaattataagtactacacacacttcacgagcaactggactcctcatcctgacatcgttcaccaattcaaagtccccttgcacctgcttacagatgaaccagagcgtctgacgaagtgcataggtagagtgaattttcaacaaacgacgatcattcttgaggaaatcgtccaaacgaatcgcttcacacgagaggccgccgaccgttactccatctttctacttccggagcagaccttttacaaacctgtagaggcaaacgtttgattctaacatgcgagcattgggacgtcagcaagactttcaatatattcgatgccataacctgatcggaagtttctcaaagttggtatagggcgtctgtatgaactctggatgggtatcctagtcgtccggcgagatctcgtgtacgaagttcgtcgaaacatcgtcgcctgatttcaaaggtaggaaggaggaacgtggtgccacgatggtcgatgagagcgaatctcgggacgacgtgcgcataaattactcgaccgaggactactcgaagaaacggcgtgtgatgacggctcgcgagtgcagggaggtagaggagaaggaacaaaaggccaaaaagatagcgaagattttggcggtggtcgaagatatcaagcagatgttgcaggagatgagggatgtcgttgcgggagtcgatgaggagggattaatcatgaatatcaaaacgacggaacttcagaagaggataaagttggaggctatgtactgcaagactgagagacccgccaatctacatgtaccagactacggaggatcttgtggtttatgtgcagaggtgttgcatctgaaggaagtttccctcatcttcgatgacggaggtacgcttcagtggatgtgcacctcatgcttcaaagagctggagaggattgtcaagaggaacgatgtactacgagagttgcgggtgcaaaaagacgcattactacaaagcctgatttgccatacggcgtccaaaccgtcgttgcatgaactttgccaaacattggaggagataatggaagtactaaaaagtgcatcgcaagctagaacgaatgaaggtgtcgaaggagagtcggaaacgacgaattccgacctggaacaagtagagaacggccttcaagaacacaacgaactgataccatttcagaacgacagtatcgaacgagatttggacccaacgacatccatcatgcaaatgacttggatcatttggagaacacccttccagaccataacgatctggtatcattggagaaagtgagtggggtgatcgacggaatccgtgggaagcgcacgagggtgagaaatcaccacatgagattctttcctgcgtatcactacgaggaactcattcgtcagagtgtgacagcacgcaatagcgatatgcgacagcgagagcgttatgtggatgtggataccgttccactagacaagtcgtcagctgtggccaagtggaccgagcaaaagggcagatgctatatctgcaacaatccattggaatggaacagacggttgtggggccgcggtgctttccctgagattgatcgtttagatgtagctgtaaatacctatgccgacaatctttcctgggtgtgcaatttctgcaaccgcggaaaaggttatttcgtagagttgtttgaatacgagaagatgatgatagaaactatacaatccgtagagagaggtttatctgaagacctcagccctacggtattagaagacaagcttagaaaggagctcgcgcggcaatcatgcggagaacctatgtcaatgcacgacgattgtcagaaaggctagagggataagtgatgccaatgtttgtgaaaatgatgaaagccctttcgaccttcataagccaacaagagaagacccccaaatcggatagatcgccaacgtgtcgaattatgtcggttaaacctcccttgtatgtcgtgtacgatgatgaagaacgtttcggaagagatgccagatacctctgcgagatacttgcggtacaggtcgtcccaaaagttgatttcagggtgtgattttgcaaattcgtgaaccttatgccggagctctacgtttttggcctctcgctttgctcgacgcgcactccggaagtagcgacaaatgtgctcgatatacacgcatgggaggcatgcgctgagtatgcagaaagctgattttcggcgaatgtcttcgcgcgggccatcggcatatgcatagtgtctatcaaattctgtcaagcaggacgtgaacatgtctacgatcaaaggcgataaagtgaatgtcgattcgacgcagcattccattcgattagggacgtggaggttcgcgaaaccatgcagcaaacaattctcagcaagcaatcccgaatttcgcggaaactagggtgcgcgcctatggtccgcgttttattttgcaaatggtatgtgaggttggcgaatggcggcaatggttccgaggccgtgggcccgcaggccccagaggccagcagggcgccgatcctggcaagccccccaaactgccacaatgtaggctttttttctcatgaaaagcccggcagcatggtaagtactagtgcgtgatgggtgcttgatcactggggaactgacttgcaatatttattgatctgccctaaggcgctaagtcgcagatttccaggtgactccgagtcaaagtccttaagcttgtttcgagtctttcttgaggaaccaaactggtgctggtgtagctgctagcaggtcggctcgtcccaattccttgcgagacagctggattgaggcagctccttggatactcgcttgctcgcttgagagcaatatgcgcgcgcgctcggcttcctgcctcctagttgactgtgtgtcgccacgtggcctcctcgaaggccaggctgcgtgcttttatctgcataccgaagctatgtccgacctctttggtaagcgtcaacgggtctagcgttcttggcaaggtcatgtcttataaaggagtgaagtgatcaatcagcgcctatcagtctatatatgttcttagtcaaggccagctccgcagggaacacggtcagaatttatgtagcctttgagcggtcacgatcgaggaaacaaggccccctggggaagattctcgtgcaagccgcgcgcgcgcgccaatcgtgaccgtccaacttcaacatctgacgaagcgagggcgttgccgcggtcgggccaacggcttcttctgcaaaagggcctctggagtgtgcgacagctggccgtttagcagaagtctgacttcttttcacaaaggatatctttccctttggtacgtccatttccgctctctcacacagctgaattcaggacgcacgcacggagatggagactgagagccgcttcaccttagggaagcggagcaggggggatgacgactcggatgtagaggatgcacatcccgagggcctcctgcagtgggtggaccctgacccatggatgatgtggcacgtcagcgtgcacgcgacgctgccatgggagttcgccttctctagcagccccatcttcagcagagccgcaggggctctcgtttcctttaggctcggctttgtctgccgggcttccacagcagtctcccaggttcagcgccgggtgacgcgtgcaattcagcggatgatccagttggttgcctcgagcagccccatcgctctcatgggactcggatatctgcacgatgtggtggtgatggcgcctcaggcgcccgcagggagtccagttgtcgcatacagacctgtggaggacaccggtactcttggtggtgagtcacctctggtccttcacctcctgctttgctagctataacattgagtgcaatccgctcattaggctccttcctcggttggcccatcatcctgtcgtacgctctgttttgttttcactcatgatgaattgagacctttcagccgtctgcagtccagccttgtggtgactttggatgttcattcaggtgtcaattccccaaagtagggtcctttaacctttttttgggtcaagacctggcctactctatggagcgtgagcgtccagatagattcggtctggtcatacagcatcttgctggatgaacaaggattgctgtggaaattcaaggggatttcagaagcagagcttgaggagcacttcaaggcttccaaagacgtctctgaatgcattgaaaggcttctgctcttttgtgtcgataatgctttcatgccatcggcaaaaccttcaacctcgaaaatgataatcacagggcctatgagaccactgtacagctgtacaaaaggagttgtcatgcttctaacggtgatcaaagccatcggtaaaatcaaaagtcctgtttttcacgttgatgcaagtgacactttataaggttgagtgcctgttgcagtgaaataccgcctgaacttcgaggctcatatgttgaccggcaaagttccgcattctgcgatgagttgttcgcatagcggtctggctctgaacacgatgatgcatctttggaaagaagccaaagattgacccgacgcaacagaaacacgcaaaagttgtcctgaaggaagttgcgacgcttttgaaagcagaagaccctccccagtcagcgtatgacggtttttccgtcctccttcaggcctcacagctggcctggggcaccaggcaccccagccagtcaccgacctacagctgctggctgtcgtgatcttccgggcgggtgagtactgcgctctcctccagccttgctcgacccatccgaacctccagcaagttcggataaagaatgaatcatagctacgcttctctctgacctgatttgctttgttgctcgctgttccgcgcttgcttatcttgcaaacgtgtacagttcaaccacctcgcttaatcgcgtctggtgccagactatcttccatttacgtattgttgtcaatctctatgtctatcaacctgattttagccgtcacaacttgcttgcagagggcctctactggcttggacaccaggtggcagccttccagaactacctccaggcacaccccgcccccggtccttaggaacgcgttttcgatgtagtaaatatgctgttcattatgtcattctgtcatcattttgtctaggttcatgtttagctactccgatagcgtcttaaactgccatgatcgattcgaaaagagaccatcaatgctagttcatcggcatcaacctcccaagttctgctcaatttgccgaacacatcctcatactcatctgatcgaatccagatcgttatcaaaatgcctcatgcatgcaatgatgcacgagttccgccgggcggcaaactcacgttagcaatgtaatgattcgattgcgcaacaattctcaaatttcgcgcacactgcttgggcccttttcgtctctaaaaggtggcgccgggagcgatgcatg

SEQ ID NO: 4 - DNA, 21329 bp, unidentified
  misc_feature 1..21329: note = Fanzor polypeptide
  source 1..21329: mol_type = other DNA
ggagtgttttcaacaaatcagtaattagggactttttaaaaatgcacggataatacgggtaaaggcttgcacctagtcaaaagagagtttttaacttagaggaaacacattttaccacatatggacccagctgtgtctgcttaaagtctgattctactcttaagacatcagaaagttgtatttgtagagttccatatttcttgactgaatggcttccatatcaattttattactgttgttgtgaattacttattaatattttggaagtggccaaaggcttcagccactgggggctcattgtgctatgtgatatagaaacacttgataaggacctgttttttaaaaggtatttagacattgctgcattcagcattgcaacgcctcactgatttaggagccttagtctcattttcaaaaggtatataggcactgaggagccaaaatcccactggaatttaggctctaggggcctacatcacttttaaaaacgagacttaggctcctaaatcggttaggcattgccgcaacactgaccacagcaatgtctaaatactttttggaatttctggtgcactcaaaatgtcaaaatttcaagttttcatcttgattcaggacaagaacaaatttgaaagttggaatttcctgtaggatggaaattttaattttctgaccagctttgttacacacatttgttggatgtgggtatgagtattcacatgtataataaatagtacacattgtctatgctcagctgtccctccacatgtccattattagtaggctagtttcttgtaggtttcatggaagagatggatattgagtaaggatttgaagaaggaaaaggctttatagattattttaggtagggtaagggatggaaagacacttgcggcagaaatgggcagctgcacagtcaaagaaaacttcattggccaaataaaggaggtggagaggcaacaaaagttgcagaggtgagcagaaatgtaatgtattaaaataagtctgtgctgttaaataaactgttccctgaaggtagggacaaggcacttgaactttaatgcagtggaacaagaggaactaatggaatgatcacagagggacgtaaaatgttcagaagtacagacaagaaaggtgaactttacaactgattttttgttatgagcacaaaacgttagggagatgattaatgtgggcaagagatttagctgtttggactgaaaaaaagttcagattttagaccctcctcgatgtgcaagttaaaagagatggaagactcaaacatggctcccagattatgggccagcatgacaggaaagatgggctatgttgtcaatgggggagagtctgagcagaatgatcacaagctaagttttggctacacagaattaaaattgatggccagatgtctctttgtggatgtcttacacaggcggagatggccatttggatcaagtgaaaagtgaggactggagaagtagattcatgagttattagaataaatgtggttgctgaagctctgtgagcagatgagatcacttcaggagaaaaaagtgtgaagagagagaagaggaccatggtggagctgtgtatcatctcttcagagactggtagaggggaagaggatccactgaaagagaagctgaacaaattataatgaaagtcttgggtgggacagctatttagaagaacgttttaatcaacaaggtcaaaagcagtagagaggtggatgaggatagagtagaggaccttatatttggatgggaagatgccactggaggtttgggtgaatgcaaataagcaatggagagaagtgggtgtgagaatcaataaaagtcagaaagcagtgcagttgggcaagtagacatggtcaaaaaaatgcagaacgtttgcaaaacacttgaaattgtttggatggggtgggaacaatcaacacgtcaaaaaattgaaaaggttcaacaagttctatttgacaatgtagagggttgaagtggaggagaagatgaatttgttgtggaggaagtacatgtagttatgagactttctccaaaggcattcagtatgacaggagcagggatagaagaaacagatgatggggatgagcaataggcagggatctgtgggatggactatgtgtttggacagagttggtggaagagcagagtgagtttacaattaaaatgacatgtatacatacgcactcacacacacatattgtgtgtgaatacatgtatcaccactgataaaaatttggcaaaacactttctgccccggtcacatttatgccaaaccattgttataagattcaaatgaaacaacataagtgtgacttgaggcagaattttgggtctgcatttcaaatttagtcaacaattgtgctgatgatatgtgagtgagaatagaactcttctcactctcccagaactatgctgaatctgtatcaattactagaggaaaagggataaatatgtatgtttatcactaaaagtaaacagatgtgactgaattttgcacaaggagctgatctatgtggtaagaaggtgccatttttacactgtcacttttcagaagagaaccacatttcaaaaggatcagcctctcttcctcctaatatgttacttagtatattaagtatcatggcactgtacttcatcttcatgcattgatcaacatttgttcttccagaaattatttttttcaataatttacttaagcataacaaaaaagtttgaaagttattgtctattgcaacatctttaggttggagacccttatttgaagtcatttattttgtgatcctcttacatctactataaaagaaagaggaaaacatgtatcaatgataacatcaataagaccgtataatttatgtgtgtgtgtttcgagaggttgacagagaatacttgaccttgaagggtaagagcatgtggggagtgggaagggatattttgtatttgtaataatattttcggtgcctcatgactgcactgattgtctttcattacctccctgggtatggcaaccaagtgttgagaaacacttgtctattgaaactgaaggggaaacaaagacgtacacacacacaccttagttacttagttagaaaagtaattaaacaaatgattactactaataatgagataataaaaattatctacagccatgcacatatgaatgcattctcccattattaatggaatatttaattatccttattttttaatttgcctggaatgtgttaacatttcatatcagaaatgtaacttgtacttttcttttagtataaaattaatacagacattttgaattcaaaatgtagaagagaaagcatttcataatatataatgtatgacaagtgacttagcttcttttgctggaagagaaatcaggatgaaaatgatcttgtgtgaaagaacttgactatttacttacagtatatccagaagagtgaaaaattagcattccagcactgacatgcacttaatctggtgtgctggagaaagagtgcttatggaagaaagctaggggcaggtactgaggagattctacgaacagttggtgcacattaagagcatgattttcatatgtatggagcatttgaagctacccatgatttcaaatagactagtgtgtggtcattgcttctgaaaaatcaggctcaaaagacctgatcttaagaggtgcttgagcaacccctactgatacctgctggatgttagggaactcagtgactagtataatcaggccttaatcatctgggtcctgaaagtcactaagtgccttagactcccattgacttctgtgggagccaaaaatgctcagcacacagcaacctgcaggaagaccatagcatcactattgactcagtcttagttcatttccatggcctatatctttttctctctattgtcaaaataatgattagcacttcctgattgtgtcctttattggtgcttatatgttatcttttacaaaacaaaatctataccctattctcagcaatttaccagaaagaaaagatacaaaagaaatagagatgggctgtaactacaatgtaagttctgaaaacctccttctttaggttacttcagatacatattcaaattctgtaccttggacttgtgtctaatgggaagtgaaaatgtattttctcttcaatacgtttattcatgtggtcatctcagctctttcattgcaaggtcattgcaagggttatagatgtattaggcataaccccacttctcaatgatgcatatattttaaaagggaggggagatagaccttggaataagaatgcacacaggtattttatttttttgttttgaatttttctgtataccacttctctctccttcagttgacaatataatacatgccataaattccagagatggaattatattaaattatgcattattgacatctgaaggctagaataccatgcacacgtgtattgtacccatcaagtcacctaagagatttgttcaacagacaaaaatgtgtataaatcaaaaagatcttaatactcatcttgcccaagaccttgaagggggtcattatttataccagtgtgttttgttattttcacgtcccgtaatgtgggaataatttcttaataatttccaataatttcacttgatcatatttaatattatatttcactgttatttttcattaaattaattttagatgaaaactactccatggtgttttcttgcctttattctaaaacattcatttttatatggtcatatatccatatactttgactttcatctgctatcaacccagtgttcttgaggaagcagagaggctcaggcttcaataaaatgcttgcatttatcaactgcataacaattagggttgccaactttccattttttcaaaaccgaacactgaaggctcccctgtcgcttactccccctgccctgggactcacctgccgcctgcaaagccaggatgggaggagttgacacggatcctgcgtgcccaattggggctcagcatggtgggcggagtctctgttgatggagtgaggggccggagagagctggggtcccgggaggctgagaaggtgggatgggccgtcacaggcagcaagcccagctgccggctatgctcctcaagcaccatggactatcagaatccctcctccttcagcagcagttgctcttaccaccctccaatggcacttactgcggtaaccagacttttggtgtccagtcaacagtgctgaccggacactgcacaggtccccttttgactggactttctggttgaaaactggacatctggcaaccctaataacaatgttggatagaaatggattcagtatcttagtcaaagtatccctaaactctgtctgcctacatctctctctctagtctactgccggttagtaaggtctagaatcagaaagctgtccttccctagaatactaatatgtaacccgttgggatttgtgctgccaaacctcttcccccttagaatcgtagaatcataggatatccaggttggaagggacctcaggaggtcatctagtccaaccccctgctcaaagcaggaccaattcccaactaaatcatcccacccagggctttgtcaagcgtgaccttaaaaaccaataaggaaggagattccaccacctccctaggtaacccattccagtgcttcaccaccctcctagtgaaaaagtttttcctaatatccaacctaaacctcccccactgcaacttagatgaaggctctgaaattgaggaagacaggtggaggcctacctgaccaaagattcctctttcccaaaagcagacagtggagggaggaaaagggagctcctgtttaagtctgggaaatccaggtgtccctccatagatatggatatggagcccacagtaactgaagggacaatgagtggggttgtaaaaatctagataaagaggaccaggattaggaggcatctgttttcctctttgtgtagtgaagcaggactggacaaacttctgtgccttcagaagctccagcatagcagagagaactgaagccaagacaggggagtgcaggagtccatttacatgagttccccattccctgagtaggcccacaactctcttatgcaaaactgtttccacctccatccctgtgtgacctttcaaagcaaactttcccttgcctatgttggcacccagtgcagcagaccctctctctttctctctctccccccgcacctccatattcatgaatttttctggaaagagtcttccttctttaaaaataatataatttacttatgtagtgacaaagtgctatcggaaagggcatttcaaaatgactgtaaaaccagtgcttgaattgttgccatttttaaactgatgcagcagctaaagaatgttataagtgaaatttccaagcattcgtgacagctggaggaccaatgcagaacacaatagctgtttttccagttgaactcggttcaatatattgatttgtaaatacatcttctgtgaaagggagagctcattgtgtaagcaggtttcagaatatccagtgtttgtttcctcttcttgctcagggtttcgcttatcagtgtttgtgtgatatgggatttgtaagaataaactaggtaaacagataattccttaatatatttgcgctacaatataatggacaattaaggctcactttcttagtctcctcttcatataaactaagaaaacaatggaaggggaaagaggagaaccccagacgtgcatacatagacacagagctgaaggaagaaataattctagcaatatactagggaggaggaagaaatataatccactagctggagcctctctcgcacagatactattgtggtaggtacctgattacagatgtgagttgtgtgcataaagaaagcatatcatacttctgaaaactgtatgtgagagaggatgtaatatatttgaatgcatttatggccatatgactaactcctttgaaacaaaatcaggacatcaatggaaacaaggtaatagcaagaaaattcctgcattgtgctctgcaggtggtaacatctactgttcttttatcacctgaacgggagtttcacagtttaaggatagttggcaaaaataccctgtccttctctctcacaggcttgaccactgaggttaaccatgccacccttcctctggagcaaaactgtgctgggaggacctgttcccatatcaagaggcataactgcgatgggccttaaagatgagcccttctaccttgaaattaacctagtgtgctatgggaggccaagtagttggcagagtgccagagtggtgtgctgtcagtgattggtgttggtcagtagatgtttgctgtattttggaccatctggaatttttaaagaactttatgctcattaccaagtatacccccacagacacaaaggtgtagatcaccatgaccaggtcctcatttgacaatgggagtcagagccttcttgccagtcatagataaaagaaaatgatgtttggcaactgtagctattgaagtatcctgaaacagggaagagtccactgatctcctagccaatggactgaggtgactaattgacaatagacttcttcagtattggtaggtgcttttttggaagatagctcttcaaatgtttccttctccccatgtgccttgcttgggcttagtttcagctacctacttttcattcacttgctgatttcagccatgcagtgagagactgatgatggaagttgatcttaatgataataaggtattctctctaaccagcaaaggttttggtcatttggattcagtccattgtccctgtctgtgtttgatttgcaatccctatcatgtctgaatgatttaacagcaccatttgcatgccttttcaaatgtatttcagtactgtagattacaaaagtgactgtgtctatgcctagcttgaaggaaaataaaaggacgggaactgtaatccacttaaaaaaataacaaagtggctgacaatatacatgtttggagaaccacagtcaagaaattactaatagtcaaagagggattggatgtttatatgaatagcaagaatatccagagtaaaactattaatgaaaacaaaaagttctggaagggataaaaatctcatgatttaggatttaagtcaatctctaactatttagggattgggacaagaccgtcatgggacacattatcccacagttgccaactgtgggcttcttgcaccttcctctgaaactggctattggcttctgccagagatagggtacttggtctaaatggaccacaggtcgatccaaaattaatattcttatcttcccatgcgaggatacattggaaatatgcacgaatgagaaccttgcctatgtgaaagcaatcacttcacactgcccagtacaattttggtcatattttagttattggctatgtctaatatgccaccaatttttactgaacccattagtggtcacttaatatcaacctcacttaattaataaggtgttaaaaatgagaatctgtttcctaagtaattacaatctgtgcttaattatgttatcagagctgtgtttattgcagcattcttcattgagtgaagaatgacagcatttcatgcaactaatttctttttgttctctcctctctgcacgagatgttaatgataaaattcatagctgagaagtgcacatatcacttttcttgataaatgaaagtgacagcattcatttgttttaagatttcacataatttgttttgcttaaccttcacgtagggaagtaaatcaagtagattcttctctggcaaagtctgtcttaaaaatgccacaagatggcagtgtttcagaatattactgttatatttgggtaaggtatttcttagttcaaagtcagtgttgtatgcttgcattgtttaagggctaatggtcagcagtcagcactaatatgatgagcatagtaatattctatactttcatccagaatggtgtcctttgtgcaccagcaatgccactcatccactcactggctgaaaacccaattcatttttttcaaaagaggaagaggtggacaaagctccaatgctaatatactcttgtgctgagacatgcaagactgaacccaggggaagcttgagggattatctcattgttgcttgactcatgtgttctaggccacttaaaatatctttcggttttcaggccactttgaacattcttggctttctttacttcaaaggtctggtctacgttaggaaaataggttggcccatgtgtgccaaactgtgtaaatccttcacattttatctttaaacactggggctaatttgcttttgaaattcatactatagtagcccatcagggtcaaatgaagtctgtttagtgaactagtcaagtaagagggaagtcctagagaaggtcatagaaggataagaacaaaaggaaacaactttcacaaaagtcccctactctccccatcttcttgttctgtttccttgcaaatggttggttgatcatcaggaaggaatgttatcatatcctgacttcagcaaacacagccgaagagactagcagctattatactgatttaaattatacatctgtgggccaaacactgaagagtcattagtgctgtaacgagtgagaaaatacaatatgaattttcaaggctgttaccatggagtagctgattcacatgcagacacacatctgtgggatatgggggcaaaaagaagttagtgggcatcacacagtgacgagcactctcgagaaaatagggtaattttcttaatcagtttgtcttggactccctcacgttaggtgcgttagggtcaaaagagtctcacagatttcctccccagtttctgttgcagggaaagtaaatgccaaatcacttaccattaaaacctcaaatttagggcctgatcctgcaacccttactctctcaagtagtcaatttaatccctgcaagctgcatggacgcttttcaaagacaccataatagaggcccaacttaaatgtatacccccaaattaagaaacacagtaaaagaactaaaaaagagccaccgtggcttaacaaccatgtaaaagaagcagtgagagataaaaaggcatcttttaaaaagtggaagtcaaatcctagtgaggtaaatagaaaggagcataaacactgccaaattaagtgtaaaaatgtaataagaaaagccaaagaggagtttgaagaacagctagccaaaaactcaaaagataataaaatgttttttaagtacatcagaagcaggaagcctgctaaacaatcaatggggcctctggatgatggagatacaaaaggagcgcttaaagacgataaagtcattgcggagaaactaaacaaattctttgcttcagtcttcacggctgaggatgttagagagattcccaaacctgagccggcttttgtaggtgacaaatctgaggaattgtcacagattgaagtgtcactagaggaggttttggaattaattgataaacttaacagtaacaagtcactgggaccagatggcattcatccaagagttctgaaagaactcaaatgtgaagttgcagaactattaactatggtttgtaacctgtcctttaaatcagcttctgtactcaatgactggaagatagctaatgtaacgccaatatttaaaaagggcaatagcggtgatcccaacaattgcagtcttgtaagactaacgtcagtatcgggcaaattagttgaaacaatagtaaagaataaaattgtcagacacatagaagaacataaattgttgggcaaaagtcaacatggtttctataaagggaaatcgtgtcttactaatctattagagtactttgaaggggtcaacaaacatgtggacaagggggatccagtggacatagtgtacttagatttccagaaagcctttgacaaggtccctcaccaaaggctcttaagtaaagtaagttgtcatgggataaaagggaaggtcctttcatggattgagaactggttaaaagacagggaacaaagggtaggaataaatggtaaattctcagaatggagaggggtaactagtggtgttccccaagggtcagtcctaggaccgatcctattcaatttattcataaatgagctggagaaaggggtaaaaagtgaggcggcaaagtttgcagatgatactaaactgctcaagatagttaagaccaaagcagactgtgaagaacttcaaaaagatctcacaaaactaagtgattgggcaacaaaatggcaaatgaaatttaatgtggataaatgtaaagtaatgcacattggaaaaaataacccctaatatacatacaatacgatgggggctaatttagctacaacgaatcaggaaaaatgatcttggagtcatcgtggatagttctctgaagacgtccacgcagtgtgcagcggcggtcaaaaaagtaaacaggatgttaggaataattaaaaaggggatagaaaataagacggagagtatcttattgcccttatataaatccatggtatgcccacatcttgaatactgcatacagatgtggtctcctcatctcaaaaaagatatactggcactagagaaggttcagagaagggcaactaaaatgattagggatttggaacaggtcccatatgaggagagattaaagaggctaggacatttcagcttggaaaagaggagactaagggaacgtctacacttacctccgggtccgacggcaggcaatcgatgttctgggatcgatttatcgcgtcttgtctagacgggataaatcgatcccggatcgatcccagaagtgctcgccgtcgacgccggtactccagctcggcgagaggagtacgcggcatcgacgggggagccttcctgccgcgtctggacccgcggtaagttcggactaaggtacttcgaattcagctacgttattaacgtagctgaatttgcgtaacttagtccgaagtgggggggtagtgtggaccaggcctaagggaggatatgatagaggtatataaaatcatgagtgatgtggagaaagtgaataaggaaaagttatttacttgttctcataatacaagaactaggggccaccaaatgaaattaatgggcagcaggtttaaaacaaataaaaggaagttcttcttcacacagcacacagtcaacttgtggaactccttgcctgaggaggttgtgaaggctaggactataacagcgtttaaaagagaactggataaattcatggaggttaagtctattaatggctattagccaggatgggtaaggaatggtgtccctaacctctgtttgtcagagggtggagatggatggcaggagagagatcacttgatcgttacctgttaagttcactccctctggggcacctggcattggccactgtcggtagacaggatactgggctagatggacctttggtctgacccagtacggctgttcttatgagtaagggttccaggactagagtattagcgagggcttggaacagactgtcttattaagctataagatcagggctgttatgaaaatagtaatggcttctgaagaactgcttgaccagagtgctgtttcaaagtggaacattttgatgaaatgttaagagttttgtctggatctctcctctggtaacaccctacttaccagaactctgtccttctgatctttgagcaattccttaaaccacagggcactggaaaatataatcctgacattccatccaattatctgtaaaacagacaatttacactaaacgaaaaaaggctacaattacactagcagacatgttatgacttggtacacttgtaaacaaggcagagattttaaataagaaaatggcaagagaaaatacaacttctatttggactagctccagttctcaaatatctgtcttgggccagtgagcccatatttttctctctattcatccatattatctgtcttatctagctaatctattaattatattccctggctagggtagtggaagtgtgaaaggtcacacttgtttgtataatttgcacttcaggagaaaagcagaccacaataagtagttcatcagactgatacagagcgatctggatcacttggtaaactgagtgcaagcaattaatacatgttttaatactgctaaatgtaaagctatacatctaggaacaaagaatgtaggccttacttacaggctaggggattcaatcctgggaagcagtgactctgaaagagatttggaggttggggtggataatcagttgaacatgagctcctagtatgacactgtagccaaaagagctaaggcgatccttggatacataaacgggaatcttgaggaggagtagagaggtaattttacctctgtattttgtactggtgtgcctactgctggaatactgcatactgttctggtgtccacaattcaagaagaatggtgataaattggagagagttcagagaagagccatgagactgattaaaatattagaaaacatactttagagtgatagattgaactctttgagtctatttagtttagcaaagagaaggttgaggggtgacttgattatagactacatggggaacaaatatttgataataggctcttcaatctaccagacaaaggtgtaacatgatccaatggctggaaggtgaaactagacaatctgagactagaaataaggtgttaatttttaactgtgagagtaattaaccatcgaaaccaagaagtttaccaagaattatggtggattctccatcactggcaattttaaaatcaaggttggatgtttaaaacaaatatctatctatctatctatctatctatctatctatctatctatctattgttttgggaaagatctatggcctgtgatatgctggaggtcagactagatcagggattggcaacctttggcatgctgcccatcagggaaatcccctggcgggccaggacggtttgtttacctgcagcgtccacaggtttggctgattgcagctcccattggccacagttcaccgttccaggccaatgggggctgcgggaagctgcggccagcacatccctcggcccgtgccgcttcctgcagcccccattggcctggaatggtgaactgcagccagtgggagctgcgatcggtcgaacctgtggacgctgcaggtaaacaaaccggcctgtcctgccagcggatttccctgatgggccgcgtgccaaaggttgccgatccctggactagatgatcataatggtcccttctagtcttgaaatctatgaaactgtgaaacagcctttgaagcttcaaaagtgctgcagtgatttttataatcagctaagcttacgctagaaaggaaaataacatttgttcagcaagtctgcagtttaccagtttacccaagatttgtctgataatccaaggttcaagaaaaatttttggatgagatacatgttgtcgttaagatttgcaaacaaacatataaaaagaaattgaacatgttcttcagttccattgtacacatttacagttggaggttttcatgatcaattgcttctgacattgcagtcgatacaaatttgcaacaaaatgaagtgtcaaagatggcattgtaattttactgtgtcaatcaccaacaggaaaaacatgtttttttcaatgagatcctaatattataattagcaaattcaggtgattcagatgattttagcacaagacacagatttgcatctttgtaagattttggctaagaaagttttctaaaagcattctgtgtgcataaattacatcagacaaagtaaaattggatcataaaaaaacatcatgttgggggagagttgtctataacagagtaattatttaaagagctcaacagatttcctgcatcagtatgattggattccatgtgggaaagaagattctcaaatgtctaggcttatccttcaaagtatgacctcaatgaaagcccttaagcaatggtaatctgcttcagtcctgaagctttgtggagcaagttatctggcttgaagctttcagggcatctgtggccatgcctccaggagctccctgcatgacaataaagcccaggagtcattataggtacttgtgtggcatttgtgttccaaagtttcttgacacaaggctgcaaagggccagtgggtaggcactggaccattacctaatacacagcccacatctgtaaagtggttttgcataatggccttcaacttgagatgctgtagttaagagttgttctttgttgatttttgtaaaaaaagcaatactctttgtctggaggcattgaatgtagatgattgtgttaagtggagcagctaagaaaaagcctgttcctctcaaattaaatcttgtgtcctggctctgtgccaatactacgttagtcaaaagctttgaacattcatgaattgaggcaatcctgagctgactcctcagcacagaatctagagtgcaatgacacttagctttatgacgcagatctaaaccgcaaagttaccctgcattcaacctgggaacatttgtatcaaggcagcttcctgatatacagcacatcaatactttggttccatggtgtggtcctttgcttatcccattcaccttgcaccttacctctgtgcagatcctatgaggtaatactacactgattgcctgagttggaacctgcagttccttagcacttaggcactacaatggacaaggtataaatatctagataacttggctttgctccaacaacacccccttccttctctctcccccctccccctcctagcagcattgatagttgccattctgcatcaactccctaaaatgagtcggtaacccaaccattgttttgctttatggcacagacatacatagatgtcccttgataggagtcctatatgccaatgcctcctgcatcaaaggactgcagtgcataaatggtatgtggtcattgatgtattgccactttggctttgtgatgcaagtctgcaccagtgcctcctgcccaaagcttgatagccttaactctagtagctgatgacagtcctggcttggctgggaaaatgctagggttttggaaagctccacggttaactgccaacatcccaggactattggcaactattattcctagccttaagagctcagcttcccattcctcccatttttgccacattgagagctgacatcgtcataactatgtttcctatatggcagctttgtcatctgtcactgggaggattgaggagtatccccagaatctctcttgctctcttcattaacctcatgtgctgggataagaactggccctagaaatgtttgggtttgtattgattttagtaactatgacaaatgctgatccttcttgcagcaatgaggcaagatgctgcctatactattctgcggttttgcctgctgagaaaatgttgcaggatagcatggtaataaccctccttttatagctcttacattgtcttattactactacttttgtcagtttcacagtgattcataaatcacagagggaaacatttaatcaaataatgagtcacactattttatgcttccaactcgttatctttaaacaaataattagagactcagataaactttttgtggcagaacagtctgtatgcatgctgacaatgcatttgccttttaatatataatgagtctggctctacttgctttttctgcttatttcatgtttacactgaataagacttgttttgaacagaggaaaaggtagtggaactcttgctgctttgttttgattgtatactgcaagttttcaaagtagagctaagcaaaatttgtttgcatcctatttggagacaaaaacttgaaatgttgatattttccaggaagtggatcttccaaaaatgtagattcagaaatacataatatttggaaaaaaatacataactgtaagggtagttaagcactgggacaaattacctagagagactgtggaaaagccatcattggaggattataagaacaggttataccaggggtcagcaacctttcagaagtggtatgctgagtcttcatttattcactctaatttaaagtttcgcgtgccagtaatacaatttaacgtttttagaaggtctctttctataagtctataatacataactaaactattgttatatgtaaagtaaataaggtttttaaaatgtttaagaagcttcatttaaaattcaattaaaatgcagagccccctggacgggtggccaggacccgggcagtgtgagtgccactgaaaatcagctcgcatgccgccttcggcatgcgtgccataggttgcctacccctggattagacaaacacctgtcagggatgtctagataatacttagttctgcttcaatgcagggtactggactagctgacatatcaaagtccctcccaggcctacatttctatgattctataattcctgtaacagaattgcttcagtttgtctcgtcacatttttcaacattaaattgcatttccctgttgctttatgggaattgtagttctggccccttttctatcctattggtcaagctccagggctggactacatcttccataatgtaccaagagtcgtgtgactcccatgatgcaccacacagggaaaatgctttttaggagatgtactgctagggagtatggcccagaggagagaatgaggaccaaactacgactcccataaggcaatagttaaatgcagtttgatggctttttaacaaatttgaaagtaaatgtgttgggtcactttaaaaatgaaatattccaattcaggttgaactgacccaaaatgaaatatttcatttagttattcctgatggacgatctatctatctatctatatatatatatatatatttttttacaaaatcaaaattgtcctccaggaaattgatttttttttgcagggactgcattttctgtaggaaattatttctgatggaaaattcccaaacaactctatttaaaaggagctttttaaaatgaaattaaaagagaacaccaatatattctgaatgactacaacaattcatgcacagtcatttttgtaaagaagcagtatggttttactgagaaaaagagtctttgaaagagcaaactacaatattttagtatccaatttcactgttaatgttagtaaacaaaatttgaggtaattttgaacagatcagaatttttctctcaaaacatttttgatagaaaatgcatttttatgaaaaaatacatttttattgctttcatcagtgaagaaatcccaaatccaaatattttagggttttttcaacccctctcctcccaattccctcccaccaaatgaaaattaattttttcaatgaaaattttcataaaaggccaaaaaccaaaccaaccaaccaccaaacaaacaaaaaatcagccagagaacagcaaattgagggaatacccctgccccttcagtcagaacacagtcaaacttggcatgaatgtaatcaaagaattccatagactggctaccaccgatgactatattctgcccctagtacccgatagtctaaatacgagactctccagcttcatcattcctttggattattgttgtcttttgggatagtgatagggtatcagtggtctctgaggtagctaaatcaatatcattaaggggtttgtagttcaaggatagtacttggagttttgttctgatacaaatgagacaaatgtgaagttgtgttctcaccaacttttcttgcttacctatatcagtcacaagatgacactgctattccaaaggtagtatcccagagtgtactgaagttatcatatgaacagctgtctcaccactaaaacagcagtattctgaaatggttgtataaataggtaacaatctatctgaagattgcttttctgtgggtgaaaggaacgactgtcctctctcattctacccgtaacatgcaaagttgctcagaagttgaaaatttcatggacacattaggcactgaaaatcactttgatgggtgtatgtctagaggggatttcagactgataatgaaaactggtttaaagataatttcaacactatcagatttatggtagctttgggcaataagttaagtctgaagacccagtggtaactttttcagctttcagcagggtatttttccattacaagagtgcactatcacagctgcacctttcattaaaactgaagctaagtgtccatcactctttccattataaactcaattttccacaggtttaaaactcagccataaaaattcagaaaaggccacaaagtcacaggtatgagggaagattttatttctgttttccaggaaattatgttgaccatttgtaagcttaaaaagtgataaaggctccagcctgctcctattgaaatccccccatcgtccctcctcccagttcatttcagtggtctagattgtggccttttgcccaaaacctgctatacagctggatccccttgttggagaggtcatggaaagcttgtcctccaaggacagacagtcccttctgaagctccataatgtgaaaggggagtaatgcagactagatttttttttttttactatgtaaaaagggaatgaaataatgtttatttgatactctagtgactggtgccccataagtacttattgtagatatttcacattgcaaaccggtacctgtgcatatacaggccgaattttatagattttattaaggttacttatgcctgcatttctgttatagcattataatcatattttattatatagtgagcacaaattgtgtgctctgaactgtacaatacatagaacaagatacagggtgaaatcccagccccattgaagtccatggaagatttaccattcatagaatcatagaatcatagaatatcagggttggaagggacctcaggaggtcatctagtccaaccccctgctcaaagcaggaccaattcccaactaaatcatcccagccagggctttgttaagccgggccttaaaaacctccaaggaaggagactccaccacctccctaggtaacgcattccagtgcttcaccaccctcctagtgaaatagtgtttcctaatatccaacttagacctcccccactgcaacttgagaccattgctccttgttctgtcatctgccaccattgagaacagccgagttccatcctctttggaaccccccttcaggtagttgtaggctgctatcaaatcccccctcattcttctcttctggagactaaacaatcccagttccctcagcctctcctcataagtcatgcactccagacccctaatcatttttgttgccctccgctggactctttccaatttttccacatccttcttgtagtgtggggcccaaaactggacacagtactccagatgaggcctcaccaatgtcgaataaaggggaacgatcacgtccctcgatctgctggcaatgcccctacttatacagcccaaaatgccgttagccttcttggcaacaagagcacactgttgactcatatccagcttctcgtccactgtgacccctaggtccttttctgcagaactgctacctagccattcagtccctagtctgtagctgtgcatgggattcttccgtcctaagtgcaggactctgcacttgtccttgttgaacctcatcaggtttcttttggcccaatcctctaatttgtctaggtccctctgtatccgatccctaccctctagtgtatctaccacacctcctagtttagtgtcatcggcaaacttgctgagagtgcagtcgactccatcctccagatcattaataaagatattaaacaaaaccggccccaggaccgacccttggggcactccgcttgaaactggctgccaactagacatggagccattgatcactacccgttgagcccgacgatctagccagctttctatccaccttgcagtccattcatccagcccatacttctttaacttggcagcaagaatactgtgggagaccgtatcaaaagctttgctaaagtcaaggaataacacatccactgctttcccctcatccacagagccagttatctcctcatagagagtcaggatttcacctacagtatctatcctaggaagttaacagcttaaaaagataaatcaagacacagtgaagctcccaaatcattagacaacaatgtggtgaagttggtgcagtaggggcttttttgtctgtatatttatttaattagctgtatttatttttattgtggttgtgcctagtgttaccctgggtgttctcaatctgaaactattgtaacttatattttcttatct

SEQ ID NO: 5 - DNA, 21329 bp, unidentified
  variation 13637..13646: note = n is a, c, g, or t
  variation 20588..20597: note = n is a, c, g, or t
  misc_feature 1..21329: note = Fanzor polypeptide
  source 1..21329: mol_type = other DNA
aatgttggatagaaatggattcagtatcttagtcaaagtatccctaaactctgtctgcctacatctctctctctagcctacttccggttagtaaggtctagaatcagaaagctgtccttccctagattactaatatgtaacccgttgggatttgtgctgccgaacctcttcccccttagaatcgtaaaatcataggatatccgggttggaagggacctcaggaggtcatctagtccaaccccctgctcaaagcaggactaattcccaactaaatcatcccagccagggctttgtcaagcctgaccttaaaaatcaataaggaaggagattccaccacctccctaggtaacccattccagtgcttcaccaccctcctagtgaaaaagctttttcctaatatccaacctaaacctcccccactgcaacttagatgaaggctctgaaattgaggaagacaggtggaggcctacctgaccaacgattcctctttcccaaaagcagacagtggagggaggaaaagggagctcctgtttaactctgggaaatccaggtgtccctccatagatatggatatgaagcccacagtaactgaagggacaatgagtggggttgtaaaaatctagataaagaggaccaggattaggaggcatctgttttcctctttgtgtagtgaagcaggactggacaaacttctgtgccttcagaagctccagcatagcagagagaactgaagccaagacaggggagtgcaggagtccatttacatgagttccccattccctgagtaggcccacaactctcttatgcagaactgtttccacctccatccctgtgtgacctttcaaagcgacctttcccttggctatgttggcacccagtgcagcagaccctctctctttctctctctctctctctccccctcccccccacattcatgaatttttctggaaagagtcttccttctttaaaaataatataatttacttatgcagtggcaaagtgctattggaaagggcatttcaaaatgactgtaaaaccagtgcttgaattgttgccatttttaaactgatgcagcagctaaagaatgttataagtgaaatttccaagcattcgtgacagctggaggaccaatgcagaacacaatagctgtttttccagttgaactcggttcaatatattgatttgtaaatacatcttctgtgaaagggagagctcattgtgtaagcaggtttcagaatatccagtgtttgtttcctcttcttgctcagggtttcgcttatcagtgtttgtgtgatatgggatttgtaagaataaactaggtaaacagataattccttaatatatttgcgctacaatataatggacaattaaggctcactttcttagtctcctcttcatataaactaagaaaacaatggaaggggaaagaggagaacctcagacgtgcatacatacacacagagctgaaggaagaaataattctagcaatatactagggaggaggaagaaatataatccactagctggagcctctctcgcacagatactatagtggtaggcacctgattacagatgtgagttgtgtgcataaagaaagcatatcatacttctgaaaactgtatgtgagagaggatgtaatatatttgaatgcatttatggccatatgactaactcctttgaaacaaaatcaggacatcaatggaaacaaggtaatagcaagaaaattcctgcattgtgctctgcaggtggtaacatctactgttcttttatcacctgaacgggagtttcacagttttaggatagttggcagaaatactctgtccttctctctcacaggcttgaccactgaggttaaccatgtcacccttcctctggagcaaaactgtgctgggaggacctgttcccatatcaaaaggcataactgcgatgggccttaaagataagcccttctaccttgaaattaacctagtgtgctatgggaggccaagtagttggcagagtgccagagtggtgtgctgtcagtgattggtgttggtcagtagatgtttgctgtattttgggccatctggaatttttaaagaactgtatgctcattgccaagtatacccccacagacacaaaggtgtagatcactatgaccaggtcctcatttgacaatgggagtcagagccttcttgccagtcatagataaaagaaaatgatgtttggcaactgtagctattgaggtatcctgaaacagggaagagtccactgatctcctagccaatgaactgaggtgactaattgacagtagacttcttcagtattggtaggtgcttttttggaagatagctcttcaaatgtttccttctccccatgtgccttgcttgggcttagtttcagctacctacttttcattcacttgctgatttcagccatgcagtgagagactgatgatggaagttgatcttaatgataataaggtattctctctaaccagcaaaggttttggtcatttggattcagtccattgtccctgtctgtgtttgatttgcaatccctatcatgtctgaatgatttaacagcaccatttgcatgccttttcaaatgtatttcagtactgtagattacaaaagtgactgtgtctatgcctagcttgaaggaaaataaaaggacgggaactgtaatccacttaaaaaaataacaaagtggctgacaatatacatgtttggagaaccacagtcaagaaattactaatagtcaaagagggattggatgtttatatgaatagcaagaatatccagagtaaaactattaatgaaaacaaaaagttctgaaagggataaaaatctcatgatttaggatttaagtcaatctctaactatttagggattgggacaagaccgtcatggggcacattatcccacagttgccaactgtgggcttcttgcaccttcctctgaaactggttattggcttctgccagagacagggtacttggtctaaatggaccacaggtcgatccaaaattaatattcttatcttcccatgtgaggatacattggaaatatgcacgaatgagaaccttgcctaagcaaacctatgtgaaagcaatcacttcacactgcccagtacaattttggtcatcttttagttattggctatgtctaatatgccaccaatttttactgaacccattagtggtcacttaatatcaacctcacttaattaataaggtgttaaaaatgagaatctgattcctaagtaattacaatctgtgcttaattatgttatcagagctgtgtttattgcagcattcttcattgagtgaagaatgacagcatttcatgcaactaatttctttttgttctctcctctctgcacgagatgttaatgataaaattcatagctggaaagtgaacatatcacttttcttgataaatgaaagtgacagcattcatttgttttaagatttcacgtaatttgttttgcttaaccttcacgtagggaagtaaatcaagtagattcttctctggcaaagtctgtcttaaaaatgccacaagatggcagtgtttcagaatattactgttatatttgggtaaggtatttgttagttcaaagtcagtgttgtatgcttgcattgtttaagggctaatggtcagcagtcagcactaatatgatgagcatagtaatattctatactttcattcagaatggtgtcctttgtgcaccagcaatgccactcatccactcactggctgaaaacccaattcatttttttcaaaagaggaagaggtggacaaagctccagtgctaatatactcttgtgctgagacatgcaagactgaacccaggggaagcttgagggattatctcattgttgcttgactcatgtgttctaggccacttaaaatatctttcggttttcaggccactttgaacattcttggctttctttacttcaaaggtctggtctacgttaggaaaaataggttggcccatgtgtgccaaactgtgtaaatccttcacattttatctttaaacactggggctaatttgcttttgaaattcatactatagtagcccatcagggtcaaatgaagtctgtttagtgaactagtcaagtaagagggaagtcctaggcctggtctacactaggcgtttatgtcgaatttagcgctgttacattgaattaaccctgcacccgtccacaccacgaggctatttagttcgacatagaggtctcttaaattcgacttctgtactcctccccaacgaggggagtagcgctaaattcgacatgaccatatcgaattaggcttggtgtggatggaaaacgacgctaatagctccgggagctatcccacagtgcaccactctgttgacgctctggacagcagtccgagctcggatgctctgaccagccacacaggaaaagccccgggaaaatttgaattccttttcctgtctgggcagtttgaatctcatttcctgtttggacatcgtggcgagctcagcagcactggcaacgatgcagagctctccagcagagatgaccgtgcaatctaatagaaagagggccccagcatggactgatcgggaagtcttggatctcatcactgtgtggggcgatgagtccgtgctttccgagctgcgctccaaaagacagaatgcaaagatctatgagaagatctctaaagccatggcagagagaggatacagccgggatgcaacgcagtgccgcgtgaaaatcaaggagctgagacaaggctaccagaagaccaaagaggcaaacggacgatccggatcccagccccacacatcccgtttctacgaggcactgcattccatcctaggtgcggccgccaccactaccccaccactgaccgtggactctgaggatgggatattgtccacggccggttcctcggacatgttagcggacggggaagatgaggaaggagatgaggaggacgaggcagtcgacagcgcttacaacactgatttccccgacagccaggagctcttcatcacccttacagagatcccctaccaaccgtccccagccgttaacccggacacagattcaggggaaggatcaaccagtaagtgtttcaaacatctaaacttttatttttaacagaactggaatattaacaataacaacaatgggttttgcatgatttgtttgccctaggtgcttaactattcagtcccaactatttaaaaaaaatctaacaatgtccggttttgcatgattctgctgccaaatacgctccactctttagtccctgccagtgcagctatatgaaaaggcggtctatatgtccggggatagagctgcaatcctccatggacatctcgaggaagctctcctggaggtaattcgaaagcctgtgcatcaggttcctggggagagcggccttatttggtcctccgaagtagcagacgtttccgcgccaggagatcatcaagtactccgggatcatagccttgcacagcatggcggcatacggccctggtctttgcaggctttcccttagcattcgttccttatcgctgtctgagatcctcatgattgtgatgtcgctcatgatgacctgctttgaattaggtaggggactgttagtattgggactgcttgcccgttcctttacagaactgtaaccgccggtttacagccacgcggtggaggcgggagaggggcagcatacagggatctttcccggggacagccgcgagggggtgggacaggggcagagtttatgcttggccgattgctggcagcagagactggcattgctttcaatgtgaaaggaggccagtgctactattaaacttttaagcagccacaagtcaacggcttaccatgtctgcctgctacagaaattccggtgtcctgccccgcttcccagatcggcagtgcaagaccccaggcactgaaggcgaggtccgaaaattcgaccttgtcctgagtgcgcatgtgataggtgcagtgcatggtgttgttcacagagaaagactatgttctttgttcacaactacatttatctttctgaggaattcactccctttttctcattcccacagccacatctgcgactgtctcccaacccagcctggcatcacactcccagaggctagcgcagattaggcggaggaagaagaagacgcgagaggacatgttctcagaactaatgggctgctcccgagcccaggcagcacagcagaaccagtggagggagaatttgtcccaaatgcaccggacacacatggaacgtgaggagaggtggcggcaggaagaccagcaggcgactcaaacgctgcttggacttatgagggagcaaacggacacgctccggcgccttgttgatgttctgcaggaatggaggcaggaggacagagccccgctgcagtctatcaggaaccgccctcccccgccaccaagtcccatacccccctcgcccaaagtccaaagaaggaggggcggcagagtccgtgaaaactctcactccacccctgcagactgctcaagcaccagaaggctgtcattccccaaaatttgaaaagtcctttccttcccgcctcacccaagcccccgtccaagtttcaccccccagtttcatgtgtggttgttaataaaaaatacgtttctgttcattactgtttccatcatgttcttttggagcagagtctgtctgaagggggggaaggagcttggtaattggacaggacagtcacctttagcagggtacagaggcggaggcaggtccagcagcagggcacatacacagtgcagtgactagttaccctggtcagtctgggaggtggttttcatgttctgtgtgtgtgggggggttgctctgtgactttgtggcgggggagggcagttacagatcttatgcagcggtccttttcctggatcacagagccacgcagcaggggatctgtaaccgtcctccccctgccataaagtcacatagccaccacatacatgcagtcccgctcaggagggctggcaggctccgttgaaacaagcaggccaccactgcggagcctgtcattcctgtagtttagaagcgtcatttgcatcagtacattacacccgctccccaccacagtccgcgtcccaggtttaaaacattcccgcccgcgaaaacagtaataaagacaatggtgttcattaacaaaatataactgattttatttttttggaaggaggtgaagggggtatgaaactggagaggatagtcaacattaactgggtaaagaaacgggggcaggttcagcttctctgtacacaaattgaaaagtcactggtcaccctgctcactgtggaacctagctttcaaagcctcccggatgcacagcgcgtcccgctgggctcttctaatcgcccggctgtctggctgggcgtaatcagaagccaggctatttgccttaacctcccaccccgccataaaggtctcccccttgctctcacagagattgtggagcacacagcaagctgctataacaatggggatattggtttcgctgagatcacagcgagtcagtaaggttctccatctccccttgagacggccaaaagcacactccaccaccattctgcacttgctcagacggtagttgaacagttctttttcagtgtccatggcgccagtatagggcttcatgagccagggcattagcgggtaggctgggtccccgaggatcactgtaggcatctccacatccccaacagttattttgtggtccgggaagtaaataccttcctgcagccgtctaaacagaccagagttcctgaagacgcgagcgtcatgaaccttgcccggccatccgacgttgatgttggtaaaacgtcccctgtggtccaccagtgcttgcagcaccattgaaaagtagccctttcggttgatgtactggctggcctggtggtccggtcccaggatagggatgtgagttccatctatagccccaccgcagtttgggaatcccatcgcggcgaagccatctatgatgacctccacgtttcccagaaaaaataacaggagtacttgtggtaccttagagactaacaaatttattagagcataagcttttgtgggctacaacccacttcttcggatgcatatagagtgaaacatatattgaggagatatatatacacacatacagagagcatgaacaggtgggagttgtcttaccaactctgagaggccaattaagtaagagaaaaaaaacttttgaagtgataatcaagatagcccagtacagacagttgataagaagcaagtgtgagaatacttacaaggggagatagattcaatgtttataatggctcagccattcccaatccctatttaaccctgagttgattgtgtctagtttgcatatcaattccagctcagcagtctctcgttggagtctgtttttgaagtttttctgttttaagatagccaccctcaggtctgtcaaagaatggccagacaggttaaagtgttctcccacgtttcccagggtcactacctttgagagcagtaattaacgattgcgttggctacttgcatgacaacaacccccacggtagatttgcccacgccaaagtggttcgcgactgactggtagctgtccggcgttgcaagcttccagagggctatggccactcgcttctggacagtcagggctgctcgcatcctggtgtcattgcgcttcagggcaggggacagcaactcacaaagttcaaggaaagtccccttccacatgcgaaagtttcgcagccactgggattcatcccagacctacagcactatgcggtcccaccagtccgtgcttgtttcccgtgcccagaatcgccgttccacaacatccacatgacccattgtcaccgtgatgtcctcggcgctgggtcccgtgctttctgacaggcctgtgctactctcagacttcaggccctcaccgcggtgccgtagcctcctcgcctggtttatctgcatctgcctctggtaaaggtgtatgataagctgtgaggcattgagaacggccacaactgcagcgatggtcgcagcgggatccatgctcgcagtgctgtggcgtccgcgctgtcactgaccagaaaagtgcacgaactgatttcccgccggcgctttcagggagggagggagggcggtagtgacggacggatgacgacaattacccaaaagcaccctcgacacattttttttacccagaaggcattggcggctcgacccagaattccaatgggcagcggggactgcgggaactgtgggatagctgcccacagtgcaccgcttccaatgtcgatgctttccccattagtgtggactcacaaagtcgaattactgtccttagtgtggacacacacgttcgactttgcaatatcgattccacatattcgatttaagtgaaatcgaactaccctcgtagtgtagacatacccctagagaaggtcatagaaggataagaacaaaaggaaacaactttcacaaaagtcccctactctccccatcttcttgttctgtttccttgcaaatggttggttgttggatgatcatcaggaaggaatgttatcatatcctgacttcagcaaacacagccgaagagacttgcagctattatactgatttaaattatacatctgtgggccaaacactgaagagtcattagtgctgtaacgagtgagaaaatacaatatgaattttcaaggctgttaccatggagtagctgattcacatgcagacacacatctgtgggatatgggggcaaaaagaagttagtgggcatcacacagtgacgagcactctcgagaaaatagggtaattttcttaatcagtttgtcttggactccctcacgttaggtgggttagggccaaaagagtctcacagatttcctccccagtttctgttgcagggaaagtaaatgccaaatcacttaccattaaaaccccaaatttagggcctgatcctgcaacccttactctctcaagtagtcaatttaatccctgcaagctgcatggacgcttttcaaagacaccataatagaggcccaacctaaatgtataccccaaattaagaaacacagtaaaagaactaaaaaagagccaccgtggcttaacaaccatgtaaaagaagcagtgagagataaaaaggcatcttttaaaaagtggaagtcaaatcctagtgaggtaaatagaaaggagcataaacactgccaaattaagtgtaaaaatgtaataagaaaagccaaagaggagtttgaagaacagctagccaaaaactcaaaaggtaataacaaaatgttttttaagtacatcagaagcaggaagcctgctaaacaatcaatggggcctctggatgatcgagatacaaaaggagcgcttaaagacgataaagccattgcggagaaactaaatgaattctttgcttcagtcttcacggctgaggatgttagagagattcccaaacctgagccggcttttgtaggtgacaaatctgaggaattgtcacagattgaagtgtcactagaggaggttttggaattaattgataaacttaacagtaacaagtcactgggaccagatggcattcacccaagagttctgaaagaactcaaatgtgaagttgcagaactattaactatggtttgtaacctgtcctttaaatcagcttctgtactcaatgactggaagatagctaatgtaacgccaatatttaaaaagggctctagtggtgatcccaacaattgcagtcttgtaagactaacgtcagtatcgggcaaattagttgaaacaatagtaaagaataaaattgtcagacacatagaagaacataaattgttgggcaaaagtcaacatggtttctgtaaagggaaatcgtgtcttactaatctattagagtactttgaaggggtcaacaaacatgtggacaagggggatccagtggacatagtgtacttagatttccagaaagcctttgacaaggtccctcaccaaaggctcttacgtaaattaagttgtcatgggataaaagagaaggtcctttcatggattgagaactggttaaaagacagggaacaaagggtaggaataaatggtaaattctcagaatggagaggggtaactagtggtggtccccaagggtcagtcctaggaccaatcctattcaacttattcataaatgatctggagaaaggggtaaaaagtgaggcggcaaagtttgcagatgatactaaactgctcaagatagttaagaccaaagcagaccgtgaagaacttcaaaaagatctcacaaaactaagtgattgggcaacaaaaatggcaaatgaaatttaatgtggataaatgtaaggtaatgcacattggaaaaaataacccctaatatacatacaatatgatgggggctaatttagctacaacgaatcaggaaaaatgatcttggagtcatcatggatagttctctgaagccgtccacgcagtgtgcagcggcggtcaaaaaagcaaacaggatgttaggaatcattaaaaaggggatagaaaataagatggagagtatcttattgcccttatataaatccatgctatgcccacatcttgaatactgcatacagatgtggtctcctcatctcaaaaaagatatactggcactagagaaggttcagagaagggcaactaaaatgagtaggggtttggaacgggtcccatatgaggagagattaaagaggctaggacatttcagcttggaaaagaggagactaagggaggatatgatagaggtatataaaatcatgagtgatgtgaagaaagtgaataaggaaaagttatttacttgttcccataatacaagaactaggggccaccaaatgaaattaatgggcagcaggtttaaaacaaataaaaggaagttcttcttcacacagcacacagtcaacttgtggaactccttccctgaggaggttgtgaaggctaggactataacagcgtttaaaagagaactggataaattcatggaggttaagtctattaatggctattagccaggatgggtaaggaatggtgtccctaacctctgtttgtcagagggtggagatggatggcaggagagagatcacttgatcgttacctgttaggttcactccctctggggcacctggcattggccactgtcggtagacaggatactgggctagatggacctttggtctgacccagtacggccgttcttatgagtaagggttccaggactagagtattagcgagggcttggaacagactgtcttattaagctatcagatcagggctgttatgaaaatagtaatggcttctgaagaactgcttgaccagagtgctgtttcaaagtggaacattttgatgaaatgttaagagttttgtctggatctctcctctggtaacaccctacttaccagaactctgtccttctgatctttgagcaattccttaaaccacagggcactggaaaatataatcctgacattccatccaattctctgtaaaacagacaatttacactaaacgaaaaaaggctacaattacactagcagacatgttatgacttggtacacttgtaaataaggcagagattttaaataggaaaatggcaagagaaaatacaactcctatttggactagctccagttcccaaatatctgtcttgggccagtgagtccatatttttctctctattcatccatattatctgtcttatctagctaatctattaattatattccctggctagggtagtggaagtgtgaaaggtcacacttgtttgcataatttgcacttcaggagaaaagcagaccacaataagtagttcatcagactgatacagagcgatctggatcacttggtaaactgagtgcaagcaaataatacatgttttaatactgctaaatgtaaaggtatacatctaggaacaaagaatgtaggccttacttacaggctaggggattcaatcctgggaagcagtgactctgaaagagatttggaggttggggtggataatcagttgaacatgagctcctagtatgacactgtagccaaaagagctaaggcgatccttggatacataaacaggggaatcttgaggaggagtagagaggtaattttacctctgtattttgtactggtgtgcctactgctggaatactgcatactgttctggtgtccacaattcaagaagaatggtgataaattggagagagttcagagaagagccatgagactgattaaaatattagaaaacatactttagagtgatagattgagctctttgagtctatttagtttagcaaagagaaggttgaggggtgacttgattatagactacatggggaacaaatatttgataataggctcttcaatctaccagacaaaggtaacatgatccaatggctggaaggtgaaactagacaatctgagactagaaataaggtgttaatttttaactgtgagagtaattaaccattgaaaccaagaagtttaccaagaattatggtggattctccatcactggcaattttaaaatcaaggttggatgtttaaaacaaatatctatctatctatctatctatctatctatctatctatctatctatctatctatctatctatctatctatnnnnnnnnnntatctatctatctatctatctatctatctatctatctatctatctattgttttgggaaagatctatggcctgtgatatactggaggtcagactagatcagggattggcaacctttggcatgctgcccatcagggaaatcccctggcgggccaggacggtttgtttacctgcagcgtccacaggtttggctgatcgcagctcccattggccacagttcaccgttccaggccaatgggggctgtgggaagctgcggccagcacatccctcggcccgtgccacttcctgcagcccccattggcctggaatggtgaactgcagccagtgggagctgcgatcggtcgaacctgcggacgctgcaggtaaacaaaccggcccgtcctgccagcagatttccctgatgggccgcgtgccaaaggttgccgatccctggactagatgatcataatggtcccttctagtcttgaaatctatgaaactgtgaaacagcctttgaagcttcaaaagtgctgcagtgatttttataatcagctaagcgtacgctagaaaggaaaataacatttgttcagcaagtctgcagtttaccagtttacccaagatttgtctggtaatccaaggttcaagaaaattttttggatgagatacatgttgtctttcagatttgcaaacaaacatataaaaagaaattgaacacgttcttcagttccattgtacacatttacagttggaggttttcatgatcaattgcttctgacattgcagtcgatacaaatttgcaacaaaatgaagtgtcaaagatggcattgtaattttactgtgtcaatcaccaacaggaaaaacatgtttttttcaatgagatcctaatattataattagcaaattcaggtgattcagatgattttagcacaagacacagatttgcatctttgtaagattttggctaagaaagttttctaaaagcattctgtgtgcataaattacatcagacaaagtaaaattggatcataaaaaaacatcatgttgggggagagttgtctataacagagtaattatttaaagagctcaacagatttcctgcatcagtatgattggattccatgtgggaaagaagattctcaaatgtctaggcttatccttcaaagtatgacctcaatgaaagcccttaagcaatggtaatctgcttcagtcctgtcctgaagctttgtggagcaagttatctggcttgaagctttcagggcatctgtggccatgcctccaggagctccctgcatgacaatgaagcccaggagtcattataggtacttgtgtagcatttgtgttccaaagtttcttgacacaaggctgcaaagggtcagtgagtaggcactggaccattacctaatacacagcccacatctgtaaagtggttttgcataatggccttcaacttgagatgctgtagttaagagttgttctttgttgatttttgtaaaaaaaagcaatactctttgtctggaggcattgaatgtagatgattgtgttaagtggagcagctaagaaaaagcctgttcctctcaaattaaatcttgtgtcctggttctgtgccaatactaccttagtcaaaagctttgaacattcatgaattgaggcaatcctgagctgactcctcagcacagaatctagagtgcaatgacacttagctttatgacgcagatctaaaccgcaaagttaccctgcattcaacctggggatatttgcatcaaggcagcttcctgatatacagcacatcaatactttggttccatggtgtggtcctttgcttatcccattcaccttgcaccttacctctgtgcagatcctatgaggtaatactacactgattgcctgagttggaacctgcagttccttagcacttaggcactacaataatggacaaggtataaatatctagataacttggctttgctccaacaacaccctcttccttccccccccccccccccagcagcattgatagttgccattctgcatcaactccctaaaatgagccggtaacccaaccattgttttgcttcatggcacagacatacatagatgtaccttgataggaggcctatatgccaatgcctcctgcatcaaaggactgcagtgcataaatggtatgtggtcattgatgtattgccactttggctttgtgatgcaagtctgcaccagtgcctcctgcccaaagcttgatagccttaactctagtagctgatgacagtcctggcttggctgggaaaatgctagggttttggaaagctccacggttaactgccaacatcccaggactattggcaactattattcctagccttaagagctcagcttcccattcctcccatttttgccacattgagagctgacatcgtcataactatgtttcctatttggcagctttgtcatctgtcactgggaggattgaggcgtatccccagaatctctcttgctctcttcattaacctcatgtgctgggataagaactggccctagaaatgtttgggtttgtattgattttagtaactatgacaaatgctgatccttcttgcagcaatgaggcaagatgctgcctatactattctgaggttttgcctgctgagaaaatgttgcaggctagcatggtaataaccctccttttatagctcttacattgtcttattactactacttttgtcagtttcacagtgattcataaatcacagagggaaacatttaatcaaataatgagtcacactattttatgcttccaacccgttatctttaaacaaataattagagactcagataaactttttgtggtaggacagtctgtatgcatgctgacaatgcattcgccttttaatatataatgagtctggctctacttgctttttctgcttatttcatgtttacactgaataagacttgttttgaactgaggagaaggtagtggaactcttgctgctttgttttgattgtatactgcaagttttcaaagtagagctaagcaaaatttgtttgcatcctatttggagacaaaaacttgaaatgttgatattttccaggaagtggatcttccaaaaatttagattcagaaatacataatatttggaaaaaaatacataactgtaagggtagttaagcactggaacaaattacctagagagactgtggaaaatccatcattggaggattataagaacaggttagaccaggggtcagcaacctttcagaagtggtgtgctgagtcttcatttattcactctaatttaaagtttcgcgtgccagtaatacaatttaacgtttttagaaggtctctttctataagtctataatacataactaaactattgttgtatgtaaagtaaataaggtttttaaaatgtttaagaagcttcatttaaaattcaattaaaatgcagagccccctggacgggtggccaggacccgggcagtgtgagtgccactgaaaatcagctcgcgtgccgccttcggcacgcgtgccataggttgcctacccctggattagacaaacacctgtcagggatgtctagataatacttagttctgcttcaatgcagggtactggactagctgacatatcaaagtccctcccaggcctacatttctatgattctataattcctgtaacagaattgcttccgtttgtctcgtcacatttttcaacattaaattgcatttccctgttgctttatgggaattgtagttctggccccttttctatcctattggtcaagctccagggctggactacatcttccataatgtaccaagagtcgtgtgactcccatgatgcaccacacagggaaaatgctttttaggagatgtactgctagggagtatggcccagaggagagaatggggaccaagctacgattcccataaggcaatagttaaatgcagtttgatggctttttaacaaatttgaaagtaaatgtgttgggtcactttaaaaatgaaatattccaattcaggttgaactgacccaaaatgaaatatttcatttagttattcctgatggacgatctatctatctatctatctatctatctatctatctatctatctatatatatatatatatattttttacaaaatcaaaattgtcctgcaggaaattgattttttttgcagggactgcattttctgtaggaaataaattctgatggaaaattcccaaacagctctatttaaaaggagctttttaaaatgaaattaaaagagaacaccaatatattctgaatgactacaacaattcatgcacagtcatttttgtaaagaagcagtatggttttactgagaaaaagagtctttgaaagagcaaactacaatattttagtatccaatttcactgttaatgttagtaaacaaaatttgaagtaattttgaacagatcagaatttttctctcaaaacatttttgatagaaaatgcatttttatgaaaaaatacatttttattgctttcatcagtgaagaaatcccaaatccaaatattttagggttttttaaacccctctcctcccaattccctcccaccaaataaaaattaattttttcaacaaaaattttcataaaaggccaaaaaccaaaccaaccaaccaccaaacaaacaaaaaatcagccagagaacagcaaattgagggaatacccttgccccttcagtcagaacacagtcaaacttggcatgaatgtaacactggtctacaatttttgagaagtcgtctgcttcagagataaaatgtgctatttattatgtattttgatgtgctgaattcaaatatgacaattaaaacaactgattggctactgtttctaagatatttaagtttttacattttatgtctatgtatattgtgtagatagtagagttttaatcataaattgtaaacctaggtcttttcatgtgtttatggttgctttacatgataatatttcacctgtcctgtttatgtaacactttaaaaatcagcaaaagggttatataaataaaattgattatgaaacaaaaggcaaaaaactattctgtacatagtttagtcctattcagtgtctactcggcgcttcttggcttgtctcttgtattccttaaatggagcatctcttgtcactgtccagcaatagtctgcaagaattgatgggctccatttgccctgatagcgtttctccattgttgcaatgtcctggtgaaatcgctcgccgtgctcgtcgctcactgctccgcagttcggtggaaaaaaatctagatgagagtgcaaaaaatgtatctttagtgacatgttgcaaccaaggcttttgtatgccttgaggaggttttccaccaacaacctgtagttgtctgccttgttgtttcagagaaaatttattgccactaactggaaggctttccatgccgtcttttccttgccatgcagtgcatggtcaaatgcatcatctcgaagaagttcacgaatctgaggaccaacaaagacaccttcctttatcttagcttcacttaaccttggaaattttccacggaggtacttgaaagctgcttatgttttgtcaatggccttgacaaagttcttcatcagacccagcttgatgtgtaactcactcactcatgcccgtcaccccaatcggggtatgggccgccaaccacagatctccagagtcctttatcctgggccgtttgctctagctggttccaggtatagactcatacatggtcttcacgttccatgtaccgatggtaatcctcctggttgcaagaagggtaatcggcttagtggcttcctcatgactttcaccacccagcgtcatgcgtcttcgagttgaagacccttcttttccaggctaaaagtctctgttatctctattgttggcatttctgtagcaagttgattttttacggggtggagttgctagccccacgcccaaccctcctcctttatcctgacttgggacaggcagatggccccaaaggacctctctggtggagttcttgatgtgtaagggtggtaacaaaatcttccttgattcaacaagtggtggatgctgaacacttttcctcccaggctccaatgactgtcggagtggccaatctttcttgatgtagtgggaatctcttgcacgactatcccattcgcagagaaaacagcagtactttgtgtatccagtctgcagaccaagcaagagagcaacaaccttcaaatcaacacaaagctgccactgatgttggtcatagtttatgcacctcaaaagttgtttcatgttgtcataggtttccttcatatggactgcatgaccaactggaattgatggcaaaacattgccattatgcagtaaaacagctttaagactcgtcttcgatgaatcaatgaacagtctccactcatctggatcgtgaacgatgttgagggctgccatcacaccatcgatgttgttgcaggctacaagatcaccttccatgaagaagaatgggacaagatccttttgacggtcacggaacatggaaaccctaacatcacctgccaggagattccactgctgttgtctggagcccaacagctctgacttactcttgggaagttccaaatccctgacaaggtcattcagttcaccttgtgttatgaggtgtggttcagaggaggaggatgggagaaaatgtgggtcctgtgacattgatggttcaggaccagaagtttcatcctcttcctcttcctcatctgactcgagtgagaatgattctggtgcaaaaggaaccagcggtccttctccgtggggtactgggcgtatagctgatggaatgtttggataatgcacagtccactttttcttctttgacacacctttcccaactggaggcaccatgcagaagtaacaattgctggtatgatctgttggctctctccaaatcattggcactgcaaaaggcatagatttcctnnnnnnnnnnaaaggtgataggctttcttaaccatagtggttatactgcgcttttgtgatgcaaaagtcacttcaccacaaacagagcagaagttatctgcactgttcacacaagtacgaggcatctctgctcactttggctaaacagaaatgtgtccctttgcaaaatcaaacactgacaaataagagagcacgacactgtatgatttctagagctgatatagggcaatttgttcagcagagtgatgtaagcttcgttatgattgcatcatccatgacttctaggaataaaatgatgcaattcatatcatgtatgacgcaatgccagcttcagattgcatcattcattgttttgcctaaaaagcaagtactgtccaaacccagtcatagatttattcatagatccagtcaaagatgtattttagtcatttctggtttaaactgagatcccttccctttataactcacttatcctccgccattcccaagtcaagggtcgtatatactgacccaatagcatatcttgaaaactagagccaatcaacaattttaagcatcattttcgttctcagtgacccagaattagtaaagtttgactacatttatttcagaagcattttggctgtagagcagtgtaatcaaagaattccatagactggctaccaccgatgactatattctgcccctagcacccgatagtctaaatacgagactctccagtttcatcattcctttggatcat

SEQ ID NO: 6 - DNA, 9279 bp, unidentified
  misc_feature 1..9279: note = Fanzor polypeptide
  source 1..9279: mol_type = other DNA
tcaaaatacagcaaaaataaggttaggacggttaggacttaatcaagcaactatatatgcgatcgtttgccatctacaggatgtacacgtactactaatgtacttccgacaaaatgttgcgcctttcagtgaagtacatgcatataagattggtctccttaagtctatactccatgtcatctccacctgaaagaagaaatttttcttttagaatttttttctttggaaattttatattttccaaaaaattttttttaataattttcgaataactcccaaatatttccctcttttgtcgcaagttttatttttcaatttgaattttaaaaagtttcaaatttaatgaaattgtcttgtaaacaatgtagacttgagaaatattttaattcctacaatttatagaaaataatgaaattaaaattttgaaacaattatgtgataaaatcagaggcaatgaaaagtattttaaaatttttagaatatatgaaaatgcccatttatactttaaatatctcaatgtcgaaaaaaaatttaataaatttgaatacttattatttcattagaatttataattcaaaaaatttccattaaacaaattatcatttttaattaattaatttttatttagcaaatttaaaaggaaaaatttattccttaaattgaagactggataaaataaaactttgaaagaaaatgtatatacttttaaaaattaaataattatttatattttttaaattacaaactgttgatgactcttcactttcgttttcgtattcccttaaaaacaattcctttattaacaaatgattccgctgagaaattattaaatagttaacatttttaaatgaacggacattttgttattaaatgttgtattacaagaaatatcatatttatttaaattatatttaaaaattattgatatttatttaattttcattacttacaaatccacaagttgctcttaaattcgacattatgttcctcaatggctttcttttgagtattatcaaaagtgtctctttaatacaatacgaaactaatttgttcgatgtcattgtcatattgtcattcctcgaactaaatttgcgatataacacatattcttaggactatatttcacattttcctccacgtgacaaacaaactgtaaataatcaatcaatttaaaaatattcactcgcaattagtaaaattttaacaaaaaattaacttattgctgattttctttcttcaccatagtggtttgaatagcggataaaatttttcattatttcgttcaaaaatcttgaaagtctttacatattggcagtttgtgtcacaacaactaaatttgtctggagcaattgttttcccaataatcgttgtacacaatttgttaaattatgcatttcacaatttcagaaaatacaatttttaagacacaaactttaataccgttttcttaaaaaagtatttacataataagaatttgagtaaaatgaaataaaataatacataaactaaatcagctgctatttattggttatatcaactttctgtaagtaacaaattttaacgaaatctaatattttctttttctcagcaaagaaattcggtcgtctcgcacaagccgttcttcaacgtccgtgctgcttgtataaaagtagcgcacgcacactgggagcttcacttgcctccagtgtcttacacgggaaggaccttaccaacagtgcacgcgcactaacaaaacctccacgtcgaaggtgctcttgtcgagcttgagttggctctcagcaatatcttttctaataaatttttttttaaatttgttacagagcctttctagtcgaaaattgtcgagttgttaattctacaatcgcttcgctccagtgtcttacacgagaaggatctatctacgaaacctccactgcaacggtgctctagtcgagcttgattttaagctctacaaggaaattcattcgtgtctttctttaacgtccgagccttctttgcaaaaggtaaacatattttatattactataaatgcattttaaatgtttcttgacatcttgctatatttaaaaattcaaaatttgttatctaaaaatatattttctaataaaattttttttttaaatttgttacagagcctttatagtcgaaaattgtcgaattgctaattctacaatcactttgctccagtgtcttacacaggaaggatcgaaccatcaatgcagcgcactgtcgaaacctcctcatcgtttctcgtcaagatcatcatagggatgaatactttttaattttgcgaataagactagcataatttactttttaagaattgcgttttttgttttttttgcgttgttttcgatattttgtatgtctaatattggaaaaaccagtgaaaacatttggatctcggaattttttttatgtttgcgtttgtttttttaatgaagcaatgaatagtgacggagttggtgcaccattcaaacctttgaatgttggcacttcatacagtggtgtacaaaaaaacattggttccggtctaattcaactaaaaaatcctgatgcaacggagaagagaaaaatcattcctgacaatgatgaagaaccatcttgtagtgcacctaaaaaacgacaattggataaagagatggaaatggaagttgtttatgagaacattcgtctcgaagatcaaaatggcagtgttgatagtgataacaagaaagggaagaataagaagaaaaagattattggttctggtcttattcaagtaaaaaatccagttgcaacgcagaagagaagaatcattcctaaaaatgatgaagaaccatcttgcagtgcacctgaaaagcgaaaattggataaagatatggaaatggaaattgttaatgagaacattgatatcgaagatcaaaaagaaaaagaagccgcaaatgtcgatgttgatagtgataagaagaaagggaatagtaaagaggaaaaagaagacaattggttcgaagaactggaattaggcaaattacttaaagaagaagagcagggaaatatattttgtgttaaaacaggtctcaaagggttttgtaaaagtcaacaagtggtagaaatcattaaagaagatgttacaactttgtctccaatgctaacggaagtgtcatactttgctaaattttgcttgctgcatgacaaaaatccctggcttttgcaacattgggctacaacagacattgatcatcgcatgttaacacctttttttaaagtaactaatccgaaagaattgaatcgtataagaaacaaaaatccagaacttaccttattatttgatgaatactccgaaataaggggttcaactcttcaactttacgattttacaaaccgggatgtactcgtaagtcaagcaacgaggcaaatggattcgaatttgagaatacaactatgtgtaggcggaccacaatttctaaagaaattatttttaaattattcagcagaagaaaatgtccaacaaccagttgatgatgaagacgccctgctggaagtaaagagatacaaagagatagaaaaaaggggataaaaaaagattagaaggtataatagtttggggatgcaaaatggatacttaaaggagatacaaattgtttatctctttctattaccttatttatatctctttttatcccttctaatctctttatatgtagttttagatatagaagtatatagaaaaattgcttgaagtaaagagatacaaagagatagaaaaaaggggataaaaaaagattagaaggtatattagtttggagatgcaaaatggatacttaaaggagatacaaattgtttatctctttctattaccttatatatatctcttcttatcccttctaatctctttatatgtagttttagatatagaaagagataaaaaattagggatacaaagtggtgaattgaagtagatagaacttttctatctctttctattcctacatttctatctctctctgtatccattttcatatctcttctaatctaaataaaggcaaaaaagagatatagaaagggatatactagtagattagaagagataaacttattatatctcctcaaatccccatattcttaactttttctatctcttttaaatgaagtaaggagatagaatatgggattgaaagaagattaaaagaataccatttggaaaagaagaatgataaaaaggaatagaaaaagtttatcgctttgcagtctcccatttccatctttttctatctcaacttatatctcttttgcatttctaataaaaaaatgaaaaagatgaaaacgaataacttcactaccgctttaagcgaatgttatcaatttttattaagttggaaatatttttttaatttctgcagtcatttatagtaagaatattttactaacttctttgtggacatttagaaggacatttttctcttatgactctttaaaattaatttttaaatgagaaaagcctaattatcaaaagtgatataataaaaaaatattcttattttttaaaaaatgtcacaaattaaattaaatattttaaaaggcgtgtttttatgtaaaaataaaggttttttgtaattattgttatttattgacataaaattgtaatttacaaaaaaaattacagtgaaatacgaaagttaaaatcaaagttaatatatttaaaaaataatatttcttcatgttgtaagctcaggtattttttccaattccttatccactacgtctgtatcattctcctataaaaaataatattgttatgaaattaatccattaacattttaatgtttcgaataaagattgtgaagaaatttaataactgtgaacgccaaaaatggaatactcaaacttttgtataatacttaaaaagtaatttaaatttatacaattattttaccattgagttttcattcaattggtgaacttctttttcagtttcttcagtattttcctgctggtgctgaatgtttgtcgggtttactgcattttgaccgtctataaaaaattattaattttataagtcatacgcttaatttgaaatattatatttacttataattaattgaattaacttattaaagtaattatacttactgttggcaattcttttgcagtgcctttcccggagttttgttatgtattggcttaaaataattggcacatcatttttaaaaacatttattgttgacttatcatacggaggagtgcatttttcggcccaattttcgaatgattctgaaaaataaattatatattaaatataaaattattttctttatgtactataggtgcatgtaattattattttacataatttaccttgaatagcacatattttttggggatcaaggcgcggacgtgcaattgagttaattttccgagtcctgttcgatactttccctgtaacgctgctatttataagtatttgaaacccaaagcacgcctcagctaatttatttataaaaatttttggtgtcctggatgtaattgcaacgaaaacaacatcaacaacaagatttgtttggtcaattaaataaacaaaaccgggaagctcttggctgtatatcaaaaaaggacgtagattttaaaaatagtttgaacgcgaaattaaatgataaagagatgacagttgaggaagtgaacgaagaatatttaaaaagatttttcaaggttaataattttctcaaaggagaacgtctaaaaaataccaaaattcgcgcattttcgtctaatggtgtagatgtctcgataatctacgaaaagaaaacagttaagaaatcgataaatactgctactgctacctcgtccaaatcatcggttgacaaaaagacgggtccatgtaaatataagcgtttcgttgggctagaccccgggaaaaaagcaagtgttgcaggcgtcgaacgcttaggcgaaccgcatccagcgcaacataatataaacaaggacgataaacctatttacgctcgaagttcaagtgttaggtggttatgtggcgaggcaaaacggaaaagaatattgagaacaaagtgtcgtgatattgatgaacagtacaatgtatttcgcgaacaagatgaatttaaaggtattaatttaaaggattcatcagactttaggcgtataacaaagtggcgattggaaatttttaaaattaaaaaagattgtcttctgcgttcgtgtattactcgtttaaagtttaataaatacataaggtcgaatagtgaaatcgatagattagtaaattttattgtaggagacaccgacaaattgccgacgttagttgtacttggacaaacaaaaatttcgccaataatgaagggatacgtcggaactagacttacattaattgaaaaacgcttaaaagaacgcgctaaaatattaggggcagatactttcaagtcataaatgttcacgaaggttttacaactaagcagtgcagtacctgcaattccacatgcaaagtctcgaaaagagcacaccggtttgtcttttgccaaaaatgccatatcgtgtgggagcgtgatgtgaatgcgggccggaacattttgaacgttggattagtaaaagaaaatattattaatcggaacgaactgccggattccaatgttttcactgctttatctaaatcataaattaggctgtttgctatatattcgacagcccgctacaacatagcatacactgtttaaaatatgcctcaaactttacactaaaaaaattgaaacgttatttcaataggactgcaacttaaaaatatagaataatttcacattacattttggttgaaaatgattttgttttaaatttaattttttaattttaattgaaaaactgaagtcctattgacttgaattgattttaatgcatttatatcctcctacccaacttgaatagccttatctaatcaaatgaaaatactcacacttcttgagatttaaagtacagtagaatccgcttatagcgacttcgcttatagcgaccgactggttataacgacgtacacaaaccttttagtttggtttacattgaatttagtatggagatgagtccggttataacgacttcgcttatagcgaccaaccgtttatagcgacgtcttttttcagatgtgtccggttgtaacgacgaattttaaagtatacaaacaataactatgtctgagccatacattcttttgtcttgtttttcccaatattcaattcaatcaagtttagaaaacagtattatattgatagttactcaagagtgatcgttaatattaacaggagtaaaaatgacatcgattagagtctggagactcaaattcttctcttgcaaaagagtttggcgtgtctcactctacaatctcaactatttttaagcaaaagaagaaaattgaatcgtcatttaatgaaaatgttttgaaaccgaaacgtttaagaccgtgtgatcaaaaagaagttgatgaagctttattaaaatggttcaaagtgcaacgaaatcgagggattccagttagtggacctatattagaagtaaaggcgaatttctttgcttcggaatttaatattgtagactttaattgcacaccgagttgggttaatagattcaaaatgagacacaatattgttgctggtcaaataagtggagaatcaatgtcagtcgataaaaatattgtaagtgattggcaggaaaaagtgtggcctaatttacgtgcacaatatactgatgagcaaattttcaacgcagatgagactgggttgttttataaattaacaccaagtaaaactttgaaatttaaaggagaaacatgtgcgggcggcaagttatcgaaagataggataactgttatggttgcaaccaacatgagtggttcaattaaaaaaaaactgttaattataggtaaatctaaaaacccaagatgctttaaaaatgtacggtcgttaccagtggattataaaagcaacaaaagaacgtggatgacgtcagaaatttttacagagtgggttcggtcttgggattgtgaattgattaaagaaaaaaagaagattctacttttggtagacaactgtccatcacataatgctatcaaagacttaaaaagtataaatctagtattccttcctgctaacactacttctatattgcaaccaatggatcaagggataattcgagcattgaaaacaaattttcgtaaaagtcttgttttaaaaataattgactatctggatgaaatctccagctgtagtgacaaaaaaattattatttctgtactcgacgctatattgatgatttacgatgcgtggtcaaatataacacaacaaacaatttcaaactgttataaacatgcaggatttactagagtggatgaaaattatcccagtacatcaacggatttaactaacaatgacgaagtttctttatcgacttggatgaaagttatgctacccaacaatactgaggtaagtgcagcttaataataaaatcttacctttcttcaaaaaaattaaatataaattataaattctgttatagggcagtatggatcatcagctatctttaacaagcaaaataattgaacaatatgtagatgtcgattgcgatgttatcacatgtgaagatttatctgataagttaattgtccaggacatacagaacacaaaataccagagtgacgacaatgaagacgacgactcagaaattcatgacgacgaacttagtcggattccaaacgcatcagaaaccttaaaggctgctgatgtactgaattcatttgtacattttaattttagtgatgaaaatattaaaaatgctatgtctcgtattcataatgtgatacgcaataattactatgagacaaaagtgaaagagaaacaaactaaaattacagatttctttcgctcatagaaccatttaaatttaaataaaaacgtaataaatttctgaactgatgtttgatttttcctctttgacgcttataacgacgtccgattataaagaccaaaatcctccgtcccttgaatgtcgttataaccggactctactgtatgtaattttcaatctttcggtgtaaagttggtgtccgatttttaacagtgtaatgtgcattcttcaacattacttcccgatgcttttgatctgcggcaatctgccaatcttcttcgatatatttaaaacatttggcaacaaacttcgaaaggctcataatgtagaaattagtgggacctgcgatttcaattttttcacgaacttctttcatttcgtagagggcggacagaacatttg

SEQ ID NO: 7 - DNA, 9279 bp, unidentified; identical to SEQ ID NO: 6
  misc_feature 1..9279: note = Fanzor polypeptide
  source 1..9279: mol_type = other DNA

SEQ ID NO: 8 - DNA, 16680 bp, unidentified
  misc_feature 1..16680: note = Fanzor polypeptide
  source 1..16680: mol_type = other DNA
aataattaattattttttttaattatatttactttttctcttttattggataataacaatttgattaagaatttcaaataattatgatacacagtttaaatctaatattattatcctagtcaatttgactattttttcctgattgcatctactaattttcctagtcactttaactatgcttgaattttattactttgactaggattctatagttggctcctctcgtaactagaaaacctagtcaattcctggtatacgggtcctaggcatttttttcggtgtatctctcaaaaatattaaacaaaaacaattacaaattgcattattctatagaaaaattatagaaaaattatattaataactatagaagaattataaagtgagtataaaaattgtaatataattaagaatataaatttattggcaaaaaaattattttattgccaaaatgcagacgacaatcgactcgagctccaggaaaaaaataaaattgcaaacgaatataaataagatctgctcttgttttgttgaaaacttcacgcttccaagcggatttttaagattaaaagtcgattttcggctgcattttggcagaaaattctacacaatttctatataatattggagtttactgatttgtctttttttaaattaatccttggagttttgcgcatcaatacatggtgatttaatattaaaaaaacattgcgaacattcttcaatttccaataattgtttaaaagaattttcaataacaattataattataatttagtgtcagaaatttgacaaaaaaaggagtaaatagtatagattttagtagatgagtgcgaagcctgcttttttatatattacgtttccaaaaaaaaattatttttcaaaatattactgtttttaatataaataccattaattataaaataaaaattggaataatttttctaaacttccgtaatatttaaaactttataagaagtcttatcatttctaaaagtatgaacgtgaattcagaaaaacttttacgttagctaatttaaaaaattaattaaatgaaattcaaattagaaaatagaattatattcaatattacaattgttaataaattatattttatttgtcttcaagaaaacttaagtactttctaaatttaaaataaatgcaattaatttataattatgaaagtaaaattaagtataatacaataaagaattcttaatctcgttatttaattaaaatacaaactaattctataaaaataaagagcttttgaaaatatcaaaaaatcttattattaaaggaattattaaattattccaaagaaaaaatataaataaaaacgatttaaaaataaaatgtttcataaattagttattaaaaaaaatttccacatatttctttaaacaataataataatatttattattataatttttattattattaatataaaataaaaacagcaacttacctcaaaaatgctatccgtaattgatatagaacatttaattaattaccagttaattaacacttcacttaaatttattttcactatatacggagcgaaattggcaagaaattgaattcacttgactaatttctataccaagaacacctagctccatctctcgaacaaacttttcactttcctcaaatatgacaaatgtggggcctttgtccagtggcgcatttgaccggtggcgcatttgtccagtggcgcatttgagaacttacctttttcccgccatttacttttgtgtgggtactaatatacaaacgtttatttctatatatattattaaatagaaaaaaccgttaaacgttttcattatttttatatagactgattaaaaaagtgtagataaaaatggacggtaaatataagtgtatttaataattttacaaaattgaattataactttcaaatttatttaatttaaactgctaaaaaatttttattgatttaaatgtattgtatttccatgttatttagaggaaggtgcagcgaataataatcaacatatcgttgattctgatttgatttgtacgttggttctgtgcaaaaaggatgaacctggattctttttgggagatcgtaatatatgtgagtttattttgtcctttaaattttctctacataagtactaattctttttttttctctttccagatgaaaatttgataacatcagaatcgctaagaagaataattacatttttggagtcaatggaaatgctgatttattttaaacgtgtttatatcaaaaaataatattaaggcaccaacttcacctgtgaaggcaccatctccaattaaatattgatctcctttctcaaaagcaatcggcccttttcagggccccaaagtcaggcttctccttcgttgtgaactcgcaaagcacgtcgtctgtgaaggcaccaatacttgtcaccaagtacaccatctccaattaaatattaaacacctttctccaaaacaatcggcccttttcagggccacaaatctttttacgaaagaattattgagttcatttagtattaattaatttacttgaatagaagtgaaaaagatatttaaagagatttaattgttttcaaaaaaaaattcgaaattcaattatttttaatatttactattttcatcaaaatttcgcaaaaaatttagtgatttaaaaaaaaattaattttttctttttgtcaattttttaatatttatcacaagaattgaaagtaacaaattctttcttggaaattcaattatattagaaataattgtaataaaatcattcgcaataattcaattatattcataaccggatttattaatgaaaaaaaaacatttttgctaacatgaattgaaaaaagaactctctacaaatgttaataataatgcgtatttttacaatataaaaatttgagctatcttaactattcgagagaaatcacagcgaaaaaaaaattattatcatccaaaaggaggacgagacgaaacaataattaacaagtatataaatcataatagatttgcatcgtatagactatagtacgtataaagtacataattcgcagcttttttcctgaaattctacatcgagtttacaatcgtgactcttttctttttgtagatttttttcttgctttctttttttttgtcgtgtaaacacatgatgtagtctgaatataattttgttttttcaatcagtcgacatttcttccttcgcttattctcgtcaattgattaattgtttcatcatctaatgtgtgtttttccaaaagtctgcgagaaaaatgtgtatttccttcagttgaaaattagaatcgccaagttattgaataataccagcgacgtgtatttctctctccattttttaataattgctcagctttgtctaatttcctgtcgacgaatctcatctcccaaggagtatagacttaaggagaccaatgtagtgtgtatgaaatcaaccattttatgtcggaagttcatagttctgaatcttctcgtatagcgcgcaacgatcgcatatatagctgaagttttaaaatgaacatggatttctataagtttactaattcatgtatatactatatattcaaattataaatataataataataagataacaaaacaaagtctatattatagggctcggattgtgcgactttttttgtgaaaaaatgtgcctaatcgactttttacagatttttttgattcaggagtgtcaatcgcttgacataacctcaaactaaaaagtgatttttaacagcaaataaaaccataattaaaatgatttcaccaaattctgaaagatccagttgtacaattatcagaaataattaggttggaccaaaatttgttgtaaaatcataattgttaaacattatgtgttttttctttaagggtcagtaaccaattaaaatttttaaccaattttgataaataatagctcattctactctttgaaacattctctacatttccactcgttgaattttgtttaaaatattttgtttaaaagttattaaaaaaatttttttttattttatttgcttaacttttgaacaaaatattttaaacaaaatttaacgaatgttattgtaaagaatgttttaaagaacagaatgagctattatttgtcaaaattgttagatcactttttagtttgaggttatgttaataacctcaaacctcaaattatagtaataattaattttactataaaggtcatgttattcagagccacgtgcctattaaaactttattaaaattattgatagaacattaaactcttttaatcaattttattataacttttataaataattaaatttcttgaagaatttcttttttttttttaaattgaatcctttcgtgaagttttatagaaattgtattaaaaataattaaattcttccgaagaatattattatttatgaaagtagaattcattgtcataattttatattacctatttattatttgaaattacttttaatttcaaaatacagcaaaaataaggttaggacggttaggacttaatcaagcaactatatatgcgatcgtttgccatctacaggatgtacacgtactactaatgtacttccgacaaaatgttgcgcctttcagtgaagtacatgcatataagattggtctccttaagtctatactccatgtcatctccacctgaaagaagaaatttttcttttagaatttttttctttggaaattttatattttccaaaaaattttttttaataattttcgaataactcccaaatatttccctcttttgtcgcaagttttatttttcaatttgaattttaaaaagtttcaaatttaatgaaattgtcttgtaaacaatgtagacttgagaaatattttaattcctacaatttatagaaaataatgaaattaaaattttgaaacaattatgtgataaaatcagaggcaatgaaaagtattttaaaatttttagaatatatgaaaatgcccatttatactttaaatatctcaatgtcgaaaaaaaatttaataaatttgaatacttattatttcattagaatttataattcaaaaaatttccattaaacaaattatcatttttaattaattaatttttatttagcaaatttaaaaggaaaaatttattccttaaattgaagactggataaaataaaactttgaaagaaaatgtatatacttttaaaaattaaataattatttatattttttaaattacaaactgttgatgactcttcactttcgttttcgtattcccttaaaaacaattcctttattaacaaatgattccgctgagaaattattaaatagttaacatttttaaatgaacggacattttgttattaaatgttgtattacaagaaatatcatatttatttaaattatatttaaaaattattgatatttatttaattttcattacttacaaatccacaagttgctcttaaattcgacattatgttcctcaatggctttcttttgagtattatcaaaagtgtctctttaatacaatacgaaactaatttgttcgatgtcattgtcatattgtcattcctcgaactaaatttgcgatataacacatattcttaggactatatttcacattttcctccacgtgacaaacaaactgtaaataatcaatcaatttaaaaatattcactcgcaattagtaaaattttaacaaaaaattaacttattgctgattttctttcttcaccatagtggtttgaatagcggataaaatttttcattatttcgttcaaaaatcttgaaagtctttacatattggcagtttgtgtcacaacaactaaatttgtctggagcaattgttttcccaataatcgttgtacacaatttgttaaattatgcatttcacaatttcagaaaatacaatttttaagacacaaactttaataccgttttcttaaaaaagtatttacataataagaatttgagtaaaatgaaataaaataatacataaactaaatcagctgctatttattggttatatcaactttctgtaagtaacaaattttaacgaaatctaatattttctttttctcagcaaagaaattcggtcgtctcgcacaagccgttcttcaacgtccgtgctgcttgtataaaagtagcgcacgcacactgggagcttcacttgcctccagtgtcttacacgggaaggaccttaccaacagtgcacgcgcactaacaaaacctccacgtcgaaggtgctcttgtcgagcttgagttggctctcagcaatatcttttctaataaatttttttttaaatttgttacagagcctttctagtcgaaaattgtcgagttgttaattctacaatcgcttcgctccagtgtcttacacgagaaggatctatctacgaaacctccactgcaacggtgctctagtcgagcttgattttaagctctacaaggaaattcattcgtgtctttctttaacgtccgagccttctttgcaaaaggtaaacatattttatattactataaatgcattttaaatgtttcttgacatcttgctatatttaaaaattcaaaatttgttatctaaaaatatattttctaataaaattttttttttaaatttgttacagagcctttatagtcgaaaattgtcgaattgctaattctacaatcactttgctccagtgtcttacacaggaaggatcgaaccatcaatgcagcgcactgtcgaaacctcctcatcgtttctcgtcaagatcatcatagggatgaatactttttaattttgcgaataagactagcataatttactttttaagaattgcgttttttgttttttttgcgttgttttcgatattttgtatgtctaatattggaaaaaccagtgaaaacatttggatctcggaattttttttatgtttgcgtttgtttttttaatgaagcaatgaatagtgacggagttggtgcaccattcaaacctttgaatgttggcacttcatacagtggtgtacaaaaaaacattggttccggtctaattcaactaaaaaatcctgatgcaacggagaagagaaaaatcattcctgacaatgatgaagaaccatcttgtagtgcacctaaaaaacgacaattggataaagagatggaaatggaagttgtttatgagaacattcgtctcgaagatcaaaatggcagtgttgatagtgataacaagaaagggaagaataagaagaaaaagattattggttctggtcttattcaagtaaaaaatccagttgcaacgcagaagagaagaatcattcctaaaaatgatgaagaaccatcttgcagtgcacctgaaaagcgaaaattggataaagatatggaaatggaaattgttaatgagaacattgatatcgaagatcaaaaagaaaaagaagccgcaaatgtcgatgttgatagtgataagaagaaagggaatagtaaagaggaaaaagaagacaattggttcgaagaactggaattaggcaaattacttaaagaagaagagcagggaaatatattttgtgttaaaacaggtctcaaagggttttgtaaaagtcaacaagtggtagaaatcattaaagaagatgttacaactttgtctccaatgctaacggaagtgtcatactttgctaaattttgcttgctgcatgacaaaaatccctggcttttgcaacattgggctacaacagacattgatcatcgcatgttaacacctttttttaaagtaactaatccgaaagaattgaatcgtataagaaacaaaaatccagaacttaccttattatttgatgaatactccgaaataaggggttcaactcttcaactttacgattttacaaaccgggatgtactcgtaagtcaagcaacgaggcaaatggattcgaatttgagaatacaactatgtgtaggcggaccacaatttctaaagaaattatttttaaattattcagcagaagaaaatgtccaacaaccagttgatgatgaagacgccctgctggaagtaaagagatacaaagagatagaaaaaaggggataaaaaaagattagaaggtataatagtttggggatgcaaaatggatacttaaaggagatacaaattgtttatctctttctattaccttatttatatctctttttatcccttctaatctctttatatgtagttttagatatagaagtatatagaaaaattgcttgaagtaaagagatacaaagagatagaaaaaaggggataaaaaaagattagaaggtatattagtttggagatgcaaaatggatacttaaaggagatacaaattgtttatctctttctattaccttatatatatctcttcttatcccttctaatctctttatatgtagttttagatatagaaagagataaaaaattagggatacaaagtggtgaattgaagtagatagaacttttctatctctttctattcctacatttctatctctctctgtatccattttcatatctcttctaatctaaataaaggcaaaaaagagatatagaaagggatatactagtagattagaagagataaacttattatatctcctcaaatccccatattcttaactttttctatctcttttaaatgaagtaaggagatagaatatgggattgaaagaagattaaaagaataccatttggaaaagaagaatgataaaaaggaatagaaaaagtttatcgctttgcagtctcccatttccatctttttctatctcaacttatatctcttttgcatttctaataaaaaaatgaaaaagatgaaaacgaataacttcactaccgctttaagcgaatgttatcaatttttattaagttggaaatatttttttaatttctgcagtcatttatagtaagaatattttactaacttctttgtggacatttagaaggacatttttctcttatgactctttaaaattaatttttaaatgagaaaagcctaattatcaaaagtgatataataaaaaaatattcttattttttaaaaaatgtcacaaattaaattaaatattttaaaaggcgtgtttttatgtaaaaataaaggttttttgtaattattgttatttattgacataaaattgtaatttacaaaaaaaattacagtgaaatacgaaagttaaaatcaaagttaatatatttaaaaaataatatttcttcatgttgtaagctcaggtattttttccaattccttatccactacgtctgtatcattctcctataaaaaataatattgttatgaaattaatccattaacattttaatgtttcgaataaagattgtgaagaaatttaataactgtgaacgccaaaaatggaatactcaaacttttgtataatacttaaaaagtaatttaaatttatacaattattttaccattgagttttcattcaattggtgaacttctttttcagtttcttcagtattttcctgctggtgctgaatgtttgtcgggtttactgcattttgaccgtctataaaaaattattaattttataagtcatacgcttaatttgaaatattatatttacttataattaattgaattaacttattaaagtaattatacttactgttggcaattcttttgcagtgcctttcccggagttttgttatgtattggcttaaaataattggcacatcatttttaaaaacatttattgttgacttatcatacggaggagtgcatttttcggcccaattttcgaatgattctgaaaaataaattatatattaaatataaaattattttctttatgtactataggtgcatgtaattattattttacataatttaccttgaatagcacatattttttggggatcaaggcgcggacgtgcaattgagttaattttccgagtcctgttcgatactttccctgtaacgctgctatttataagtatttgaaacccaaagcacgcctcagctaatttatttataaaaatttttggtgtcctggatgtaattgcaacgaaaacaacatcaacaacaagatttgtttggtcaattaaataaacaaaaccgggaagctcttggctgtatatcaaaaaaggacgtagattttaaaaatagtttgaacgcgaaattaaatgataaagagatgacagttgaggaagtgaacgaagaatatttaaaaagatttttcaaggttaataattttctcaaaggagaacgtctaaaaaataccaaaattcgcgcattttcgtctaatggtgtagatgtctcgataatctacgaaaagaaaacagttaagaaatcgataaatactgctactgctacctcgtccaaatcatcggttgacaaaaagacgggtccatgtaaatataagcgtttcgttgggctagaccccgggaaaaaagcaagtgttgcaggcgtcgaacgcttaggcgaaccgcatccagcgcaacataatataaacaaggacgataaacctatttacgctcgaagttcaagtgttaggtggttatgtggcgaggcaaaacggaaaagaatattgagaacaaagtgtcgtgatattgatgaacagtacaatgtatttcgcgaacaagatgaatttaaaggtattaatttaaaggattcatcagactttaggcgtataacaaagtggcgattggaaatttttaaaattaaaaaagattgtcttctgcgttcgtgtattactcgtttaaagtttaataaatacataaggtcgaatagtgaaatcgatagattagtaaattttattgtaggagacaccgacaaattgccgacgttagttgtacttggacaaacaaaaatttcgccaataatgaagggatacgtcggaactagacttacattaattgaaaaacgcttaaaagaacgcgctaaaatattaggggcagatactttcaagtcataaatgttcacgaaggttttacaactaagcagtgcagtacctgcaattccacatgcaaagtctcgaaaagagcacaccggtttgtcttttgccaaaaatgccatatcgtgtgggagcgtgatgtgaatgcgggccggaacattttgaacgttggattagtaaaagaaaatattattaatcggaacgaactgccggattccaatgttttcactgctttatctaaatcataaattaggctgtttgctatatattcgacagcccgctacaacatagcatacactgtttaaaatatgcctcaaactttacactaaaaaaattgaaacgttatttcaataggactgcaacttaaaaatatagaataatttcacattacattttggttgaaaatgattttgttttaaatttaattttttaattttaattgaaaaactgaagtcctattgacttgaattgattttaatgcatttatatcctcctacccaacttgaatagccttatctaatcaaatgaaaatactcacacttcttgagatttaaagtacagtagaatccgcttatagcgacttcgcttatagcgaccgactggttataacgacgtacacaaaccttttagtttggtttacattgaatttagtatggagatgagtccggttataacgacttcgcttatagcgaccaaccgtttatagcgacgtcttttttcagatgtgtccggttgtaacgacgaattttaaagtatacaaacaataactatgtctgagccatacattcttttgtcttgtttttcccaatattcaattcaatcaagtttagaaaacagtattatattgatagttactcaagagtgatcgttaatattaacaggagtaaaaatgacatcgattagagtctggagactcaaattcttctcttgcaaaagagtttggcgtgtctcactctacaatctcaactatttttaagcaaaagaagaaaattgaatcgtcatttaatgaaaatgttttgaaaccgaaacgtttaagaccgtgtgatcaaaaagaagttgatgaagctttattaaaatggttcaaagtgcaacgaaatcgagggattccagttagtggacctatattagaagtaaaggcgaatttctttgcttcggaatttaatattgtagactttaattgcacaccgagttgggttaatagattcaaaatgagacacaatattgttgctggtcaaataagtggagaatcaatgtcagtcgataaaaatattgtaagtgattggcaggaaaaagtgtggcctaatttacgtgcacaatatactgatgagcaaattttcaacgcagatgagactgggttgttttataaattaacaccaagtaaaactttgaaatttaaaggagaaacatgtgcgggcggcaagttatcgaaagataggataactgttatggttgcaaccaacatgagtggttcaattaaaaaaaaactgttaattataggtaaatctaaaaacccaagatgctttaaaaatgtacggtcgttaccagtggattataaaagcaacaaaagaacgtggatgacgtcagaaatttttacagagtgggttcggtcttgggattgtgaattgattaaagaaaaaaagaagattctacttttggtagacaactgtccatcacataatgctatcaaagacttaaaaagtataaatctagtattccttcctgctaacactacttctatattgcaaccaatggatcaagggataattcgagcattgaaaacaaattttcgtaaaagtcttgttttaaaaataattgactatctggatgaaatctccagctgtagtgacaaaaaaattattatttctgtactcgacgctatattgatgatttacgatgcgtggtcaaatataacacaacaaacaatttcaaactgttataaacatgcaggatttactagagtggatgaaaattatcccagtacatcaacggatttaactaacaatgacgaagtttctttatcgacttggatgaaagttatgctacccaacaatactgaggtaagtgcagcttaataataaaatcttacctttcttcaaaaaaattaaatataaattataaattctgttatagggcagtatggatcatcagctatctttaacaagcaaaataattgaacaatatgtagatgtcgattgcgatgttatcacatgtgaagatttatctgataagttaattgtccaggacatacagaacacaaaataccagagtgacgacaatgaagacgacgactcagaaattcatgacgacgaacttagtcggattccaaacgcatcagaaaccttaaaggctgctgatgtactgaattcatttgtacattttaattttagtgatgaaaatattaaaaatgctatgtctcgtattcataatgtgatacgcaataattactatgagacaaaagtgaaagagaaacaaactaaaattacagatttctttcgctcatagaaccatttaaatttaaataaaaacgtaataaatttctgaactgatgtttgatttttcctctttgacgcttataacgacgtccgattataaagaccaaaatcctccgtcccttgaatgtcgttataaccggactctactgtatgtaattttcaatctttcggtgtaaagttggtgtccgatttttaacagtgtaatgtgcattcttcaacattacttcccgatgcttttgatctgcggcaatctgccaatcttcttcgatatatttaaaacatttggcaacaaacttcgaaaggctcataatgtagaaattagtgggacctgcgatttcaattttttcacgaacttctttcatttcgtagagggcggacagaacatttgagagaattgcacaaaccatgaggaaacaggcacatatgtttagaaaaaatttaataactttcttaaatgaaaaatcgtgagaattaaatggccataagccgagaattaatgctagaatacgacaaaggtttatagtgaattttacatcttttctatacgattcattactatttccatcaagtttgatagacattcttctttctgcaattcacttcatactgaacttacttgcatcaaagattcaactttccgttgcgcttgcgctgtgcctgcttgaaaagaaattcaatgcaataattattgtccatcattttttcagtttaatgatagagtataagagtccatattaatatttgtaaataaaaatatgaatgtgttttggattttgaatattgtatatgaggcattccatttcaaaacgacctccttcgtaaacaattgccaatgtaagacaatttttaaatgaatatttcttccattctatagaaccaaattactttttatattagtgatttcgaaagtagaatttctgaattttctaataagaaaaaaaatatatttttttaataatttaatttaaatagaaaattgagtttaaaagttaaactttgaaaaatctcaaaacacgttacctccgattttaataaaattcatatcaaacgataataatggacatttcagtagattttgagaaaataattaaattttacaaacattttaaaggttatattgagaaaaccatttattaagtacagggcggcatttgtttttcccaatttatgcataaaaaccttctaaatgtctgtaaaatttaattattttctcaaaatccactgaaatgtccattattatcgtttgataaataaaaataagaatattcaagctttcgtttgatatgaattttattaaaatcggaggtaacgtgttttgagatttttcaaagtttaactcttaaactcaattttctatttaaattaaattattaaaaaaatatttttttttcttatcagaaaattcagaaattccactttcgaaatcactaatataaaaagtaatttggttctatagaatggaagaaatattcattttaaaattgtcttacattgttttgaaatggaatgcctcatataatatccaaaatattaatacaaaattagttaattaattttctatgtattttataaaatctttgacaatcgcttgacgtctatcaattctagaaaatgacatccaataatatacatgtaaatatttaacaattttgattttttaattgataaaaaaagttttcttgaaaaatttgaaaaggtggtgtttgttataatttttctatatattatactttaaaattgaaattataatactcgttgactcggagtgatcgttaaattaaatttctaattaaattataaaagttttaatttcaaagtatgtgagaaaaacaatagtattttaaaattgtttgacaagcaaagaacaagaataaaaaattctagacttcgaggaaaattgtaactttacagttatgttttttcaatagttacgtaactttatcaaactttaaaagaaacgaacaaatatttaagtgatttagaaaaaactatctttaatatacagtaaaagttttaaacaattttttccaaaggaattaaaaatcttaattctgtgttacattttccatataatatttaaataggctgcggctgatttaattatctgaaaaaaataataaatcattaggaattctaaataatagcagtatttctaagaatataaaactgagacaaaacacttttgattctttttttgtctcaatttaatatctgctgaaaaactgtaaacaattagttttttaaaaacaaattgcataggaaaagagagttattttaacactacatttggtgtttaaataacactatgtgtgtttaattaatacgcaattttattgagttttgaatttgcagacactgaaacttgcaggaatattggaaattttgagaaaatggcaatattgatgcaagttttggtgcaacattttccagactattgaatttatgtaattgaagggctacataaaataaggggacgaacgcgaggcttggaagggatattaccagtcgggtagcagtgacaagccgtgagccgctcactgctacctgactgatattatccctttcaaccacgcgttcgtccccttattttatgtagaccttcaattgattcaatattatgattaaatgtataaaaagaaattataaatttaaaaacaaactaactgcggtaaacgttgtcatagacagaaaaacgacttttccagctgtgactctgattggaaattgacaaacttgaatgaaaaaggacaattccaaagaaatatttcttggcagtttataccattctatcatatatccagtatttccaactttttccgcctatgttaaaaaaaaattatatatgttcagtgattagtgaaaattttcactttaaatttactattttaataagtattatgtttacttgaattgtaagaagttctccaaaatatgcatatataaaaatgttgaaaataaaaacattcagaagaattgcgtaatttatgaagttaccaagatttcctgccttccaattctattgatcattgatgaaaatgtaataatgtattgacttttctacatgaaaatcattaatgataaaacgcccaagccttctggactccatttcggtcttctagaaggccgaattttcgcatttaaagccttaatcgatggtgccttggacgttctatcataaaataaaatagaaaatttttagttaataataatttgtgttttaccgtcactgagaaataacccaaaagactcaaattgatggcacatcccaatatttcgacaagaaatatttcacaaa

SEQ ID NO: 9 - DNA, 21083 bp, Pyropia sp.
  source 1..21083: mol_type = other DNA
  variation 1093..1592: note = n is any nucleotide
tccaccacgggactccggctttggagtccatcgcgcccagggcaacatgcacttggtgcttgcgagcaagacgggggtgagggtgcaccaacccgttccccgtaaaatcagttacaacatcaacgtgcgccaccgagttggggggcaacgtgactttgcgggctaaacgcagggtagcagtaaacccttccctcaccgaacaaacaggcttcgactgtgagactgtcacaggagccacagacattcccttaccaaggatggggatagtctccccattcatcaacttgacccagtactcagggccacaaatcaaaggcacttgtgtaacaacataaggggtacccagaagcaggggtaccgatatattctcaactacgccataggtcacgtcgacctcatgggtccccaacctagttggtagggtcacggcaccaacgatgggaagtaccccaccattgacgtcaatcatatggtcagctttggacctccagcgttggagcttcacctcctttggtaatagcgacttgcgtatcaaggaggctcctgacccggtatcaagtacgatacgggcacaacaggcacggccgggggctagttgcacccgtccagccacctggaagtttgcacccgtcagcaccgcgatgacccgacgtgggtttacgttcttggggagtcctacccgaggtgggcggactcccttaggtcgccgcagtatccggcacggctggttcgtcctcctggcccacttggccgaggctgccgttgtgagcttcggacgaccagccccaacggtcattcgtttcccgccgacttggcgtccgaatctgagggcggggaggaagacgacgagtccgaggacgacgtgtccgcctcctccgccgagggtgtggcgaccgcaacgaccggtcgagacccaccctcgcgggtgaacgtacttcgttcgtagccgactttttactcgcattcctaaacaagttgttggatgcgtttactcaacttggggcaaatcatatgcccagtgaccatcggagtttgcagttccaacaccgatggtccgttccgggaggggacttcccaactggggaagacgaannnnnnnnnnnnnnnnnnnnnnnnnnnnnnnnnnnnnnnnnnnnnnnnnnnnnnnnnnnnnnnnnnnnnnnnnnnnnnnnnnnnnnnnnnnnnnnnnnnnnnnnnnnnnnnnnnnnnnnnnnnnnnnnnnnnnnnnnnnnnnnnnnnnnnnnnnnnnnnnnnnnnnnnnnnnnnnnnnnnnnnnnnnnnnnnnnnnnnnnnnnnnnnnnnnnnnnnnnnnnnnnnnnnnnnnnnnnnnnnnnnnnnnnnnnnnnnnnnnnnnnnnnnnnnnnnnnnnnnnnnnnnnnnnnnnnnnnnnnnnnnnnnnnnnnnnnnnnnnnnnnnnnnnnnnnnnnnnnnnnnnnnnnnnnnnnnnnnnnnnnnnnnnnnnnnnnnnnnnnnnnnnnnnnnnnnnnnnnnnnnnnnnnnnnnnnnnnnnnnnnnnnnnnnnnnnnnnnnnnnnnnnnnnnnnnnnnnnnnnnnnnnnnnnnnnnnnnnnnnnnnnnnnnnnnnnnnnnnnngcacagtatgcccggaccttctcagcgggaaggtcctccacatagtcccacgtatcatccttggctttgtagccaaaccaacgcaccctcaacatgaggcggtcagtgtcttcatcccatccgtggtcgatgaacttatcaaacacgtactcctgcgggccctgtttggccgcaggcagtgagggaggtgctacgcttccaaagcacgcgcccaagctgggtcgcctgcaggcggtggtgcaactttgaccacgtcctgtccgttcactgtgcggaccccatcgtcactttcgatggtgaagcgccgcccatcagtacgaaggacctggtacggtcccttcgtctggaataccagcttacccccagttggggtgtgcgagtgtaccagcacccagtcaccctgctcggggacatgtttagcattgcgcacctttttgtcaaaggtacgcttgtagcgcttttgtgctttgtccatctcagccctgactttagggatgaggtttttcaagcctagcggcgaactccgccttactctcagtaggagtaggcgtactgccaccatcctccctagttgggagcgaccgccgcacggcaatagaccgcacgcgacggggggtcacaaaagcgaggggtacttcccctgtagatgagtgaacctgcgaattgtaggcagtagtaaggatagaaatgtattggtcccacgtcttcacgtgctcactcacatagtggcgcagctgcctaacaatagttttgttgaagcgctccacctgcccattagtttgtgggtggtagggggtggcatagtttgccttaacccccaacatatccagcactccctgaaacagtacagacgcaaattgcggtccattgtccgatagtgtactatctgggatgccatacgcggcaacccggtaatctaggaaggctgacacgacgacatggccgtgatctctgccagtgggatcgctcgcgtaagtttcgtgaagcggtcacagatgaccaggaggtactggttgccctcctcggtcacgggcagtggcccaaggatgtccatcgccaacgcggcgaagggctccttggccgggaataatagcatagccgtactaggccgccgttccatcagacggttctgtgcacaacttgtgcaggcagccacccaactgtagatgtccaccaccatggacggccagtagtacctggtcctcagggtctggtacagtttactagaccccaggtgtccacccgtgggagcgttgtgctccctctcaaggatactgtccttgagggatgcggggacgacaagttgttcggtcccctggaatacccccctcctcatgaggaggccatcgtctcccagaaagaaacgcgtctctaccactgtatccagtatatccctctgcgacttgcagaagggatcctcggcctgggccttcaccacctcctccagggacaggggcaagtacttcttgttccctggcgcctcggggttcaacgcctgacccgagcgcgtgactacccccacgatggggatgtcctcatcaactgggttagtgtccagcccctcggtaggtacccgagagaggccgttggcaagggcatgttgcctgccaggtcggtactcagtatcaaagttgaacggtgccagtcgcaccctccaccggttgagacgagtgttcgttcagtccgtcttgcagataaactgcaacgcgcggtggtcacagcggatgaggaacttctcaccctctaggtagtgacgaagtgacgtcaccgcccacaccactgcgagtccctccaactcgttgactccgtagctcttcttggccgagttcagccctttactgaagtatcccaccggcaagtactccttgtccggctgctgctgaagcaacacacaaccaagttggtcgtagctagcgtccacatccaggatgtagtggcctcccaacctgggaatagccaagatagggggcttcagcagtaggtcccgaagagtctcaaagggttcctgctccacccgacttagggaaggcaggttcttcggtagcgtcgagctaactagctcagtcagtggcttagccaccttggcgaagcccttggtgaaacgtcggtacacgctacacatcccgaggaagctcctcatctgggtctgggtccgggggtactgagccttacgaatggccctcaagatcttctcgttaacactgagacgccccggatggacaacatgtcccaagtactccacctcttaagtaaagaggtggcacttactcgccttcagtgacacaccggcgtccgcaagtagcttgaacacctggccaagatggccaatgtgttcctccggacttcgggagaacacaatgatatcgtctaggtacacaagacagatctgccaccgtactccggccagaatcatgtccatagcgcgctggaaagttgccggcgcgttacacagaccaaacggttgtcgcttgcactggcaggtaccacagtgacaggtaaaggtagttttatgcctgtcttcctgggcaatgggaatttgccaataccccgcgttacagtccagggtagagaacacttttgcctcccccagagagtccagacagtcatccatcctaggtaggggataactgtccttcaccgtgctctcgttgagcttacggtagtcgatacaaaaccggggggtcccatcaaatttggggacgataaccaccggactcgcccactcggcgttgctggcctcaatcacatcgagggcctccatgcgagcaacttgctccttaacgagggcccttgaacgaggtcctcccctatacggttgttggcgtatagggggtgcaccgggcttcaactcgatccggtgttgggtggctctcatgagtcccaattgaccatcccacaacttgtgatattggtccaagaggcgttcaacttgaaccctcaacctgggggggacaccctccatgttcacatggggccgaggagaggcggccgacttggcttgatgcttctcctttccggacttcgggtcgctacttgcgcccgcgttgagggtgagcgctactaccggtccctcgtgttggtcgatatagccgaacttggctcccgacttgaagtacttgggcgtcgggctcaggttcatcacctggatccaccacgggactccggctttggagtccatcgcgcccagggcaacatgcacttggtgcttgcgagcaagacgggggtgagggtgcaccaacccgttccccgtaaaatcagttacaacatcaacgtgcgccaccgagttggggggcaacgtgactttgcgggctaaacgcagggtagcagtaaacccttccctcaccgaacaaacaggcttcgactgtgagactgtcacaggagccacagacattcccttaccaaggatggggatagtctccccattcatcaacttgacccagtactcagggccacaaatcaaaggcacttgtgtaacaacataaggggtacccagaagcaggggtaccgatatattctcaactacgccataggtcacgtcgacctcatgggtccccaacctagttggtagggtcacggcaccaacgatgggaagtaccccaccattgacgtcaatcatatggtcagctttggacctccagcgttggagcttcacctcctttggtaatagcgacttgcgtatcaaggaggctcctgacccggtatcaagtacgatacgggcacaacaggcacggccgggggctagttgcacccgtccagccacctggaagtttgcacccgtcagcaccgcgatgacccgacgtgggtttacgttcttggggagtcctacccgaggtgggcggactcccttaggtcgccgcagtatccggcacggctggttcgtcctcctggcccacttggccgaggctgccgttgtgagcttcggacgaccagccccaacggtcattcgtttcccgccgacttggcgtccgaatctgagggcggggaggaagacgacgagtccgaggacgacgtgtccgcctcctccgccgagggtgtggcgaccgcaacgaccggtcgagacccaccctcgcggcgtgaacgtacttcgttcgtagccgactttttactcgcattcctaacaagttgttggatgcgtttactcaacttggggcaatcatatgcccagtgaccatcggagttgcagttccaacaccgatggtccgttccgggaggggacttcccaactggggaagacgaagggataccctgggaagttcccacggcagctactaccctctccttgcggattcggcgtgcctctctcaactctctggcctggcgcgcctcctcccgttccttggccaagtcggcctgacgctcctggcgttgttcctcccgcaacttgcggtaggcctcgcctctgcgataggcgaacctggccaactcggccagggtcgcccgggcagtgttatgctcccgggtctccatccggactgaccaatggagtccctccacaaaccgactcttcaccacagcttgtggatgaagaaacctacaaagattgttgagcttacggactcgctccgcaaaggagaactcgtcctccgcctcttcctgatgggcttgcgtaaactcctcgacttgagaagccaacgctgcctcatcaaccatggctctcatcaaccagttgacgagctccaaataggacgtcacctccccagcgcctccacttaaggggctgggcatgacggacataagttctgtccgtaggtcgcccttcgtaaactcctgtagcatgtaaaaagccatgccttcatttatggcattgtcgtcgcagccttttgtgaaacgacgtaggaactcaaagacacggagggggggagttccatcccactccgctttgtgccgaaaagcatgaagtgcattcttcttggcacggcccatggctcgggcctggtcaggaccatacgccaccgacttgttgtggagggcgtaggtctcacagtcaaagatcctctggtagaccgggttggctacctggatcttgggcggcacctcacgttgagggaaaagccgctgtggcactggggtaagttcactctcagtgcctgtagtccggcgcggcgcgcttggtgtagccgccggcgtttccggggcgaactcccccgtgaagggcgtacgccccaccgagtatggtgtggctccctcgttgggagtcacaggtgtcgcccccagttcggggcgaccagagataggcgtaaggggggattacccctgcgcctgcgggctcgaaagccccaatccggtttggacattaaggccatctggcaaactcgccacaatctgattcagaatagtattcttcatcgtgaccaccaggtccggcaaagtctgccgcaacacattggtcgcctcccgacggacaatttccgcgaggagtggattgacgactccagttgagtcccggtccgcctccgggagtccacctgaggggtaaccacgttcctcaggggtctcaaccgggggcatgggcgcgagcccatcgccgaccaacggaggtccgccgtcctccgaaagcctagttggcgacgactcctagccaaagttggctccaaccagagtggaacccgcggggacagtcctcaccccttgggacgttcccgttgagtataccacacggtggccagacttcggcccacccacatcagaagtgtcacccgagtgaactcccgactgagtcggggtggcctgttgcccgcccgtacttccagtcctgctggcttgagcgacctctagtccctctgcgaccccaggtacacctacctgtgtctcaccaggatttgaaggcactgaagtacgtgcgtcacccgtgtactccccggacgacggggggtccgaactagccatgttggctgacgatccgtatgacacggtccaagaccaccgttcctctgagacagaggaacccctacacccgggtgcacccggaggtaaagtttacctctgtcccctgctgctccaccaaatgtggcaaaaaccactagcacacacggcacccaagttggggcggtgtgctagggctgcctcccgtgtcgggggaaccggaagaagtgcaagtcgcacacactctgtccctgttgtggggcaaaccccccacggacaaacaagaggatggtgtgtggtccaacagtttcttggtcgggacggggacgccgggccaagccccgctgtccctccccttatccccccagggtccactcagaatctcgccactcagaatctcccatcccagcacctgcccaccgggccacacgaaaattcaagacgataaatgcagaaaaccctggaatccaagttggatttactactaagctaactatcccaaacttagggaatatggacccaaatgcagggggaggaacggatcaggctagtggcctgccgccccttgcatggcacgtgttgcccccttacctgggggtcaatactgccacacaggcggccaaggatgaggaggcggcgggccccctcgacggcgccggcgaggacctcgtcgcggccatcacaggcgcggcagaggcgttcagcgtttactgcggtggccgggcggcggcaagcgagacagaggtggagctcgccgcacgtgccaagacggccgctggtctgattggcgtggccgccgcgggcctcccccggcgcgaggctccctcggacgcatcgcgcgcccgcaaggggcggacgcaaaattgtggcggatgtggcaagccggggcacagggccagcttttgcaacgcccctgctggtgccgttccggcagcctcggccgccgtcgctggcccggcggcggccgcgtcaaagtgtcgtgactgccttggaaggggccacagccgcggggaccacgcctgtccggtgcagcggcactgtgggggtgggtcggcggcgtaagaccgcggcgtcgaccccgactgcaaggacccgcggcaaagcagtggacggcagacgcgggcgtgtatcgtgcgggtgggcgtcctctctagggcggtgtttagggacgacaaggacgacgccgaaacgcgtgcggcggtggtgacggtgctgcaagcagagctgggggaactctctggggcggctaccgagctccgcttcctcatgctccgcgtccccggcggggcattgcggcgccttgtggcagccgtcgcggacgcagccggcgacaccgactggacggcggccgtgctcgcaaactggacgcccgtttggccgtgatcggggtacgcctgcgactgcgagggtgcgtcttgcagtcccctcaagaccggcaccgtgtgtgcggggtgtggcaaggggtgagctaacacgcggttggcgcgcgcccactccgtggtgatgaagagccacccgctgctggcagaggcgctctcctacgccttgacgcaggtgatggccgtcacggcagccgcatgtgacaggtaccttccggcaagcaaaagcacggcacaatgggagcccgtcgcaaccatcggggccacccatgccgagcggtgggtgaaggcggcgtgtcgcaaactgggcgccaaggcggtctaggacgtgctggccacactccctgctgccactgctgatgcgcgcggcgcctgcggctctcgctgggacacagagcggcggctaacgcggtgggcggccgcgcgcttccgtgcgggtgccgcgagccaggcaaggccgggccggtggggcctcgacagcgtctcccaaaacctcgtccaggcgctggtgcaacgggtggccgtcatgtgggcggccatgccaccctctgtggcgagcctctttccagcaacgcctgcaaagaagcgccgctggtggcgtacgtgccgtttctcctccacgtcctgaatgtgggtgtggatagcccgtacgccctcatcccgggcgtccgggatgtgcatcaggggcactgcacgctggagccgagaaagatgctcgcgctgtagcgggcagtggcggacgccacaggcgtgggggtgcgtggccgacccagtcttcgggcatggccagaactacaaatagaaggtgcagcagtgctgaccgccatggctggtgtcggttgccgcgccaaccgtgccgcctcccagctgtctacccacggcgaggccgtgacgtaatttctgtcgcgacccgacacggccccagaggccgaggcgcgggcggtgccctgggcaaagaagctgtgcggcggtagacctgcacagggctgcagtgtcaatggctttgcgtcccgggagggggcgctgacgcagctggggtaggctgccctgccgttggcgctctgttgaggctccagacggtcggcggagacccagaacggtctcccgtattgtcgggagccgcgggtgagcgcgtggcgacggcagacctccccgcccgccccgtagttgacgcgatgcgcgcctcgtgttcccgccctatgggcctggccgcgctcaaccgtggcgctactgcgtggtgcgggcgtccaagacggggtggcagcagacgaaggcatgcccgggggccgcttacccagtgggtctaggaagcgggcggccgcgggcgccccggctgcaggggcggcgagaagagggagggagcgctccaagcggcaagcgcggcggtcgtcacttgcgaggagcaatgatgcggcggcggtggccccggcagcgggaggtgaggcggcggcgggtgcggcgccccccccggcgatgacttaccagacgggcagccccagcagtggcctcgggcgtgtgcggcgagggccacaggcgtcgatcgaacggggccgccgcacccagctcgccacttcggtgcggcgcgtactgcgtctcacgcgcctgtcccggtggactgtgccccgtcacgaggcggaaaagatggcacggtggctggtggaccccactgcctaccgcgagcggttcggcgcgaatgccacgcgacaactgcaggcgatgcgtgtgcgcaaggccatccagcgcggccgcttcgctggcttggtggcgcgggacctgaccggcggcctccttcgccaggtccgtggcggccgcgcggtcttcgtggccatgggcagcgagcacgtgcgcgcgggggacgcctggctccgccgctacctccgaccgctgtgccggtttatcgaccaggacgacttcaacacgagccaggcgtgctcagagtgtcatgaaaagatggtgctcatctactcgacgggcgtctcccgccccaagattccaggggagcagtatgggccacccatcggcccgctgccgtcgacacggcgtgtgggggtggcggccagatcgcgtcgggggcggccaaagcgggccatccactctgctacccacgtgaagcggcgaggggtgcaccacgacgcctaccgggcggccttcccagccacttcccgttctgccgctgtggcgcgaagcgcggccgcgctggccgcctgtgccgttgaggaccgcgccgtctatgctgacccgagtgtggtataaaactcgatccgctcagacacgtgtctatatccctcggggaaaagggacaggtaacacagaaagaggaactaagagagtggtacgcctgttgcctcccgttcctgtcggcagggccaccagatacgcacggtagtgtacacggggaagaggaaagcaaacgcgcagttgtctttttccttgagggcgcgggccaagcgcgcctcgcagtccctctcaacgtgcatctggggaagcctcggcacgttggccaggtagccccctcctacccccgagtgttcccgacccgaatctaacctcgtcaggtcgggggccgctatcgcaactaattctattctccctcattaagctcacactcaatttctatcaggtcaagtcccccacaaatatgctgccacccatcagaagtccctctctcacgtgtgcgtagcgtagtccaccgcatccccgtgccgggcacaagctacggccgccaaccatccccacacggcgggcgtgttctggcacctggtgtcccctggtcgccttctcgggtcgacgccaagtcagggccagggatgctacatagctccctccctagtccggcacgtcctcgggccgtaccaggttccaccgtgcacagcctcgagcacgcccacaccggtgccgaggtcgagcgtccccaccctgcgccgtgatcaccttcctcttgcccccgcctccttcttccttcatcttggccttcccgttccccttgggttctggacggcatttccagcaccgagattcaggttgggcccgaggctcctgtggcgggtcccgcggagaagaactcgggtggtcttgcccctctcctgcctccggttcctggggtgtcggcgcggacacccgtcgtcacagcggaggatgcggatccagagcccccggctccggcgtcgcgcccgatcgagaccccccccgtgggtctcccggagatgcttatcggtcataatcccctggcggcccggcgctacaccacggtggtcgggaacgtcagcacttgacctgtgacctccgtccagagatggtcgctcgggagccgcccttcttgacctcgaagtactcaatgctgtcgccggctcgtgagcaaggcgagcttcggaggcgccaacgggactacatcgtaagctgcaatcaccaagcgttctggaagctcgacatagccaaccaggcggcgcactaccccacgttcatcccgcagcagcatgaaattgacatcccggttgtgttcgcaccatcgaacatccccttcacctggtacttcttggacgccctcaaccaggcgtcgatcaagggcttctcccactcgatcccgtacatgatgtacacctccgagatgacggtcttggcggccaaccactggcttcacgaggtcttggtgtccatccggctctggctcctctcgaatctcatgattgtctgaattgtcgagaagctgacggtcgacttcttgtgcagccaggatgtagagtacaaggagctctttgtggggtaaaactcgatcctctcagacacgtgtcaatatccctcgggggaaagggacaggtaacacggaaaggggaactacgagagtggtatgcctgttgcctcacgtgcctgcttgcagagcaaacagatacgcacggtagtgcacacggggaagaggaaagcaaacgcgcagttgtctttttccttgagggcgcgggccaagggcgcctcgctgttcctctcaacgtgcatctgggggagcctcggcacgtcggccaggtacccccccatacccccgagtggccccgacccgagtctaacctcgtcaggtcgggggccactatcactactaattctattcccactcactaagctcgcactcaatttctctcaaatcaaatccctcacaagtatgcaaaaacccatcagaaatccctctctcacgtgcggatagcgtagtccaccacatcccagtgccgggcacgggccacggccgccaaccatcaccacacggcgggcgtgctctggcacctggtgccctctggttgcagtcccgggtcggcgccaagtcggggccagggatgctacactcttccaagcgatgatcgacttccggcgtcaactcccggtgcacgacgggacattcttgagctcgatcgcggataagaatagtccgcgtcgggatggctcgggtgtggtgcaggtaatcaaccagacttctcctgccaaggtgcagctggcaatgccgttgccggcgtggccgcagctgggatgtcctcctgcgccggccgccttggacctgctgccacctggtccggcggtacaagagtcggggtgagctgcggcgattggtcgggcgtctgcgagtgttcaagttcctctggttactcctgctgcaccggtggcttcgccttcgcctttgccggcccttgcgcaccaggcccttcctccaccggttcttcaggttcctccggcatcgtttttgccggctgcggctctcggcgtcgctcccggcagtaccatccggtcgcctgctaccccaggcgctcctcctcgtgtgacttcctcggctggtggcgtctcggtgcccaccctcgagttgggtagtcctgtttccggcgtcggtcctagccgtccgggtgtggcgtcatcaggtctgtttgaaactctggcgccgacgctgcgcctttcccgcttccgggtgcccgactggtacctgacgcaaggtggcctgtcgtgtgaccggtacgatgtgggcatgattaaagatcagctgagccgacttccggtacaggttgagggcgtcgagtcatccttggtgatgtgcacgtatgccagcgtcttggacgacgtggtcgacagcgtgtttgcttgtgcagacagcggccagacgtcggacagtccggtggttgctgaggacctttcgaccttgacccggcatggcttggcccagggctggtcagggaccttcacgagtttccaggagcgtcggcgggtgtacttggaggagcgggagcatccggtggtcagtagtgatgttccgttagcggagtacgtcgaggcgtcttgaccgctggactacgtcatccggtcatcctctgggtcccgtcgtgctgctgacgaggcgctggaggacgttcctgcggcgcagcgcgcgcgtcgggattaatacttgagggcgaggaaggtaggagtcacgggagaaaggaggagagacagcgaggcggagagacgggttgctcgagcgggtgcttgctggtttttctagtagttccatgctcgtactgcttgcttccttgatacacaagttcccttttcttattcttcttgttccgcgtccgttgcggccgagctcgcttcgtccagcaaaccccggtcagctccttccttctcgtcatcctccgagtccgactctaggatcttcccagccctggccaccggggtgccctcaatcctgttccgccgtgcgtaggcgcagacatcagcaatgggcaaccggttggagggctccctggtatcattagatgggttaataccgaaccagcgcacccgcaggtacaggcgtccctccatccaggcatggtctacaaacaagacgtagacgtattctcggccttcttgtcgggacaaccagggtactgcggcgcgcttacgccgggtcaagtcccgcttgcttggcggtggagctcgagtgacgtggtcactgctcaccaagtacggagatatccacgtctcggagtaacttccagccttccgtgctcagggtttcaaaaggcccatccgtcgtggagtccagcttcccccgggtcttgctggagttatccacgaaaaccgagtcgccatcacccagttcctcgttcttttcccggacacccttgtcatagtcccgcttgtatcgctcctggtttttcgagattgactccttgactcgtggtgtaaggagctttagttgttccagaaactcatccttttccttgggcccggcttcagggcaggctgtgcggcagtattgaccccccggtaggcggcaacacgtgccatgcaaggggcggcaggccactagcctgacccgttcctccccctgcatttgggtccatattccctaagtttgggatagttagcttagtagtaaatccaacttggatttcagggttttctgcatttatcgtcttgaattttcgtgtggcccggtgggcaggtgctggggtgggagattctgagtggtgagattctgaggggaccctcgggggataaggggagggacagcggggcttggccttgcttccccgtcccgaccaagaaactgttggcccacacaccatcttcttgtttgtcagtggggggattgccccacaacagggacagagtgtgtgcgacttgcacttcttccggttcccccgacacgggaggcagccctagcacaccgccccaacttgggtgtcgcgtgtgcgagaggtttttgccacatttggtggagcagcaggggacagaggtaaactttacctccgggtgcacccgggtgtaggggttcctctgtctcagaggaacggtggacttggaccgtgtcatacggatcgttagccagcatggccggttcggatccccggtcgtccggggagtacacgggtgacgcacgtacttcagtgccttcaaatcctggtgagacacaggtaggtgtacctggggtcgcagagggactagaggtcgctcaagccagcaggactggaagtacgggcgggcaacaggccaccccgactcagtcgggagttcattcgggtgacacttctcatgtgggtgggccgaagtctggccaccgtttggtatactcaacgggaacgtcccaaggtgagaggactgtccccgcgggttccactcgggttgaaaccaactttggctcggagcagtcgccaactaggctttcggaggacggcggacctccgttggtcggcgatgggctcgcgcccatgcccccggctgagacccctgaggatcgtggttactcctcaggtggactcccggaggcggaccgagactcaactggagtcgacaatccactcatcgcggaaactgtccgtcgggaggcgaccaatgtgttgcggcagactttgccggacctggtggtcacgatgaagaacactattctgaatcagattgtggcgagtttgccagatggccttaatgtccggaccggattggggctttcgagcccgcaggcgcaggcataatccctcctcacgcctgtctcgggtcgccccgaacagggggcgacccctcggactcccaacgagggagccacgccattctcggtggggcgtacgcccctcacgaaggagtttccctcggaaacgccggcggctacaccaagctcgccgcggcagacgaccggcactgcgggccaactcacccaattgcctcagcggcttttccctcaacgtgaggtgccgcccaagatccaggtagccaacccggtctaccagaggatctttgactgtgggacctacgccctccacaacacgtcggtggcgtatggtcctgaccaggcccgagccatgggccgtgccaagaagaatgcacttcactcttttgggcacaaagcggagtgggatggaactccccccctccgtgtctttgagtttctacgtcgtttcacaaaaggctgtgacgacaatgccataagtgaaggcatggctttctatatgctacaggagtttacgaatggcgacctccggacagaacgtatgtccgtcatgcccagttcctcaagtggaggcgctggtgaggtgacatcctatttggagcttgtccactggttgttgagagccatggtggatgaagcagctttggcttctcaagtcgaggcgtttacgcaagctcaccaagaagagactgaggacgagttgtcctctgcggagctggttcgtaagctcaacaatctttgtgggtttcttcatccacaagctgtggtgaagagacggtttgtggagggactccattggtcagtccggatggagacccgggagcataacactgctcgggcgacactggccgagttggctaggttcgcctaccgcagaggttaggcctaccgcaagtttcgggaggaacaacgccaggagcgtcaggccgacttggccaaggaacgtgaggaggcgcgccaggccagagagctgagagaggcacgccgaatccgcaaggagagggtagtagctgccgtgggaacttcccagggtacctcttcggcttcccaagtcaggaagacccctccgggaactgacaatcggtgttggaactgcaactccgatgggcactgggcatatgattgccccatgttgagcaatcacattcaacaacttgttaagagtgcgagtaaaaagtcggctacgaacgaagtacgttcacgccgcgagggtgggtctcgtccggtagtggcggtcgccacaccctcggcggagggggcggacacgtcgtcctcggactcttcgtcttccccttcgcactcggattcagacgccaagtcggcggaaaacgaatgaccgttggagctggccgtcctaagctcacaacggcagcctcggccaagtgggtcaagaggacgaaccaaccctgccggatactgcggcgacctcagggattccgcccacgtcgggtaggactccccaagaacgtaaacccacgtcgggtcatcgcggtgctgacgggtgcgaacttccaggtggctggacgggtgcaactagcccccggccgtgcctgttgtgcccgtatcgtacttgataccgggtcaggagcctccttgatacgcaagtcgctattatcaaaggagatgaagctccaacgctggaagtctaaagctgaccatctgatcgacatcaatggtggggtacttcccattgttggtgccgtgaccctaccaactaggttggggacccatgaggtcgacttgacctatggagtagctgagaatatatcggtacccctgcttctgggtaccccttatgttgtaacacaagtgcctttgatttgtggccctgagtactgggtcaagttgatgaatggggagaccatacccatccttggtaagggaaagtctgtggctcctgtgacaacctcacagtcgaagcctgtttgctccttgagagaagggtttactgctaccctgcgtttagcccgtaaagtcacgttgccccccaactcggtggcgcacgttgacgttgtaactgattgatgatacggggaacgggttggtgcacccttacccccgtcttgctcgcaagcaccaagtgcatgttgccctgggcacgatggactccaaagccggagtcccgtggaggatccaggtgatgaacctgagctcttcgcccaagtacttcaagtcgggagccaagttcggctatatcgaccaacacgagggaccagtagtagcggtcaccctcaacgcgggcgcaagtagcgacccgaactccgggtaggagaagcaccaagccaagcaggccgccactcctcggccccatgtgaacatggagaatgttccacccaggttgagggttcaagttgaacgcctcttggacccgtatcacaagttgtgggatggccaattgggactcatgagagccacccaacaccggatcgagttgaaacccggtgcaccccctatacgccaacaaccgtataggggagggccccgttctagggccctcgttaaggagcaagtcgctcgcatggaggccctcgatgagaccgaggccagcaaccccgtgtgtgcgagtccggtggttattgtccccaaagttgatgggaccccacggttctgtatcgactaccgtaagctcaacgagagcacgttaaaggacagttatcccctacctcggatggacgactgtctggactctctgggggaggcaaaagtgttctctacccaagactgtaacgcggggtattggcaaattcccattgccccggaagacaggcataaaactacctttacctgtcactgtggtacctaccagtgcaagcgacaaccgtttggactgtgcaacgcgccagcaactttgcagcgcgctatggacatgattctggccggagtacggtggcagatctgtctcgtgtacctagacgatatcattgtgttctcccggagtccggagaagcacattggccatcttggccaggtgttcaagctacttgcggacgccggtgtgtcactgaaggcgagtaagtgccacctcttcactcaagaggtggaatacttgggacatgatgtccgcccggggcgcctcagtgtcaacgcgaggaacttgagggccatccgtaaggctcagtacccccggacccagacccagatgaggagcttcctcgggatgtgtagcgtgtaccgacgtttcaccaagggcttcggcaaggtggctaagccactgactgagctagttagctcgacgctaccgaagaacctgccttccccaagtcgggtggagcaggaaccctttgagactcttcgggacctactgctgaagccccctatcttggctattcccaggttgggaggccattacatcctggacgtggatgctagctacggccaacttggttgtgtgttgcttcagcagcagccggacaaggagtacttgccggtgggatatttcagcaaggggctgaactcggatgagaagaactacggagtcaccgagttggaaggactcgcagtggtgtgggcggtgacgtcacttcatcactacctagagggtgagaaggtcctcatccgctgtgaccaccgcgcgttgcagttcaacttcaagacggattgcacgaacacccgcctcaacaggtggagggtacagctggcaccctgcaactttgatattgagtaccgacctggcaggcaacatgcccttgccgacggcctctctcgggtacctaccgaggggctggacaccaactcagtcgatgaggacatccccatcgtgggggtagtcacgcgctcgggtcaggcgttgaaccccgaggcgccagggaacaagaagtacttgcccctgtccctggacgaggtggtgaacgcccaggccgaggaccccttctgcaagtcgcagaggatacgctggatacggtggcggagacgcggttctttatcggagacgatggcctccttttgaggagggaggtaatccaggggaccgaacaacttgtcgtcctcgcatccctcaaggacagtattttgagagggagcataatggacatccttgggcccctgccagtgaccgaggagggcgaccagtacctcccggtcatctgcgatcgcttcacgaaacttacgcgagcgatccctctggcagagatcacggccatgtcggtcgtgtcagccatcctagatcactgggttgccgcgtatggcatcccggacagtacactatcggacaatggaccgcaatttgcgtctgtactgtttcagggagtgctggatatgttgggggtgaaggcaaactatgccaccccctaccacccacaaactaatgggcaggtggagcgcttcaacaaaactattgttaggcagctgcgccactatgtgagtgagcacgtgaagacgtgggaccaatacatttctatccttactactgcctacaattcgcaggttcactcatctacaggggaagtacccctcgcttttgtgaccccccgtcgcgtgcggtctattgccgtgcggcggtcgctcccaactagggaggatggtggcagtacgcctactcccactgagagtaaggcgaagttcgctgctaggcttgaaaacctcatccctaaagtcagggctgagatggacaaagcacaaaagcgctacaaacgtacctttgacaaaaaggtgcgcaacgccaagcatgtccccgagcagggtgactgggtgctggtacactcacacaccccaactgggggtaagttggtattccagacgaaggggccgtaccaggtccttcgtactgatgggcggcgcttcaccatcgaaagtgacgatggagtccgcacagtgaacgga

SEQ ID NO: 10 - DNA, 21869 bp, unidentified
  misc_feature 1..21869: note = Fanzor polypeptide
  source 1..21869: mol_type = other DNA
cggttaatactcatgaaggtcaaccgtccttggtccgtcacttgccgcatggatgaaggtttattttggtgtaagcctcaggttactttgaaattatcggagttagtcatcttcttcaagtaagcttgttaaagtcagtagccctcttaattttcctaagtccgctccaacttagtgagcctcagtcttgccgaatccatgtgacaccctacttagtaggtacaagcctcacccccaaacagccgaagtcggtgtcggttgggttgtcacagtaggcgtcgtcgcctcatgtaaggcataagaagttggcggggtgtatttgccgcctgttccctggtgggtgagtcgtatccgacccacatcatcttgacgtaccagggtcctggtaggtccgggtcggtgtgtccgaccacgctctctacttggtatgggattccatccggtcccaccgggtcatccgaccggtgggttgtaagagcttcatgtagcaatccagccggtaccggctgaggctgttccggcttcggagcaggtgtcacatcgttgagattgatgcgttgtatctccgtatcggagtgcaggatgacagagtgatcatctctgtgtaagatctggtacggtcctttgaccgggtgcataagcttgttccctcggaacttctggtgtatgatgtagacccagtcacctgttaccagggtcgcgttgcgtacccgtagtcggacgtcgaagttcttcttgtatcgaagttgtgtacggtcaagggcacccttgagcttaggtaccatccacgatagcttggccaaccaagctaagtggattcgttctgccggtcggcccttcggtatgtcataccgagtgcatctgcccggtggcagcgtcaggttaccgacgcccattggcataacccattccaatggagcaatgttggtactccggtggggcctcgcattgtatgccagggtcaatacggacagaagcctttcccacgtgttggtatgttcagccacatagcattggagcatcttgaaaatggtgcggttgaactgctccacctgtccgttggattgggggtagtagtcggatgcccgacgtggttcgataccgaacatgcccaggaccttagtgcagaatgctgacgtaaggtttgctccgttgtcggagaggagttgcttcattactccgtaagcactgttccagtggtcaaccactgcgctcatgatcgtgtaggccgtgtcgttcgggatcgctactgctcgtgacagcgtagtaaagcggtccgacatgaccaggatgtacctgttcccttcttccgttatcggaagtggcccgagtatgtcgatagcgacttgctcgttgggcccattaggtgggaatagcttcatggcagacgcccgcctatgtagactcatgcggttacgtgcacaggggtggcatccccttacgtggtcgaccacgtcaacggccattgctggccagtagaagaaccttcgcattgctgcgaacatacgtgaaccccccgggtgtccggctgtagggttctcatgttctcgtttcatgacggcttgccgtaaggacacgggaaccacgacttgatgtcgtccatcggcgggtgcccgccggtatatgaggccgtcctcattctcgaagaagatgccggccgtgccggccaggaggttagcgcgatggcgtttacagtcatcgtcattggcctgtgcctcgcggaagtccgcgagggttaatgggcacgcaaggtgtgccatggtatggtcaaccataccttgggtggcgttacccaccatgcaaaccggtactaccgggatgtcctcatccacctgtcgggtatccccgcttggtgtatcgagtcgcgaaagcgcgtctcccagatgatgggtagagcccgccttatgtatggtccggtagtcgtgcttggccatcttcagcctccaccgggctagccgaccgtggctgtcggaatccttgtcaccaaggttgagaagccatcgtaaaggttcgtggtcggaccttacgatgaacctggaaccttcgaggtatggctggagcagttgcactgcccatatgactccgaggcactcgcgctcggtagcactatagttacactcagccgggttgccttatacatggtccggtagtcgtgcttggccatcttcagcctccactgggctagccgaccgtggctgtcggaatccttgtcaccaaggttgagaagccatcgtaaaggttcgtggtcggaccttacgatgaacctggaaccttccaggtatggctggagcagttgcactacccatatgactccgaggcactcgcgctcggcagcactatagttacactcagccgggttgagtgtccggctgaagtaccctaccggttgtcggtccgggatagcattttctgtaccgatgattgtgtctccctgtaacagggtgcattctacttgggtatcgcaggcatcgacgtcgatgacggaggtcccgagtctatgcggcaaggcaagcacgggtggggctagcagagcttgcttgagcagctcgaatgcctctccctcgttgggcgagggaggttgtagtaccttgagcaaggcgctgctcgtcagaaccgttaacggtttggctacacgagcgaagtccttgaagaaccgtcggtatacgttgcacatccccaggaagcttttcagctgtgttggggtggtcgggtatcgcgcatcccggagtgcccgggtattagcttcgagcactcccagcttacctggggtgatctggtgaaccagatactcgacggtctgctgaaagaaggcgcacttcttgaggcgcagggttaccccggcgttccgcaagagggtgagtacctcgtcgacatgttgtgcatggtcatccatgttacgcgagaagacgatgacatcatccaggtacaccaggcagttacgccaactcactctcgacagtataatgtcgatggcccgctggaatgtggcgggggcgttggacaatccgaagggcatccttaggaactcgtacactccactgtgacagacaaacgctgtcttggggatatcctcctctgcaactgggatctgccagtacccagcgttgcagtcgatagtggtgaacactttggcctcccccagcgagtcgatgcactcgttcatccttggtaaagggtatgagtctttcttggtaaccaagttgaggcgtcgataatcgatgcaaaaccgaggggtttgatccttcttcggtacgatcacgactggggcgccccactccgacatcgaaggtcgaatcaccttagcttcgctcatcctcttcacgtctccatcaacgatctctcgttgcataggtttcgcgcgatgctgttgagaccgagctgggcgtgcccctggtaccaggtctatacggtgttgggttgccccaatggtacccagagccccgccggtccacatgacgtcatgctttcttagcatccgtcgtaccccgtcggctatcgaagggggaagatggtcgaggtcagcctcggccagtgccttcaaggcttcttggtcctttggcggaatgtccgccggagctgttgatgggctaagtttcccgacgtcgggttcctcccgctcggtggtctcggtgaccgacagtacctcaagtggttccacttcaacttccatgtcaggggtaaggatgtctccttcgtagagctcggcgatcccgaggatagttcctttcggaagggtgactgccttacggcgatagttcgccatcacgagcagtgatgaccaccccgctgggaggtctacgataccgttggccatggtcaacccatggcgcctgtaggttcgtaggttggactggactctgcagatgcctgcgaggtcacagttaaccgggaggacggtctctgataacggctcaaagagagtccgcttggccagccggagtgtctttggttctacgcttgcgtgtacctcagccacgttaacgtggctttcttgtagcgtcaggtccctgacgatagctgtatgtcctctcttcgtcccgtcggcctcttgcagctcgacggtcctccggcccggccggattgcatcaacgtgaacgttgatgaaggtataccccaacatgcaggccacagatagagtctcacacaccaggaggtcgacttccgtggtgagctccccgattgtaaccctcagcgacaccgctgcggtcgtacgcatgagacgaccattcgcatccttgatcgtgggtccccgagcaactctgactcgcgggagccacttgtccgggagggtatccttctggatcaacttcggtccagcccctgtatccagtacagggtaatacgattgggtcgactggaggtcaacccccagtgtggctgataccttgaagttctccaaggtgaacagtacgtggcctacaccgatatccggtgtagctcgataaacctggacagggcccttggctggttcagcgtgacgggacttcccgtcctctcctcccaaccttggagtgtggtcatcaatcccctgacgccgtgtcgtcggggccggaaggagtacccggggattgatgcggcgtcggctctaccgcgctctccgtggggctctccccgcggcagtccggggtggcttgctagggttgccccagcgaccccgggtcgtccttcctcttactcgtttcccgtgctcggccgagtactatcttccgggatatccgggagaggaggtgcctcctcgactgccagtactcctcctggagcttgctgcctacccggtgctggtgctctggcgggataccccccaatggatgctttgcgttgcgccgctgcccatcgggactcctccgggaagagcgggcatgaggacacccagcgttgggggtctccgcacagcatacatccggaagtgccggccgtcccgggcgtccgcgtcgggttgactccataggtctggttgcctacatcgggcgcccgagtgcctgccccttggtaggccttaggtcccggtgccaagcggaacatggactcccccagcaggttggttctaccagcgatgtgcggaggtgcctccgtacgcaccccccatgtcggcaggggttggcgggggttatttgtaaccggggcataccccgtagtccgcacatacgggaggcgccgacccgctccctcgttgacctggaactgggtcccagcggtagcgatgtacgctaccgtaccttgctcatcaatcaccggcgtcgccggtagcaacaggtggccatgttcgtcgactagaggttcatcctcacccgtgggggcatacttggtcgccaccaatactggtgcggccttacgttccaccttctcttgcctcgggtaccggggtaagattgagcttgctgccctcacccttgggctttaaggcaagagcacactccgggtgaagcacccggtaggcgtcccccagggacttgcacatatgcatcagtcgactgaagttcgtccgagccgtgttggctccccgtgcggatatccgcacagagttgggtactcctgcgaactggatggcccgtagctctccttcgccgaggagcttccccagctcgtagtcgagctcttggatccggcgtccaaacatctcctcatcctccgaggactgggcggtggcggtgcgaagggcccgatagtggtcttcgcacttatcctcactgaggtagctgctaagcagctccttcagtataccacggtaatccatggcggtggctgcgaccctcattcccggcatcggagatgcctggcgaaggatgcctcgtacccgttcatcaacaaagaacgggaggatctccagcgccagcccctcgttgacgagtgccttgtctgcggctgccttgaagctagtcaggaagccaatgactgcgaacgggcgtccgttcgggcccccgaacatagagactccctttataagggtctgcatagagcagatcgctcggtgcgaggtcgtacgcatcgattccgatacggtagtggatctgtcttccaaacgataacgttcaggagtcagtaccgacctgaagacttcgttgacaatctgcgtgtctgcgtcctggttatccggtcgcttggccagttgatgagtaaactcatcggactccatccgcttcagtaagctcgcagtaacctgcgctgtcatcgcttgcaccagtgacgctggaacttccggcgtcggcgcctcgggtacccgagttgcctagcttccgtcgtcgagggggcaatgcgagacggtaccgcctccccccatcgccgactctgttccggcgtaagtatccgccggactatgtccgcggagcccgctctgggtgctccgagcgtagcgctccgtattgctacgttccaactcggctgacgagtcatagcccgccgtattcgggggttgtccatgagtagcaataccggggtcgaccctggtggactccgaaggtagtccggctggttcgaaccgtaccggtgtgggaggaacacgacggggtaccgtcgtgtggcgtgctgacatcagcacagccattgcgttctccgtacgctcttgacgggcgtcgagcccggtgaaccgggcctcgatgcgagccaatgatgctatcagggaatcccctggtgaaggtggcggcggagtgaggtcggcagaggacagttgaggcggtccgccgctcccggcggtccgtgccgtaccaaacgttgatccggcaccggagagcatcggcgtctcaatgttgtcgatcggattaccgatcccggttcccgcgatcagctccggggtcggcgttgacgccgatacgtcatcttgaacgttccccatctcttgggtagacaccatcacaatcagtcaaccgacgaaatggtcaccacgaataagagagcgaggggggagttgggggagagtaacagtagatcgaagtcaaacgcaaccactcaacacaatcaaacagatcgcagcatcacgagcacaagaaaaggactggatccctatccgtgtgccagggccgaaaacggcgtcaccagaagggtgacgaaaatgcgtcccttgctgctccaccaatgtagcacaataggtatccgctgcacgtccactctcagggaacactcaccaagggggatcggcaccaacgtcaccgggaggccaaggttgctgtccgtgaagcgcaagccatgggacccagatgggaacccaaatgggaggggtttgttgttctaccatggccggcggcggattcgccaccggccccttcgttataaaccctcggagacactactaactaccctccaccacaagatgcaagtccctctggtcatacgtaacttatcgataccgtgaccaatacggactcccaaattgaaagttaagggttagaagtagtccccctatactagggtcacaattcggtcatccatattgctacaccctctcgaagtaccacacggccgtcgtgaagttcacgaccgacccagacgaactggcgaagtgtgccatcgtccttgggcccgcgggaggagcggcccaacttgtgctcaatgctcttccactcgatgagcttatgaagacgcagcatctcctcaagtagagtgagctgtcctgatgagcacccctcagcaactagctgaggggtgagctgttccaaaccttggataagccggaggggaagatgccaaaggatcccccgccgctggacacaggacacccaggtcgacatgacctcgaggagccactgggtggccaacatggcccacaccaggtgatctgggctagccgtcatcatgacggagccgaagtggtcgagcaaccgtggcagcaacgccggaaacccgtaggggacatcaacttgaggccaccactcgggcttcttcgggttgtactgctccttactgccagcggactgctgcggaaactcaatttgagccgaggtcaccaagtagggacctcgccggaagtccttctccatccgcacagcaaagtgatgagtgtgcggatcggcctcgtgaaggtacggagggcgagttgccaccgcgtcccaagtaaaggccggcaagtcgccaggacccgggatagttcccccgcggtccaccatggccttggcccgctgcacgtcttcgacttcgtcctcgtccagaaacgcaaactggtcagtcttgaagtcgggaggaaacccgatcctacgggggaacttctcccgtaggcggtcccatacccgactcatcgctgtgccaagtcggccacagcggagaacagtgaacccctcctcatacagaggccacgcggggtaaaactaccgtcccatggcctcccgtgaaatgacgcggcccatctcctcggaagatcccgccgccaacccaaagccaggtgacgcgggagtcccatcccccggagcgatcgcggagcccccgccggaagtcccggcgggcgctacaccgtaggaggtgtcctccatgcgttcgtcaagggagtccgtctccaccccaggggtcgccatggccctccccaagtttgggagagacgccctggttgcagcggcacgagacccgcctcgagttgaggggggctcggatcgtgggtagatgggtggcctccccagcgtggggcggcccaggggaaggtgaaggggatgtggtggtggtgggtaagtgagaaccggggagagcaagctgcccagtgggcaagcttgaggagaggggcggtcaacgcgaccgcctccacatccgcgttacttactcgagggggggacagcaagtcgcgcccccaacgccgagacgtgcgtttacgcaccccctcacagggccgaccgggtcggtcggaactgaggagaggggagtgtggcagtattgacccccaggtaggggggcaacacgtgccatgcaaggggcggcagcctactagcctgacccgtttttccccctgcttttgggtccatattccctaagtttgggatagttagcttagtagtaaatccaacttggatttgagggtttttctgcatttatcgtcttgaactttcgtgtggcccggcgggcaggtgctggggtgggagattctgagtggcgagattctgaggggaccctggggggataaggggagggacagcggggcttggccttgctttcccgtcccgaccaagaaactgttggcccacacaccatcttcttgtttgtcagtggggagattgccccacaacagggatagagtgtgtgcgacttgcacttcttccggttctcccgacacgggaggctgctcttgtacaccgccccaacttgggtgccgtgtgtgcgagaggtttttgccacaccgagggggcgagaagcagcgccggttggggggtggcggggggggggggggggggggggaggggggtgcgggggggggggggttgggacggggggcggggggtgggggggttggggggacctggactgccggccttatgacggcccgtggagcccatcgccagcgtctacagcacgcgtacggcgtcgagtgagggccccggcccggatggggcctttccagacgataaatatggcgctaggcggtgcccttcggttccccatctttgccgaccccgtcagccaccgtcgacaatcccacccaccctcctcacagtcgttcccacacacacaacccgctcatccgcctccgccccccccccctccccccccgccccggactcacgatgagcgacgaagacgacggcagcgaccaagatattggcgtcgacaggctggccggcgacaccacctcggacgaggagtgggacccggcacaagagcaggcgcgcgttcaatacgcacgcaacgtggtgactgtggcagtattgacgcccaggtgggggggcaacacgtgccatgcaaggggcggcaggccactagcctgacccgttcctccccctgcatttgggtccatattccctaagtttgggatagttagcttagtagtaaatccaacttggatttgagggtttttctgcatttatcgtcttgaattttcgtgtggcccggtgggcaggtgctggggtgggagattctgagtggccagattctgaggggaccctggggggataaggggagggacagcggggcttggtcctgcttccccgtcccgatgttttttctgtctcgacccgacacggccgcagaggccgaggcgcgggcggttgcctgggccaagaagctggacggcggtggacgtgcacgggaccgcagcgtcaaaggctttgcgtcccgggtgggggtactgacgcagctcgagcgggctggcctgccgttggcgcgcgtccggtggctccagatggtcggtggagacccgggacggtctgccgtactgtcggcagcacccggtgagcacgtggcgacggcagacctccccgcccgccccgctgtagacgcgatgcgcgccgcgtggtcccgccacatgggcttggacgcgctcaaccgggcggccgtggcgctcctgcgtggggcgggcgtccaagacggggtgacggcagccgcaaccatgcccgagggccacccacccaggggttctaggaagcgggcggcggcgggcgccccggctgcaggggcggggagagggaggggccgctacaagcgacacgcgcggcggtcgtcacgcgaggggagcgacgatgatgcggcggcggtggctccggcggcagcgggtgcgatgacgccccccgaggcaaagacctaccagacggcgagccccggtggtggccacgggcgcgtgcggcgggggccgcaggcgtccatccgaagggcccgccgcacccagctcgccactgcggtgcggcgtgtgctgcgtcgcacgcgcctgtcccggtggactgtgccccgtcacgaggcggagaaggtggcacggtggctggtggattccactgccgcggcgggcaacagtgccagtagcaccaccccaaacgcgccgctgcaggaccaggtggacgcgctgccccggcgcaaggtgtgtcgtcgactggcacccgtctccggccttcgctacagcctgagtgccgcccactttcgcgaggccagcggcggtaactttttggcctgtgcgtggaagcagtggcgggcacgcagcggtactgaggcgggaccggtggcggcgccggtggcgggactggtggcggcggcgggtgacgaaggcggcgtcgctggccacctaccacccgtcgacttggcagcagcactcggcacgatgcgtactagcgacggcaggaaacacctgcaggcaacgctcgagtgggccgcgcgtcgcgacacggcctcgtacgtccagcgatttggcgcccaagccacgcgacacctgcgggcgacgcgtgtgcgcaaggccatccaacgcggccgctttgctgcctcggtggcgcgggacctgaccggcggcctccttcgccaggtccgtggcggcggcgcggtcgtcgtggccatgggcaccgcgcgcgtgcgcgggggggacgccgggctccgccgccatttccgacggctgtgctggtttgtcgaccaggacgagttcaacacgagccaggcgtgctccgagtgtcacgacaagatggtgctcatctactcgacgggcaactccctccccaaggtgccaggagagctggatgggccgccgcccggccctctgccgtcgacacggcgtgtgcggatggcggctggtatgcgtcgggggcggccaaagcggccccttcctactgctacccacgtgacgcgccgagggccagaccccgacgcctaccgggcggccgtccgagccactgcccgtgctgctgctgtggcgcggcgcgcagctgcgctggccgcctgtgccgtcgaggaccgcgccatctatgccgacccgaagccgctgagcgagtgagcggccaagggctgctacacgtgctctcttgcggccccacaaggccccggtcacccagctccacacccgcccgtgattcgcaatcgggacgacgatgcggcccgcaacttggcgtgagtggccgctcgtcgtctaacgggtaccaacgtgtgacctttcaagcgcccgtttggtatccgttgggcctggacgaccaagcgtcctcccagtggtgtgcccgtcccgcccgtacgtcgcacctgtgcgactacgcgggtcgatctatggcccgtactggctgcagtggacactgtcggcgacggtggtggtggtggtggtggtggtggtggtggtggtggtggtggtggtggtggtggtggtggtggtgatggtggtggtggcggtggcggtggtggtggcggtggcggtggcggcggcggtggcgggaggggggttgtcgacggcgacgcgacggtggcgtcctgtacgacgcgacgcggcgctcctggtggggaacgggtggcggcggccggcagtttcatggacggggtacgtcgggcggagacgggggcgacagacgcgccccgtggtctggtggacactgcaagacgctaagacagcgcacatcttgcccgtgaccctcacctaccacggggtgcgtcacctgccccctttttcgccgacgaggaaattatgggtaattgtcggccgtccactagcaggttttttattggatattcagagaagcaactcctcctggcagtagccaggggagccacgccccctactcaccaatgcgggccacaagggcccctgcatcccctcgactggttgccaacccaccagcccgcctaccaacagaaaaataattcttgtagccatgggctacacgcctcgcgttggctcgctagatggagaccgacacgtctcgctgcagcgccgcccgcacagcccgctcagcgggaccggtgaacgacgcgcggagaaaggcctccgtcatgggccccaccctcccaaacgtctcgcacaccagcggggagaacaaagacgggggcacggcgcgggggagggcaggaacgtactttttcaccttcttgttctcgcgcgcaatggcggccaccggcgtcagcggctcccccgcaacgcgggacagctgccgcgccgcaaagggcgacgcgacagacacgtcggcccacgcgcaggcgcccgtgctgacccgcttggcccgcacgtcgggccggagtccatacttgtcctccggccggaactcggcctccagcaccacccccatccacgacgtggagcgggtgaaggcgccggccaccaggtgcgcgatgcgcaggtggagggcacagcggcggccgtgcagttcctcacagaaacccaagaagtggcgcccctcggagtcgtcgcccgccccacaacggcaccgcgccgccggagggtcagaccgcggcggggcgccgagccacagccgcacggccacacgcatggcgtcgccagttaaggcgggtccatgaggccctggagtgggcaaagccgacagccagagggccgccatgtgcccctggcacgccgccatgcgcacccgctgatgcatcgacaatgtgtggtacacccgcgcacgcgccgcagccagggcgggccgagataggtcccgttgcgacggggcatccgccaacgaaaggaggtccttccaggtgaggggggtggggtgtggcgtgtcctgatctgcttctaatgtgccagaggccagttgaggggtgcggcggaggccagacaggccaaagggggcggggaaggaagggggtcggccggcaacggcccggcgtccgggctgccgtcccgcggaggcccagaggccagcagaggccggcgactgcacgtgcgccgtgtgcgcgtcgagcagctcctcgagctcccggcatagttccgcgagaaggctgtcgtcggaaggcggcatggtcggcccagcccgcggcacgggcagccccggcaccaccggcggcgccgccgcccgccgggcagcaagggcgtggctgtccatcatggacacttcttcggaggcgccctcctccagacccaactcggccgcggttgcccgccgcagctgtctcaaaccagggggtggggcggcgtcgggcgccgccacgactgggcggcagggcacgggcggcgaggggccgcgacggccacggcagagcgttgctcccctggcgtcccactgcgggcacggtcggcgcacgccacgaacgcatcaccgagcgctcgaagcgcaggcgacgaggcgcggcagcgtagcacggcgtccagccgcgacgccagggctgcagccgtcaccaccttggtgcggccgcaaatcccaaccccgcccatagagactgggagcggcatgcgctcccgcaccgcctgacgcaccgaggggctgtcccgggcgtcacagagcagccccttgacgagctctaccgcctcccggcccagtgcggccgccagctgcgccgctggcaccagagggagggcgcgcagaaagcagttcgcccgtgggccaaggttgtagcgcagcagcagcagctgcgtctgcaactctgaccgcgccaggtctgcaaccgctcgtgcgagccgccgctccaccgccaccaggtccgtgagcgagtcgctcacaaactcggctgcgccgaccggcaccgagaattgggtcaccccgcccggccgccagttggcgacgaagccagcaggagggggctggggggtggagcaccacgccgcacacttggtgggcgccagctcggcgtcaattgctgccccccacgcgctggcatcccgcatgacggcggccaacgcctccggcggtgcggccactaccacatcgtcgtggacacccttgacaaggcgctcggggtgcgccgtggccaggcgagtcagcacgaggtggatggccagggcgtgcaacagagggccaagggggtccccctgctgcgtcccccgagccgacggcaggcaaacgcgggccatcaacccccccacgtggtcccctccagctgggtccgcccacccgtatacgttgggggcgtccccgccgtacacccaccggaagtaggaggagaggaaggggaaggcacgctcgaccatggtacgcatggccgaccgcgacaccaggttgaacgcgttggcaaagtccagctgcaggaccgcctcgtctgggtggagcgcgaggtaggcgttgagctcatggagcgcccgctcacacgcgatcgacacgcccacccccagctgcagcggcgcgagaaactctgccgccgcgtcccgcatggtgccggccagcgccgaggccaccagcttccggatgacctcgggcatgccgatgggtcgcaacttcggcagcccgtcggcgcccggcccccccggcttggtcagcaacaggaggttggcgccagccagggcgtgcgtcgccacagggtgcacccgctccaccgcagcatcgcccgtcagcatcagcacgacggacaccagcgcgtcccgcccgtcgtcgctgagcgcgtggaggtgctccatgcggaggcccgacggccccggcgcggaccccttgggggcgcggcggatcgccgtcgtcacggtgtcccgcgtgaccgactgcggagtggcggcgcgcgtgccaaactcggctgccgcggccagctctgcggggaatgccgcctcgacgctggcggtcgtcgccttggccgacgacgccgacgggtggagggcgagggcctgggcccagatggccgccgcctgcggcgccagcggcgcgttctgcagcgtgcgtagcgccgcgctgaggcggcccttgcgcacttgccgcagcgcgcgactccgcgcccgggtcaggcgccgcgtgtctgcccggtcgagacggggaggggggagaggcggggggggagccggtgcggcggccgatggaggcggtgcaggcggtgggggggcgcatgcagccggccgtcagatgcccgtattgcgggcgtcgagtgcggcagagaaggagccgtccagcatgcgggcggcgcgctccgcgtgcgtaggctgtggggcgatgggggcgccagggtggggcgggcagggctcgtgcagcagcaggctaggaaagagcagaagccaaagccaagcctgtggccgcgccgagtccttccggacccactcgagagcctcggcccccagcaggcgccacgcgcgtagcagggcggcgggcacgtgctgcagggtccacgccccggaaggaacgagggagggccacgatgcctcgtcaggggcgacgcaggaaaggaaggcctcgcgggcagtcagccactcggcgggggtagtgaggtagcgctccatgccctcggtgggggcggaagccaacgccgcgcccgcgggcgtggccgccccggcggggcgcggtgcgggtgtcggcaatggacgcgccgctcgcgcacggcggcgccgtgggttctggctgcactgggccgcgtgggccaccagggaggtcaggccacggcggccgcgcacattgcggtccccccgaccgcagtgggggcacggtgccagatgcaggtcggccaccactgcggccggcacctccgacaggaggtgcttcgcctgcaggtgagccactatcgtggcggggccctcctcaaatcggcgtacgccctcgccgcacgaagggacagggcagacggcgtacgtccgtggggcgcctgcggcaggcgccaggggcggcggcggcgggggtagggggggagccgcagccgaggacggggggccagtggtggttctgtcaccagccagggcgccatgagtgtcactcagggcgccctgcgtcgctaacggtgggtggcatgggctcggcgtgggcagccagcgccccgccggtccccgcgcgctggtcggtccctgccggcggcgggccaggcgcgggggcgggcaccacctccatcggtgtgggggcaggcgcggccgccagagcaccagcaggcggctcggcgcccgccttgccagcatcgccccggcgccgcgccggcggcagggcctagggaggggggctgtcccggccgcccaccggccgcaaccgcttgtggccacgggccgttgacggcagcaccgcgctgacaccgcccgtgtcggagtccggggtgggcgccgggtcggcggtggcggccgcccgcgcatgcgcacggtcggggtcgcccccactcggactcgggccgggcgtccgcgggggcagcccgatagggagagcctcaccggccggccatgccgtcgtgggcatggtgacggtcgggcttggcgggagcggtacccgctttccaccagcggtctccccggctccaacggcccggccggccacaacaggcatctgcccagtgcgggcgcttccgcttgccgcccgctcgaccgccgccttgctgcccatgctcgccgccgccgccgcagttgctcccgctactcctgcggctgtcgttgccgccggtgtggagacgttgctggattgcgcgccgcggtcgtcgccgggcgctggcggcgccacggtgacgtccacggcagccaccgcgccgctgctcgcgagcggcgaggacaccacgtccccccccaccgtgtcctcctcctcgctgaggtacttgtcgggggtgtcaggcaccgcgggcgacgcggcagcctcggcgtgccccgcaccagccgcccccgcaagcgagggctgtgccgcaggttccaccgaggccgccccgtcgcccacactcctctccccatcgacaggtggcggcacggccgcagtaacctccctcgtgtcgttcgcgggcaggcccacgggggggacgacatccgtggcgtctgccgacgcaggggccagggcgacagccggtgacccccccccaatttcgctcgtctcgcgcggggcggcgggcgacgtcttggtcgacgatggcggcggcgccgttatgcccgccacagcggccaaatcggcagaagtcgactgccccgaatttttgggcgccgtcgttgtcgcggtcgccgtagtcgtgcccgtcccggccgcggcgaccgaatcggcgtccccttccccccgccgattatcctctcctaaatcggcgtgggtcgtcgtcgtcgcgggcgcggtcgccccccccgcagcagcggaggaaatcggcgattccggccgcgccgaattttcgtcgttgggcgccggagagggggcgggaaaaaccggcgccgacacggcggcgcctaaatcgggttcccccgcccccccacctggagtttccaccccgtccatcggggtggccgcgtcagccgacgagagctcggcggcggccgtggcggccggcgcccgtccagccgggggcgcttgggcgtctgccgtgctatcgtcgatggcggcagctggcggcggcaccgcggtgtcagccgccgcgggcggcgcctcgtcggtggctggcgcctcggtggggcgcggccgggcggcgggggccacggcgggcgtcggggcggccttggccgccgcccgcagggacggcgcggctgccaactgggcggccacgtgggcgcgcagtgcgtcccgcagcggcggcggcatctgcgggcgcgccgccagctgtgctagcttggcccgcaggcgacgcgcacacaggtcctccgccgcagtacgcgccgcctctgcggtgagccccccgcggcgcttggcgccaaagagggcggggctgcacgggtcggcgttgcgcacaacccccagcaccccaaccgccggacccgtgcgcagtgcggataaaaacgcgggcacgacgtccgccaccaacgtaacggccgccaccgcgccgaaacggtcaacgtccactacgttcgaccgcggcaggccggtgacatccgccaccagcccgcggagcgcgtgcgcccgcggcacccacgacaccccggtcacgtggaccgtcgcaagggtgggggggtcggcgccgcggcggccgccacgcgcgccagtcagcgccaataccgccgccgcggcgcgcgcagcggcggtcgaggtgagggcggcggtggcggccgcaccacccgcagaggcaccactggcggggccagcaggtccataccgcgcggcgcctccgtcacggcgacggtcgtcggcgccgtcgccctcgccggccacctccaccgaatcggctgctggtgcggccgcacggtcgtcttgacggttggcgcgggcgccagcggcagcctcgtcggccgccttcccagcacgagggccacgggggggggtaccggggccgccagcggcgcccaccacggccgctgcggcctcagcggcccggcgggcgcgggcatccttggcggcttgacgtcggcgacgacggcgggctgccgcggcgctccaggcgccgccgccatcgtcgtcgctcaggtccatagggtcatcgcccccgccggcgggcgacgagggcagcgacgccaccgccccggcagcggcgggcggcggagggcggcggcgaccagcatcggcggccgcagggggcggactagccgcccgggcgggcgaaaggggggcagaggagggggaagggggggaggggggggggggaaccggagcgggaacgggggcgagaccgcgaccgagaacgcccgcggcgctccccgagagagcgcagcagcggatcaatgtcattggcccgcacggacgcatacacagcgtcaaggacgcggcaacgggcggccgccgtcgacaatgacggcggcccggtcaccgcgtccaaaagcgcgatcaaccctcgcgcaagggccgcctcccgcggccgtagcgcgaccatggcgcccccccccgccacaaaaagtggacagggggaagccccaacaccaccgacccaaccagtaccaggacggggtacgtcgggcggagacgggggcgacagacgcgccccgtggtctggtggacactgcaagacgctaagacagcgcacatcttgcccgtgaccctcacctaccacggggtgcgtcacccgccccctttttcgccgacgagccaattgtgggtaattgtcggccgttcactagcaggttagacgccggcttttcccagggacctttcccaggatgagtcggatgtttcccggaggggtttaaccgatagtttccaaggttccagcagggaacctcgatcaatagggtgcgagaaagttcgtaagtctggaatggtttgtttacccgccggccctcccacgtggcggccggccacgccagccctttcacgtcgcgcccggctctcccggtcgacgcctccgcagcctctctttccaggtcggtgccgcccccgccatccttgccgcgtggcggccgcccccgcctgcttgcccgcatggtggccgcccccgcctgccttcccgcttggcagccgcccccgtctgcctgcccgcgttgcggccgccctcatttgcctgcccgcgtggcggctgcccccgccgtccctcctgcgtggtggccgcccccgcctgcctgacctcgccgcggccacccccgtctgcctgaccgcgtcggggccgcccccgcgggcctcccccgcgcgactggcgcccccccctgttgacgcccagtcccgcagcgaggtccatcaccagcagaagcaccataagcttccgcccgtcacgggccgcgctcgccgccaccgccaccaaaacgggggcggcaccattccacgcggcgccgtcgccaccgccgtcactcctacggccgctgcttctgctgctgcttctgccgtcgctgctgtggctactgtcgctaacgtgggtcaccaccagtgccttttcatctcccccgcctcctcttcccgccgcccacccgccgccctctcttcccgccaccgtccctcgtcggcgacgtggtggccgctgcccctccgcccgccgcggtccctgtggcgagtcatgcttgggctgatcgctcgccgtatggctggccggtttccttccccatctgtctcgttgcgtgagtcagcaagggtgaccctgcgctttacttcttttcctgtgccgcagccatgcatgagcgtcggtggggtcggggtgggcggtgctcctttggcgatgacgcgccggtttgtgtcgtccgtttacggtgaaggaccttttcccaatgagctttcgccgggccagcgcccgtcgaaacaatgtcaacactcccgatctccagccgaggtggtcaaatggtgctacggcgaagaccagattgtcacgctgcgtcggcagaacggcttctttgtagacaagacgcgctacgttgtgatgatggagaatgacgcatctcctcacctggtgctgttgcggccgggccggtctggaaagtcgctgctgacctcccagatgcaggtatgagtgtgacacaagtccctgggggcgagttttgggtgtcgcttctcaccgtttgtcgactctgtcagcatctctcgtttgagcaggactgtgcatattgctccgttttttccttgctaactgctccctccacggtcattctcctgctactgtttgtgtttattcaacctatcgcatgaccatgcttctcccctccaggtgtaccacgacatccacacgacccaggagctgttcgacgaggtcttcctcaatagggatggatccccaacggacgcgtacgtgcagtcatctggcggcactgctgcaggagcgcgggcgtactgtgtgctgccgctggacttctccatccaagttcagtcgggtcctcacgctcctcccctggacaagctctttcgggacgtgctaaacggagctatgctggtgttcatgaacaaataccgtgtgcacgtctcgcattggcaggaagacaatgctgacgccaacctcaaggcgttggcgtctgctgtcggtgcagcgggccatcaactcctcgtgctggtagacgagtacgaccgcactttcaaccagctgatgcgcgaggacccgaacgcataccaggatgcagtcgcaccagcgcgcgaccggaggccggcgggcttcttgcgggcgttctacctcac

SEQ ID NO: 11 - DNA, 21128 bp, unidentified
  source 1..21128: mol_type = other DNA
  misc_feature 1..21128: note = Fanzor polypeptide
cttctcaaggccgctgcctccttgtactatatcccgcttcccgtctatcattaatgctttcggtgattattttttcgggtgactcagtagagttgcttgttgcttttactgagacggcgccgtcctaaaaatcatctcaggcgttgagtacgcctggtgacattagcgcacatgctatcggtaagccgagcaacgataccgctcggctagacccgagcggtatcattgtccatttcccctaaagagctcatgtatcagtatagcgacggaaattttgaataggctccatggcaaaaaaacaacaacaaccaaccactaaaatgtctaccccttgaagtctgccttttaccttccatcttcacgatctgcaccacatcagtgtgggggtttcagcagtttgcgcttgctcttctcttcggtggtcggtcgttaaagcagcaggcgaggagaatgtggtccctcctccatccggagaaattccacttgcccagtcctccaccagcgagctcgtccccacccgcccccagtatgttgtcgcgctcgcaagtgtgccaacagcggaaagcatcgctctcgccaccattcggatgtacactgcatcacgacgcgtcataccgaatgcctacagaactcggaagtacgctgcccaagaaacgccgtccgcgactaacgacacccccgcagcacgatcgactccatcgtccacgcccaccccaaacaagacgagtcgaagtcaggtaaaccctatcggtgggcccccatgcgtttcgtggtggaaatgctgaaacgaggtcttagcatcacacaaaaccaatcgttcaaggaatcgcaaagcttatgggggtcgaccgtcgagtattggccgcatggagcaggacatactgtgtagactacaaactacaattgtagactactggttttctcgcgacgaagctgcacctcagaagctcatcgatttgctcgacggcgcagagacctcagtagatatcgctctgttcatcttgacgcatcctgaaccgacagacgctatcatccgggcctcccagcgtgctatcgttgatcgggcacaaatctccgagaaaagctcagctatgatgatcgaaaacggggtcaacgtatttcacgcaaaggccccaaactcatgcactggaagatggtctgttgccttgcaaaacaactggaaaggtgagatacccgcggtactgttcatctgtagcccacatacacacacaggacagggttctgcaacttgagcttttgcgcttttgcacaatcgccacaataaacggagctgttctgcgtggcggcttggagcttcggccgagtggctggctcaagagtttgtctgcagtgagaacgagagagaaatgtagaggagatgaaggtgctccgaggttttcgggatcccgagttttggatcacccggtgctacactgctttcgtccggaccggtaagaaggacatcaaggccatctgcgaggagcaccccggctggaatcgacggacggtcgcgcattactacgccatgtacgaaaatggagagagtttgcagccaaggtgtggcattgtggcaccggtcgagcattctgaaggcgcgtgcagaaggctgcaccattcgcatgatcgtcgacgagcgaagcgcgctccaaaagaaaaaaaacatgacttgggtacgcaagtgcggggatccaggtcgagactggacgcgtggccagcttcatggtccacaacaagtggaccatcgtcaacggcgagttcatgttagaaggcacgggcaactacagcgcggttgcgttcgatagagcccgccatgcacagacctttgagacgcgcacgggtcaggcgcaccttgattcgatcaagcgcgagttcgagcagctctgggaagaaggacgggtgcttcaatgggcctcgaggcgtactgcttgcttcatgtacttgggggaggacgaggacgtttatgtgtaggatatggttgaacgtgcaagccagtaagtaactttgttggtgcccactttgacttgggcttacataggccgtgcaggagtgccatcgtagttacaataggagctcgaggatcatgatgagtcctctcagtccttaccagccaaaaaaggcaaactgcacctagcgcattgagctggcaacggcagccccatcgacggcggctccagctacaacgggatctccgtcacttgactcgtcccttcagtccactgctgcttcttcgtcgctcgacaatttgatcgcgtctgctggatcgggttcgttcattgatccgagttcagtagtggtaaacggcgagctgctaccagcgagatcaagtcgacgtaccgcaactgggtggggcctcgcgccgtctcccccgacgccgcgtgctaccgtgaagcactcatcatggacgcatgcccgaccaacttcgaccagaacgaggttaccaacacgtgctgggccgagtgcccgatcgcctacccggtcgagtgcggcatggaatgcatccgtcagaacgatgactgtgcgatggaggtgctcaacaaggtcggtgctgtagctagcacgtctagtcatcgctaccgttggtgcgtctcagaaactgtggcagctttcaaagggtgcgacgcgcgcattcgactgcgctaacatgatgatcggtacgatgagatccatcatccgttacgtgcgtaacatcaagaccacggacccgcgggcctcgacggacaagattttcaacatcttgcaccagtcgaacaacatcgtgacggacctgccgatggccatttacatttgcatgggttgggacttgccgaggcctcttatgtctcgggtcgtgtgcttacgacgatgaactggatcttgctaaacgccatcgggtacaaggacgacctcgtgtctagctggagcaagttcaaggctttcttgatcggcgccaacttcacggaggccgccaacaagatcaacgagacggagatcgggacgctgagcgacgccctgaaggccaaccccacctgcggctacgacttgcgagtgatgacggaccgcacgtgacgaggaaacgcagcataatgcgggtcaagatgagaacgtgatacttgccctcatgctgtccacgtcgtgcacacggacggatgctgagtctgtcggtgttgatgcactttcagtcgtcgaccgtaatcgcttccagtttttgagggacgcgaacatttttcttgagtcagggaagaagctggtgttttacctggtgcgtcttcgttatcgagctccgattctccggcagaacgaccagtcggaagtgaaacaattgatgcagagcatgatctggtattcgatcaccggcgcgaagatcgacggtggcaagttgcacgatgccgagtggaccaagaagctggattcttgaatcctgccaacgaaacactgtcgcagctgtgggaaagtggagagagaagcaccagctcggagcacgaacgttttgcacttattggctggcctgcttccgccgacatagtgaacgcagtcgcattgtttggagaagtgtcctgtgtgcctgtaattcttgcacagtgctacaacgctccgaatgcttctcagcgccgaacttgatgaaaatggatgccatttcgctcaaactctcaaaatcttcgagaagagcaatgcatctgttgagtttgtacccctttgccgggagctaggtgctgccatcgttgacttgggtgacactacactgatccaggcgtttttcaagaagtctgttgcccagctgaaagacaaggacagacagttatttctccaatggcttccagctctcgtgcgcacatttggatgggcatacgttagtgctgccacactgaatgccatcgacgtgcaatcaactgaaattcgctcggatcgagctttggaactcgcaaacacacggttacctgtcgattggaacagatacagaacggatcaggttttggatcaggtttttagatactccaggatagacttcaggatgtgaacatgggagttggtgcatgtgctgctgctaatgcgggtcggtggtaggtctcagtttgcagcaggcaatggcagacacaagtgctcagtcaccggcgcgaggtggagtgcgcgttattgggtcacaggaacgaggtgctgggtcgctgaaacgacgagctgagtcgctggggcgaggtgctgagcaagagccactggagcaagagtcactgtcaccgaagcaagacgacgagggagatgctaagttgccaaagaagcatcgtcaagagcgcacgacgtgctactttcaaggttacaagtacacgcgttcatggacttcatcaaagaaggccgtgtatcgttgttcgacattccgacgcacaaagtgcaaggggactatggaattccgcatctcgacaatgggctactccaatgcgcgaccgcatacatgccaggtcgcgcaggttgctagtggactgtccgatgtcaacgaggatatgaaggccatggcagacagcttggctattgctgacgtcgctcgaccggttagagaaatatggcaggagctgcgcagcatcttctacggcaatgacaacaatgtcatgcttgggttgtctgagtcacaagtggtcaaccgcgtttacagagcaagatctcttcactacagtggcaacgtgcacggatcggtggagatcccaccactctcgcttgcactcaatgagtcggtgtcatttttccaatttcactttgtttcagcaaaccgccacgatgtgaacagtccaacacgtttgctagggtgggctcatccagcgctggtgaacttgtttcgctaccacaacgtgtcgctctttatcgatggcacctttcggtgcgttccacgcaattttcagcaatatgtggttttcatggttcatgactgtgcgtcaggcctgtacatccccgtgttttatatcctaagtacatcgcgcagtgctgatgcatattgggatatgatgcactttattctccaagctactgaccagcaactaagtccagccgaaggcgtatgcgactttgaatcggctttagtggaagcagtgcaaacccagttccgtgacgccattgtcttgggttgtctattccacctgaagcaggcgctgcggcgtgcgatgaagcggtatgctatacctgatgcagaatgcagtatagcgatgacaagaggcgtcatcgatatgttgacagtggccaatccggatcaagtgaagtcgcatgggattgcttgggctcagacggaaatcaagcaacgctgtgagaagcaaggaactgcgtactcaaacgcaaagaggcaggagttttgggtgtactttaagcgtacgtggattgacggatactcggtggggctttggaacgtgtacggtcttgataatgagcttgttgcgcgcacgaataacccgctcgagcgcttcaatcgcattctcaacacgcgcttccccactccacacacttccatggccacgttcgtgaccgtgatcaagcaactttcagccgagtacgttcagcagctgggtgatatacctcgtgaccgtagcaagcgcgtaacgcgagagaccattgagctgcccattgccatcgatctacccaaggcgttcgaggatgcgaccacatttgacactgattctgcgccagcgtcggcagctacgacttcagatggcgatgcaccactgtatcatgaaggtgcctgccagcacggtgctgctgctgtagtgttgtagtagtctagctatctatcaactagctagtagctttgcattaatttgccaatgccctttgcctgctgtcatgagtgtgttcttcacgtgttgccttcaaatcggccggcccgatccaaaacctgatccgttctgtatctgttccaaattcaaatctaccttttcaatcgtcgctgactttttgaaggtgtcaccgatgagcacgagattcctggggttaaggctctacctagtggacacatcgttcgagttcaagtcggtactcttggggactcgccatttcgcgcctcagtatgggggaccagatggcggaatacgcggaccactttaccggtggattggtgacgtcctggggggggctttggtttgagtcgccataaccttttcggggctacaacagtgatgtcaaatggatgatgagggacggtctaaagttgtagcgggagtagtgcgtgccgcacttcatgcatgcggcaaccaatactgttttcggcatcgtcggtgacaacagctcgtccaagaacccagccatgaccgacatccttcgacgcatcatcaaaacgatgtacaaaacgcagcacgtcgaaggaatgggcactctattaagcgagttatgcagcgttatgaacccggagggtgtgcatccacgctagctcttaaacttccgcacgcatcgattcctgggcctcacgcgcgtcgtccgacgcattcttctactctgggatccattggtgcaatggtacgaggagcgggccacaaaagcccgacgtgagaacgtgatgccgccggagtccttcccactagctcgggaaaagatggaactcattcaggtgctctcactgctggagccgatctcgaaactaaatcagattggacaggccgagtcggggggaccaatgcaacgtgcttcttggactctacaagctccgaatatccttgttggacatcaccacagccttgaaggactgaagacggagaatcggttcttccgaccggatgagctgtacgatctcgcatcgacaacccgttcgctacttcacaaagggtttcgtcgggttttcttccggcggtacaccgatcgtgataccatgaacgtctgctcctttgcctttgagatgcaactatttcttcaccccaacttcaagcatccatatggagcgctgacaactatttcttcaccccaacttcaagcatccatatggagcgctgataaaggtgttaccaaggtcaatatacaggcaggtgcctcccagcaggtagctgaccgacactacacgaagattcgacgcattatcattgacagcggctgacgccgagccgacgtcgactgatatcgttgccccaccgccagctactgggttatcagaggacttcgtggagctcttcacggagacagcgaacgaggtggcaccaccacatagactgcggtgcacgagcaacgcatcgacgatgagctcgaccgctggctgacaacgcttacttcgcttcaagcgattcaacccggtgcgtttgactcagttctgagcttctggaagcgccagcaagagctgggcaacttcctgcttcttcccttggttgcgcgcgtgctgttctcaatgccctcaccatcggcccaaattgaacgcgactttgggatggcaggcaggatggtgacccccaccgcagctcgatggcgccttacaacgtggacatggccacatttctgagctgcagcagaacttacgtgggtatcacccagtacccaaagttgtcgtcgagcacagcaaaggatcaagtaccgtcaaacgccatggtgagcatagagcgagagttggacgacgagttcggatcgttgatgaacaaaggcatcgagttgggactctccgacgacgaaaacgacggtattaccgaaatgtagcgggagcgggctggggcggacgaaaacgtgagagaacgggagcacgtgtggaagtggaaacgggctatagctgccgtggtagagtgctagccatgcatgtgcatgaaatgagtgtctttgcttttcatcaacacgttctgaccgttgttggtgttagcttcgctatgcagcatatgtaaatagtattttgctttcacctatgctttcgtgctggtcgtttgattactagcaactctgtaacacgcattgcagcgcgtacacggatcgcctcctgtgtttcaagctagattcgctcgatttgggatcgatctcgcagtattcgcgaccgtgggcacacaggcgggttgctggaccgggtggcagctgctgaaacccgcgtagttggtgtcctggctgccgctgcttcttttctgcggtttgctccagcggctcgtgataatgcggtggtggagcctcgcgtgcttgcagttgcttctgtagggcccatcgctgctcctgttgaggaagttggcgtcggcgcgaacgttgggacgatggccgtggacttgtcttgacttgatacagatattcacatcggtgttcttgaggacatcactgtattatgctggtcctgtggtacgaactcggagtgccatcagttcacggggttttgtctcggcagtcttcttggccaccacgatggctgggcgaaaccgttcgcctgggtggttgttagccctctcttgctcctgatcctgacgcatgcgaatcgcgatgtcgtgttgatctagcccgccgttgatcagctctactacgcgaacctctgtgcgagcggttgttgtctcttgcactacttcaaatttgcaaatgttgtggcgctcttacgcggcacgcttgtgctcctcctctaccaggttgtgttgcttgaccctggaagactgcaatgtgacttgcaaaacgcctggtgaggagatcaaaagagatcatctttgaccaataaaacgagattttgtttgccaataaaaaaagcaatttgcagagcgaaccaagttctcgccctagctcggttcgaatgaaaagtaagcgaaccaagcccccccccctccggttcaggtaaaaaagaaaagaaaagaagggtgaaaccgtggttccagttcagttcgtcctaggggtgggaaattcacgaagtgtaggaaagtgtaatagacttgcgaggagagctgctggtctttctactcagtccacaaatggaaagttctgtccgtgcagctctctcaagtctaacctaaagctctacactgccagtcatactgtacaccactcgtacaattgcctctctcacattgatggtcgcacgctcttcaattgttttcgtgaacccagcagccgcagtcaacggcaattcgaagatgtcgttgggtacgccccgaggcttcactgctccagcaagttctcacttttcctttcgcaccgtcaagcgcagtcactggtctccaacctccatcgcctgttagtagcgttgtatcaagccctatgtcggggaagggtgcgccaggaaagcgcaagcgcaagtgacacccatttgatgacgggaagagcgatagaaatggcactgaaggcgcatgcccgaactcggagggcgatgatgacctcgatgaggatgacgtagattatgaggacgcccaaccagtaacgacacgtccaagcaagaggcctgacgtcgcggagcgcatgaagggcaacaagaataccagcctcgtatatgtgaagatgtcactaggttccttcttgacaggcgaggagaaactgttgctgtcattcgatggcattctcgtggacttgagcattggattgttaaatgcctacgcgctgctgaacatccacatgatacggtgtgtgacaaaggacttcccattcctcgatttgagcagaacttcgtttgccaatgcttgacagacgtaatgtttaacgacagcaacgtgcacatagacgctgaactacatatatcgttggagctatacaatttgttgagaggctctaacgcttctcacgggcgtcgcgctggtatcaagaacgggtggcaacaggcgcagctcgggagatgatgaccgctatccagcatgcactcaaaaatgagtttccttcgccggtttaataaggtgctgcgggtatggtgtagacagaagcactggtagcacacattattgccccagagttcgagcggactacaccagacattcctgatcgtcagcgcctcgacaacgtagtcaacgagtggcgtggagaagtccctcagcgtcggagtgagctggtcaacttcacgtggtgcttctgacttatcgactcctgcaaatgattgaggagcgtaacgacagagttgagcaaagcgtttgcgctgtttaagcgacaggggcgtctgattttgaagttagactaatccaagctgaagttatgaagacgttcactgttctaccaacaaagcaaggatttggaattagtcacctcacgatagatttgattggtttccgggaactattagtccgcaacgacattgctgttcctctgtacagatcgaagtggaatgaggtgagatacatttattggagacggttcttccgtattgacaaagtggagactatagagtttggtcatctcagattcacacgagagatctcgacggacggcaagtcggtgaacatcaagattcggaagcccgaacgtgggccttccgagcccaatgcaaatgacctccaagctgccgacattggctctagatgggggttggatgcgagtaaatgcaacctcttggtcaccacaaaccaggacgacgaaacggttgtgtgctctggcaaagagtatcgcgaagacgcttgcattacgaagagcagccagaagcatttgagatggatacgggatcgtccggacactggagctgcctttgcgagcatgccgacgaagaggagcatgttgctaaagcggtggcgggagtacgtctcatttatgacgcagcacctgcatctgctagtgacccccatgcagcacaaatcgtaccgtcgccatcgacttcgaaggagcttcgttaaaaagaagaagctatgtgagctctaccagaaacttgtatgtcacggagagcgaatttttatcgtcattgacaaccggagtaacggcgatccaaatggagcgatcaaagggaagccatcggcactcgtgcagaaattggcgctggagttgtcaaagacgtcgaactgtacggtcatcattattgccgagttccggatcagcaaagtgcactttggttaccaacaagaactgtccaagcaatacccgtatcgaaaggccgctgtccacgtacgcgcagtccacgaaagacgagccacgtacccagtttacggcttactccatttcagaaacaaaggttgttctggtatgagtgtgaacagggacgtgaatgcttcgaagaatatgctgcgcctgctcgattgtgaactcaacgagactcgcccagtcacctacacgcatcaagcaaacagatagataacaatacatttctagtgtcgctgtgtgcctatctaggggtgaggaagattacattgtgatagccggctcagaaattagcccttttggactctgtaggctacgtacctataggacacccttaggagaataaagggttaaacaaaggctcaatgaagcctggttgatttctgcatgaaatatttttcaaaacggtgatgcccctcctgtggatgaatatacttgtctttccgacagatagctcagcacgattgttgtctggccgctttgcagaccattttgaccaattttaacacgtaaagccttaattgtgtccaattaaaatggttaaatgtaggtttgacattctgacaccttccgacaaatatgtgtctgaagtatttccaaaatatcaatatcttcatgcaaacaacaactgtaaaacgtatttttcaaatataccagccattcgtacaatgaggagtggccctaatgtaggaacactgaagaggatgaggtcgttggttggatgtccaccgttggtgtacactttaccagaagagtaacgtagccatggatcgtgcgtgatgcgtggcacatgcacaggacgcaaggaacaccggttcaacgtgagtagaaaagtgcttggcgcttacctggtacggtactactcgcagcttaaagcgctagttcctgcagtgccgatcatcatcctgcttagtatctgcgggcatctcgtcaactgcattgcttgagtggtctgtagctggcggctccacctgctcaagaccaagaacaaactcaagacaacgtgcacatgttgccgagaagatggccaccttttggctgtgattgatgggcttatcgcctcgaacaaggtcatggctgcatcgtcgaggcggtactactaaataataagggtccacacgcaacaacggaagaaggacaactgcaagagccatcagatcaagaaccaaatcccaagcacagaaaaaagctgcgaacctgtcggccacatggcttgcgtggtacaagaggataccacgcgtgtgggactcaaccgatagaagtcggagtgtcgccacgtggtcgcctccatgaagctctccctcgacgatagcttcgtcgtgaatgtcacagcggaagaattcaagaaccaagtcctcaacaccggccgcgcggaaattggactgctggagtttctaaagctagcggcgtcaacgaagggagccgggagtatcctgcgtgcgctgcacccgctgcatatgtccggtatattggacgagcaaatcatggtctacaggcaccaactcgtcataggaagcatcgaagaccctgcacatatcgacgcgcaagacatgctcggcattgtaggtcatgtgtgagaacggcgaggttaattcattccaatatatgtattcatttgacataacatcgcagcttaacaagacaacatattcatgtgtacacatccgcgcgcgcaggtcacctaaccaaagcgtaggctgcacaccgctcgatcgtaccgcgcgcacccacccactacatgcacaaatcctcagcaatacagcacggttcaaagcactgatcctgacccaatcttgatcataaacaccggccgaaacgtggctgtagacgaagctagtattgcgtgtcgttcgcaatacgctcactatattatcgttttcaatccccaaaacccgacagggaaatataacttcatgctatatgcttgttgctgtttgacatcatggtacgtcgtgagtttcaaattgcactgtgcaagtgaaactaaaagatcgtttggatggtgtggttccaagcccagaggtattacagcttgttgatctgacagcgaagtcgtctgaaattcgttctcacgtaattgaagttgtggagtctttgaaaggatctaatcgcgttgtcaataccgataatttctacacctcctgcgtgctactagagtcgctaaggtcgattggtctttatagtcgtggtacagtgcgcacatccagcaaacacttcccccacttcacaatgatccgaaaagctgatggaaagcctagaggctacatgaaacaaggcgtgtgcttagagtaacatatcgtagcggccagttggatagatggctctattgtgaatacagtctctaatgttgacgcctactcttcctctacggtatatcgtcgcataaaggaggaacatgttgcgtttaacgtcccggcctgcctcggtgaatacaacgcggggatgcagggagtcaaccgtcatgatcagcttcgcggtcggatttcgcttgccgatggtcactcatttcagaagtggcataaaaaattagcaatggctatgattgatatcgcgagatgtaatgcgtatgtatgcgataacttggcacgtgatacaagcgagatggatgttgcacagcctcgcaataatgcaagggcaagcgcccgtgacggtcaccgggcgtttgtcattccacttgtgcgagaattattcaatggagattggaagaagtccattgacagtgatgacgtaattgtgtacacttcgaacacaaaacccatgaccactgctgccaatttgaccagaaatacgaatgagttagaaacgccagcacatacatgtgtagcaaacgaatcgtggcttgtgttacaaggaaggagtcgggcaatgcacaaacggactgtttgtaaattcgagggcagggatgccacccagaaaacggattactgcgagacacatcgagttgcactctacaagcgtacctatcctatcgaccacagaaacccgcacctgtgtcagcagcaagattggacgtgctggcaaaagtatcatttgttctacttgccaaaacaggtctatacagttgacggaaacctgagaaggtcgtctccaatttgtaaagcccagtgttcgttcttgaaggagcgtcgagaccaagataatactgaagagatcagcaaccacgactagcattcggctcaaatatagtactgaaggtaaaagtaggcactcaatacattgtgtgcacttgaactacgactgaaaaccagtcagttacttgtactcacagcatcctccctccttgtacattgaccagtgcaatgtgcgccgctttggtgcctttcgtctaattatagagcacatgcatggtgctgcatgttaccctcagcaccaatgtctcgatgctccctctctaggcggctccagcacctcgatgtcacgtagaattatgtcgccgggcccgtgatgtcgagatcgccttgcggtgaacccgaggcgttccacgagctgtcgctgtcgctagttcgcccctgcaacgggcgccgtctgaaattctgcgtccttgctgcctttcgccttgtagggctgcgccatcatctcgttctgtcggtgtctagcgtatggctgctgcatcgggcgccgttgtgccgcacatgtgcatgatgtagcacaataatgtcgggataggagccaagcgttacgttattgttggtgtcggcgcgagtaacttgagagacacaatagcatgagcgcgccgtgtctgatcaggatttagatcccacgctgtgattggcagtcaacgctgacattttcctagagaggcgcaaaaattgttgatcaaaagtcggtgccgtatcttaacttcactataggctagattagtctgctaccttcttttggaaaaatatcttcatgtatcattctggtatcgatagggttaaaccactagtggtacgcgaaggctggaataggatacagataatccgatctacactagtgacaataaagaaacgtaagtacaactctgttgcaagcccacagcattcatctagagaacgggtgtagcgctaacgtcatcgaagttcttggcgtcgaagtaaagctttattgccttgcgaactccgtgacacggcacgcttgcagagccactattttgtattggtgcctcgtggctacagcgtcaacaaatccccccccccccccccccccgggagtgtgcagcacacctcgcttttggtgctatcaatcatcaaacaactgatctaatcgttctctggtctgtcgaccatcatcgacattgagtacctcatcgtcaaatgcaaaacccttcgggtcggcaacacagcaatagtaatagaccaacgcgataggagggtgtcttgtaccagtgttgagcctttcccataaatcgaacctcctcatccgtaaaattaacacaggacagagcgcgaccttcaagctctccaagtctgtcctgaataccccgttgtttttgcgcgcggcgggcgcgggccttgccgttcgttctcgaggtactgctcccgttcctgcaaactttcattagctctttgggtacggcgcttcttgctgcggtcttcagtgtcggccattgccttcccacgttgttattggtcgtcatccctctacaaaacaaactgttggataaagcctaaatcatacggcgccatgctcccccgactacaccaatttgaatgcgctcccattagtatagtcactacaaattatccatagcaaaaaatctccgacctccgactgcctccgacgtacacatagcccgttcattaattatgtttcgtacacaaatatgtataaaatgtgcaggatctaaatcaggatgtgtatgcccagcaggcgataatataagggcgtttgtaggcgggataggaagccctgaaacggcctgtgggccaagaaaacggtgtttttcgtttatgcatgcttttctatacagattcgctacggagacttgctaacttgccgcggcagattggcaagtgagaccccagcgcaaaaatcggcttcttacatgatagtttttacgctgactcgtaattactcataactgtggttggctggcaggtcgaacgtaggtacaacctcaaaaacgaggttatttgagaactactggcctggggctgccgcaagtgccgccgcacgacagccctcggcattccctcttttttctctcgtccggcacaagtgcccgtaacaacccagtgcatttgctttgggttcactgcatgtttgtatacaagccaatgggcagccgcctctgctgacaatgcaaggcgtgctgactctgcttcgaggttaacattgctgttccgcaaggaggttaagctttgtgtttgatgctgcgcttagatgtgtgtttgaatgctctgtaacgaggttaactttgctgttccaattggaggttaagcttagtgttcaatgtagagctatcaatgtctttcccctgctactgattctaaagcacgtaatacaccctgtattaactccttatgcgctacctcgtctatccttccgttgtgttgatcgtgttgtcctcaacagcttcctcttcgatgaacttcttgcgaacaagaaggcggcgctctttttcgaaggcagcgacaacggtctggctcaggtgttctcgaggttcccacgtcgcctcccactcgacgaggtaatacgtctgccgcttctcacgcttccaattcagcagcttgcagacgtagtggagcttctctgctgtcaggtcttcttcagcgctccgctcctcctcgtcgctcgatccatcgtcaccgcctggaccaggagctgctagccactcacgcacgtcgtcaatgccgacgcaccgcttcttccgttcggccacgcaagcgaagatgacatcgatcgcttcagggaggaggctcgcggaggcaaccgtcgtgttcatggtaagtcgaaggtgacggattgcctcatcactaacccggatcttgtacgccttgcgagcagcgatgcatagcgtcttgaactccttcgcggagctgatgtcgtttttcttgggctttgttgaaggcatggcggatgcttcgctggttcgggtgcagaacggagagtgggcttcagtgctctccaaacgataatcatgaacagcaacgactggttgcggcgacaaaaggtaagtctgtatgcaactacgtgcttaaactaaacctagtatgttggtggtgtgcgaaggggcagggtcaactacgcggccggcggcttgaagttgcttgtaatggctgacgtgttcgttgaggtgaccagacttgtgcagcttgcgcatggacttcaagacgttttgggccccacgagctgtgatcttgtgctcgcggagatacaacagcaactgtgtctccgcgctggcaccaactttcaggacttcgtctcgataccgcggtgatttctcatcaagctcgaagccatctccaagaaacagcttcaagaaggcgacgatcaacttggcgtttgaccgcatgtgcttggtcgctgcatccgttgagctccacatccgcggttcttgagcgtaccaagaaaaccaagcatctttcaggttggtagcagcagaggtgcgccgacgcttggcttgaggatcgttgttgcttgtatcttcacttgaaatcattgctgacggagcttgttgttgtttgttgtgtatcttagcctccattatagacagccgagtgtccagcttctggttcacttgaattaattgttcaatcagggctgcttgttgaagaaacatggggtgctttgtgatagcttccgtggtgtcttggatggttgaatgttttgcttcagatgttgtcgttgcgttcgaggacaggaacgacgaccacgccagcagatcgttgactgagaagcctttctcaactgcgcaagcctcgatgcgttgaatcgccagcccgttagtactgagacttttcaaggacggatagtgccgcagcagatacgccatgaaggtgtcgatgacgcgcgcgttcacgttgtacggtggcgactccagcccggacgaagcgttgaagagtgctgccgctacggactggatcttggactgggtatcggaatcgaagcagtccagcgtcagaaggcgaactctttgttcggggtcacggccgctcaagactcgtgcaaccctgtggtcctcggcaggagtgttgaagacgtacgcgaaggctttgttcgtcgccgtcatgttccacgctccacggtcgaaaatccactgtacgcacattccagctccatttgcatgctgagctccgccccgccgaaaggaatgcgacgtcagacgctcggccacgccagcatttttggcgactctgtccagaacgcgattgacgtagctgtggatcccaggagcagcatcggccgtcttgctctcatctgacttcttggccgtttgatgcagcgggatcacagcttccgggtggtcgatcaaatcaatcagaggcgtagcgggtgtcagcgtcgctcgggagactgtctgcggctccgaaagttggctcagaagcgaagccgtcggagaagactgcgtcaccagggcaagcgcgatggcgagaagcgggcatgtggagaagtcgtcgtcgggaaagagcgagaggccttgttcttctgcagtcttgacccggatgaagcgcacgaagaagatgtcgcctgcaccaatggacaggttggccttgcgaagcatcgtaagatccgacgcacgcccaaagaggaaccagagcagacacagcaaggcggcgtcctggtagtccgcggaggtataagccgtcgaatagagatataccatcatctgcttaagcgcggtcttcgtgcatgcaggagccttgtttacaaacgcccccgactctctcttcatacagtaccgttctagtacttgtcccttcttcagcagaatcttgtcgatccccgctcgatgctgagggaactgttccagcagccaggtcttggcctgtcggtagtactgcatgaccgagtgtcgggctaagagctggcccttgcgcccttccttgaaggcgaggtacatgccgaacttgtctaccacagcctccaagacgagccaagcactctcgcgctgcatgcacactcccaagtactcccagctgacggattcctcctcgagaaacttcaggaacgagcgtgctgcgcattcccgagcccgcttggtgttggccggtgcgaagtcgttgaggctcatgttgggtcggagatgtcggagcttgtgtgttattctaagaatatacgaatgacttgcaatctgtagagggatatcaataacttctctgctttctccgacacgatacgtcggaggtgtggttgtggggcctttacgaattagcgagctctctaattggttaaaatagatcacacagactgacttgattcgttataagttaaacaattgccaaccccttctttctattggtcgttaatatacatagtgaagttaagtgcgatcggagatttgacgatattcatccatacaatcatgtagcaaaatccccatctatgctgcccgagtgtccagtacccaaatcgattcaccggtaaaactatcccgtcgcattgagatttttgaggcattttgctccatggttcgcgaaagggttaacacgctgatggcgcatttcttgaagcctgtcggcggcagtaccgatagcacaaactgcgtgtcgtggtcggtccaacggcactggcgaattccagttcaacgtgcttcgtgtcggcccactgcttcgtgcagctcggacagtgcgtgtgttgctgatgtccttgcagcatatgtgactcgcaatccgttcctcatcaacatggcttgtgcaccttgcagggcagagccgccgtctttctccgagctcaatccagaaaaagcaggccagtgccaagagagtcgtcaacagggcggaaggagacgcagccagttcgcgcaactccagacgacgcagaagaaccccacgccacagcagcgttccaggcctcctgctgtgagccgcatttgcctgccggcgccaacgtttgggctcagttgcgagcgctgaacgtacgactccttcgcgccattgcgaagaccctcgaggccaccatgccaccaacagacagcatgaagacccgcgcccgcgccgtgagctccgacaatgccaagcccacgatcgtgctcaacctgccgggcgtccgcctcgccgtgctcacgagcgcctacgactcgctcgtgcacctcgacgtcaccctcagctcggccgcgtcgctcttgctcgccacctatgtcgcctgcgtactggcctggaacgtcctcgcgttcgtgctcacgctcctggtgcagggggcggcgttcgggctcatcagcttttacaccttcatgggctgcgccatgctgtccatgaatgcctcacgcaacgcggcctccgttcaaaactactacatcgccaagccggtggctgctacagcctccacgctcccattgctccgcgttgacggcgggtttatcgcgtccaagtccacccatgtcgacaagacagacgatgcggccgcttccaagagaaaggagcggcaggccccggctgcccgacgtcgtgtgctggcgcacctgaacaagaatcgcctcctggtcaatgtggtgcccggtgacatgcgccgccgcgtcgacatgaacctaggcgaagcgaacattcgtgtgggctaggcgttcgtgcaagcgatgcccggcaagcgcaagcccttcgacgtctatgtcatgcgcgtggactgcggtgcccagtcggccgaccaggagaagcacatgaaccccatgatcatgtgggacgtgaatgcaacgtttgacaggtcaagcagctcgagcgcgacctgaagaaggaggtaaaggcgaaaaaggcgtcgcgcggagtgcaactgccgcatgtgtcgagcggcgctgtgcttttcgtgctgcctgagctcacggaccatgtgctcaacgtccaccgcgcccatctgcagacgttcatcgacaccgtgcgctcggacccagtgctttccaccacgcggtgcttacgcaagttctgccaaacctaccaggctgcccagccccaatgcactctccgaccgaacgagagactgcaacacgggtgagaaggtcgggtgctgccgcgctcgtgtggagaatgaattcgtcgagccagtggctaccaagagagaagaggagatggagcttccattgt

SEQ ID NO: 12 - DNA, 8853 bp, unidentified
  misc_feature 1..8853: note = Fanzor polypeptide
  source 1..8853: mol_type = other DNA
atgatgatcggtacgatgagatccatcatccgttacgtgcgtaacatcaagaccacggacccgcgggcctcgacggacaagattttcaacatcttgcaccagtcgaacaacatcgtgacggacctgccgatggccatttacatttgcatgggttgggacttgccgaggcctcttgatgtctcgggtcgtgtgcttacgacgatgaactggatcttgctaaacgccatcgggtacaaggacgacctcgtgtctagctggagcaagttcaaggctttcttgatcggcgccaacttcacggaggccgccaacaagatcaacgagacggagatcaggacgctgagtgacgccctgaaggccaactccacctgcggctacgacttgcgagtgatgacggacctcacgtgacgaggaaacgcagcataatgcgggtcaagatgagaacgtgatacttgccctcatgctgtccacatcgtgcacacggacggatgctgagtctgtcggtgttgatgcactttcagtcgtcgaccgtaatcgcttccagtttttgagggacgcgaacatttttcttgagtcagggaagaagctggtgttttacctggtgcgtcttcgttatcgagctccgattctccggcagaacgaccagtcggaagtgaaacaattgatgcagagcatgatctggtattcgatcaccggcgcgaagatcgacggtggcaagttgcacgatgccgagtggaccaagaagctggatttcttgaatcctgccaacgaaacactgtcgcagctgtgggaaagtggagagagaagcaccagctcggagcacgaacgttttgcacttattggctggcctgcttccgccgacataatgaacgcagtcgcattgtttggaaaagtgtcctgtgtgcctgtaattcttgcacagtgctacaacgctccgaatgcttctcagcgccgaacttgatgaaaatggatgccatttcgctcaaactctcaaaatcttcgagaagagcaatgcatctgttgagtttgtacccctttgccgggagctaggtactgccatcgttgacttgggtgacactacactgatccaggcgtttttcaagaagtatgttgcccagctgaaagacaaggacagacagttatttctccaatggcttccagctctcgtgcgcgcatttggatgggcatacgttagtgctgccacactgaatgccatcgacgtgcaatcaactgaaattcgctcggatcgagctttggaactcgcaaacacactccatgacaacgatgctgcacttctagctctcgtagagtttgcgctgaagaaagctcacgcacggtgctctggccacgccgatgcattcgtatcttcgggtaagatcatcacacttttaaagcttgcgctggcgtgtggaaaccctcaaatatttgccggtctatcaaccatactgaacaagatcgatggcaatcttctccacacagtgattaatgcgctctcgaaatacgtcaatgactcgagtttacctgaacaacgtgctacgctggcctcacttgcagcgagacgtcgtgaatggctattcgctgagatcgaagacacgaagcaaccactggacttgacgaagcgcgagatctaggcaatgctagccgacaacacaatcggctccgcgaagtacttttcaatcgtcgctgactttttgaaggtgtcaccgatgagcacgagattcctggggttaaggctctacctagtggacacatcgttcgagttcaagtcagtactcttggggactcgccatttcgcgcctcagtatgggggaccagatggcggaatacgcggaccactttaccggtggattggtgacgtcctggggggggggggctttggtttgagtcgccataaccttttcggggctacaacagtgatgtcaaatggatgatgagggacggtctaaagttgtagcgggagtagtgcgtgccgcacttcatgcatgcggcaaccaatactgttttcggcatcgtcggtgacaacagctcgtccaagaacccagccatgaccgacatccttcggcgcatcatcaaaacgatgtacaaaacgcagcacgtcgaaggaaagggcactctattaagcgagttatgcagcgttatggacccggagggtgtgcatccacgctagctcttaaacttccgcacgcatcgattcctgggactcacgcgcgtcgtccgacgcattcttctactctgggatccattggtgcaatggtacgaggagcgggccacaaaagcccgacgtgagaacgtgatgccgccggagtccttcccactagctcgggaaaagatggaatgctctcactgctggagccgatctcgaaactaaatcagattggacaggccgagtcggggggaccaatgcaacgtgcttcttggactctacaagctccgaatatccttgttggacatcaccacagccttgaaggactgaagacggagaatcggttcttccgaccggatgagctgtacgatctcgcatcgacaacccgttcgctacttcacaaagggtttcgtcgggttttcttccggcggtacaccgatcgtgataccatgaacgtctgctcctttgcctttgagatgcaactatttcttcaccccaacttcaagcatccatatggagcgctgataaaggtgttaccaaggtcaatatacaggcaggtgcctcccagcaggtagctgaccgacactacacgaagattcgacgcattatcattgacagcgtccgcagcatcatgacagcggctgacgccgagccgacgtcgactgatatcgttgccccaccgccagctactgggttatcagaggacttcgtggagctcttcacggagacagcgaacgaggtggcaccaccacatagactgcggtgcacgagcaacgcatcgacgatgagctcgaccgctggctgacaacgcctacttcgcttcaagcgattcaacccggtgcgtttgactcagttctgagcttctggaagcgccagcaagagctgggcaacttcctgcttcttcccttggttgcgcgcgtgctgttctcaatgccctcatcatcggcccaaattgaacgcgactttgggatggcaggcaggatggtgacccccaccgcagctcgatggcgccttacaacgtggacatggccacatttctgagctgcagcagaacttacgtgggtatcacccagtacccaaagttgtcgtcgagcacagcaaaggatcaagtaccgtcaaacgccatggtgagcatggagcgagagttggacgacgagttcggatcgttgatgaacaaaggcatcgagttgggactctccgacgacgaaaacgacggtattaccgaaatgtagcgggagcgggctggggcggacgaaaacgtgagagaacgggagcacgtgtggaagtggaaacgggctatagctgccgtggtagagttctagccatgcatgtgcacgaaatgagtgtctttacttttcatcaacacgttctgaccgtgtttggtgttagcttcgctatgcagcatatgtaaatagtatttcgctttcaccttgctttcgtgctggtcgtttgattactagcaactctgtaacacgcattgcagcgcgtacacggatcgcctcctgtgtttcaagctagattcgctcgatttgagatcgatctcgcagtattcgcgaccgtgggcacacaggcgggttgctggaccgggtggaagctgctgaaacccgcgtagttggtgtcctggctgccgctgcttcttttctgcggtttgctccagcggctcgtgataatgcggtggtggagcctcgcgtgcttgcagttgcttctgtagggcccatcgctgcacctgttgaggaagttggcgtcggcgcgaacgttgggacgatggccgtggacttgtctcgacttgatacagatattcacatcggtgttcttgaggacatcactgtattatgctggtcctgtggtacgaactcagagtgccatcagttcacggggttttgtctcggcagtcttcttgaccaccacgatggctgggcgaaaccgttcgcctgggtggttgttagccctctcttgctcctgatcctgacgcatgcgaatcgcgatgtcgtgttgatctagcccgccgttgatcagctctactacgcgaacctctgtacgagcggttgttgcctcttgcactacttcaaatttgcaaatgtcgtggcgctcttacgcagcacgcttgtgctcctcctctaccaggttgtgttgcttgaccctggaagactgcaatgtgacttgcaaaacgcctggtgaggagatcaaaagagatcatctttgaccaataaaacgagatcttgtttgccaataaaaaaagcaatttgcagagcgaaccaagttctcgccctagctcggttcgaatgaaaagtaagcgaaccaagccccccccccccccccccccccccccccccctccggttcaggtaaaaaagaaaagaagggtgaaaccgtggttccagttcagttcgtcccaggggtgggaaattcacgaagtgtaggaaagtgtaatagacttgcgaggagagctgctggtctttctactcagtccacaaatggaaagttctgtccgtgcagctctctcaagtctaacctaaagctctacactgccagtcatactgtacaccactcgtacaattgcctctctcacattgatggtcgcacgctcttcaattgttttcgtgaacccagcagccgcagtcaacggcaattcgaagatgtcgttgggtacgccccgaggcttcactgctccagcaagttctcacttttcctttcgcaccgtcaagcgcagtcactgtctccaacctccatcgcctgttagtagcgttgtatcaagccctatgtcggggaagggtgcgccaggaaagcgcaagcgcaagtgacacccatttgatgacgggaagagcgatagaaatggcactgaaggtgcatgcccgaactcggagggcgatgatgacctcgatgaggatgacgtagattatgaggacgcccaaccagtaacgacacgtccaagcaagaggcctgacgtcgcggagtgcatgaagggcaacaagaataccagcctcgtatatgtgaagatgtcactaggttccttcttgacaggcgaggagaaactgttgctgtcattcgatggcattctcgtagacttgagcattggattgttaaatgcctacgcgctgctgaacatccacatgatgcggtgtgtgacaaaggacttcccattcctcgatttgagcagaacttcgtttgccaatgcttgacagacgtaatgtttaacgacagcaacgtgcacatagacgctgaactacatatatcgttggagctatacaatttgttgagaggctctaacgcttctcacgggcgtcgcgctggtatcaagaacgggtggcaacaggcgcagctcgggagatgatgaccgctatccagcatgcactcaaaaatgagtttccttcgccggtttaataaggtgctgcgggtatggtgtagacagaagcactggtagcacacattattgccccagagttcgagcggactccacccgacattcctgatcgtcagcgcctcgacaacgtagtcaacgagtggcgtggagaagtccctcagcgtcggagtgagctggtcaacttcacggcccaccgactggtgcttctgacttatcgactcctgcaaatgattgaggagcgtaacgacagagttgagcaaagcgtttgcgctgtttaagtgacaggggcgtctgattttgaagttagactaatccaagctgaagttatgaagacgttcactgttctaccaacaaagcttggatttggaattagtcacctcacgatagatttgattagtttccgggaactattagtccgcaacgacattgctgttcctccgtacagatcgaagtggaatgaggtgagatacatttattggagacggttcttccgtattgacaaagtggagactatagagtttggtcatcgcagattcacacgagagatctcggcggacggcaagtcggtgaacatcaagattcggaagcccgaacgtgggccttccgagcccaatgcaaatgacctccaagctgccgacattggctctagatgggggttggatgcgagtaaatgcaacctattggtcaccacaaaccaggacgacgaaacggttgtgtgctctggcaaagagtatcgcgaagacgcttacattacgaagagcagcaagaagcatttgagatggatacgggatcgtccgggcactggagctgcttttgcgagcatgccgacgaagaggagcatgttgctaaagcggtggcgggagtacgtcccatttatgacgcagcacctgcatctgctagtgacccccgtgcagcacaaatcgtaccgtcgccatcgacttcgaaggagcttctttaaaaagaagaagctatgtgagctctaccagaaacttgtatgtcacggagagcgaatttttatcgtcattgacaaccggagtaacggcgatccaaatggagcgatcaaagggaagccatcggcactcgtgcagaaattggcgctggagttgtcaaagacgtcgaactgtacggtcatcattattgccgagttccggatcagcaaagtgcactttggttaccaacaagaactgtccaagcaatacccgtatcgaaaggccgctgtccacgtacgcgcagtccacgaaagacgagccacgtacccagtttacggcttactccatttcagaaacaaaggttgttctggtatgagtgtgaacagggacgtgaatgcttcgaagaatatgctgcgcctgctcgattgtgaactcaacgagactcgcccagtcacctacacgcatcaagcaaacagatagataacaatacatttctagtgtcgctgtgtgcctatctaggggtgaggaagattacattgtgatagctggctcagaaattagcccttttggaatctgtaggttacgtacctataggacacccttaggagaataatgggttaaagaaaggctcaatgaagcctggttgatttctgcatgaaatatttttcaaaacggtgatgtcctcctgtggatgaatatacttgtctttccgacagatagctcagcacgattgttgtctgctcgctttgcaggccattttgaccaattttaacacgtaaagccttaattgtgtccaattaaaatggttaaatgtaggtttgacattctgacaccttccgacaaatatgtgtctgaagtatttccaaaatatcaatatcttcatgcaaacaacaactgtaaaacgtatttttcaaatataccagccattcgtacaatgaggagtggccctaatgtaggaacactgaagaagatgaggtcgttggttggatgtccaccgttggtgtccactttaccagaagagtaacgtagccatggatcgtgcgtgatgcgtgggacataagcaaaataaacaaaggctgtgcttatgtcttcaatatgccacgggaagaccgcaaggtagcctgagtgctgtgcagctggaataaagagatcgcgcctcacgttgtggacgtcgcgacgctggaccatccgacgcgggagcggcttgaacgcttgcaggagctcctgtttagcacatgcacaggacgcaaggaacaccggttcaacgtgagtagaaaagtgcttagcgcttacctggtacggtactactcgcagcttaaagcgctagttcctgcagtgccgatcatcatcctgcttagtatctgcgggcatatcgtcaactgcattgcttgagtggtctgtagctggcggctccacctgctcaagaccaagaacaaactcaagacaaggcgcacacgttgccgagaagatggccaccttttggctgtgagtgatgggcttatcgcctcgaacaaggtcatggctgcatcgtcgaggcggtactactaaataataagggtccacacgcaacaacggaagaaggacaactgcaagagccatcagatcaagaaccaaatcccaagcacagaaaaaagctgcgaacctgtcggccacatggcttgcgtggtacaagaggataccacgcgtgtgggactcaaccgatagaagtcggagtgtcgccacgtggtcgcctccatgaagctctccctcgacgatagcttcgttatgaatgtcacagcggaagaattcaaaaaccaagtcctcaacaccagccgcgcggaaattggactgctggagtttctaaagctagcggcgtcaacgaagggagccgggagtatcctgcgtgcgctgcacccgctgcatacgtccggtatattggacgagcaaatcatggtctacaggcaccaactcgtcataggaagcaccgaagaccctgcacatatcgacgcgcaagacatgctcggcattgtaggtcatgtgtgagaacggtgaagttaattcattccaatatatgtattcattcgacataacatcgctgcttaacaagacaacatattcatgtgtacacatccacgcgcgcaggtcacctaatcaaagcgtaggctgcacaccgcacgatcgcaccgcgctcactcacccaccacatgcacagatcctcagcaatactgcacggttcaaagcactgatcccgacccaatcttgatcataaacaccggccaaaacgtggctgttgacgaagctagtattgcgtgtcgttcgcaatacgctcgccatattatagttttctatccccaaaaccagacagggaaatatcacttcaagctgtatgcttgttgctgctcgacatcatggtatgtcgtgagtttcaaattgcactgtgcaagt

SEQ ID NO: 13 - DNA, 6692 bp, unidentified
  source 1..6692: mol_type = other DNA
  misc_feature 1..6692: note = Fanzor polypeptide
aggtagctgaccgacactacacgaagattcgacgcattatcattgacagcgtccgcagcatcatgacagcggttgacgccgagccgacgtcgactgatatcgttgccccaccgccagctactgggttatcagaggacttcgtggagctcttcacggagacagcgaacgaggtggcaccaccacatagactgcggtgcacgagcaacgcatcgacgatgagctcgaccgctggctgacaacgcctacttcgcttcaagcgattcaacccaatgcgttttactcagttctgagcttctggaagcgccagcaagagctggacatcttcctgcttcttcccttggttgcgcgcgtgctgttctcaatgccctcatcatcggcccaaattgaacgcgactttgggatggcaggcaggatggtgacccccaccgcagctcgatggcgccttacaacgtggacatggccacatttctgagctgcagcagaacttacgtgggtatcacccagtacccaaagttgtcgtcgagcacagcaaaggatcaagtaccgtcaaacgccatggtgagcatggagcgagagttggacgacgagttcggatcgttgatgaacaaaggcatcgagttgggactctccgacgacgaaaacgacggtattaccgaaatgtagcgggagcgggctggggcggacgaaaacgtgagagaacgggagcacgtgtggaagtggaaacgggctatagctgccgtggtagagttctagccatgcatgtgcacgaaatgagtgtctttacttttcatcaacacgttctgaccgttgttggtgttagcttcgctatgcagcttatgtaaatagtattttgttttcacctatgctttcgtgctggtcgtttgattactagcaactctgtaacacgcattgcagcgcgtacacggatcgcctcctgtgtttcaagctagattcgctcgatttgggatcgatctcgcagtattcgcgaccgtgggcacacaggcgggttgctggaccgggtggcagctgctgaaacccgcgtagttggtgtcctggctgccgctgcttcttttctgcggtttgctccagcggctcgtgataatgcggtggtggagcctcgcgtgcttgcagttgcttctgtagggcccatcgctgctcctgttgaggaagttggcgtcggcgcgaacgttgggacgatggccgtggacttgtcttgacttgatacagatattcacatcggtgttcttgaggacatcactgtattatgctggtcctgtggtacgaactcggagtgccatcagttcacggggttttgtctcggcagtcttcttggccaccacgatggctgggcgaaaccgttcgcctgggtggttgttagccctctcttgctcctgatcctgacgcatgcgaatcgcgatgtcgtgttgatctagcccgccgttgatcagctctactacgcgaacctctgtacgagcggttgttgcctcttgcactacttcaaatttgcaaatgtcgtggcgctcttacgcagcacgcttgtgctcctcctctaccaggttgtgttgcttgaccctggaagactgcaatgtgacttgcaaaacgcctggtgaggagatcaaaagagatcatctttgaccaataaaacgagatcttgtttgccaataaaaaaagcaatctgcagagcgagccaagttctcgccctagctcggttcgaatgaaaagtaagcgaaccaagcccccccccccctccggttcaggtaaaaaagaaaagaagggtgaaaccgtggttccagttcagttcgtcccaggggtgggaaattcacgaagtgtaggaaagtgtaatagacttgcgaggagagctgctggtctttctactcagtccacaaatggaaagttctgtccgtgcagctctctcaagtctaacctaaagctctacactgccagtcatactgtacaccactcgtacaattgcctctctcacattgatggtcgcacgctcttcaattgttttcgtgaacccagcagccgcagtcaacggcaattcgaagatgtcgttgggtacgccccgaggcttcactgctccagcaagttctcacttttcctttcgcaccgtcaagcgcagtcactggtctccaacctccatcgcctgttagtagcgttgtatcaagccctatgtcggggaagggtgcgccaggaaagcgcaagcgcaagtgacacccatttgatgacgggaagagcgatagaaatggcactgaaggcgcatgcccgaactcggagggcgatgatgacctcgatgaggatgacgtagattatgaggacgcccaaccagtaacgacacgtccaagcaagaggcctgacgtcgcggagcgcatgaagggcaacaagaataccagcctcgtatatgtgaagatgtcactaggttccttcttgacaggcgaggagaaactgttgctgtcattcgatggcattctcgtagacttgagcattggattgttaaatgcctacgcgctgctgaacatccacatgatacggtgtgtgacaaaggacttcccattcctcgatttgagcagaacttcgtttgccaatgcttgacagacgtaatgtttaacgacagcaacgtgcacatagacgctgaactacatatatcgttggagctatacaatttgttgagaggctctaacgcttctcacgggcgtcgcgctggtatcaagaacgggtggcaacaggcgcagctcgggagatgatgaccgctatccagcatgcactcaaaaatgagtttccttcgccggtttaataaggtgctgcgggtatggtgtagacagaagcactggtagcacacattattgccccagagtttgagcggactccacccgacattcctgatcgtcagcgcctcgacaacgtagtcaacgagtggcgtggagaagtccctcagcgtcggagtgagctggtcaacttcacggcccaccgactggtgcttctgacttatcgactcctgcaaatgattgaggagcgtaacgacagagttgagcaaagcgtttgcgctgtttaagtgacaggggcgtctgattttgaagttagactaatccaagctgaagttatgaagacgttcactgttctaccaacaaagcaaggatttggaattagtcacctcacgatagatttgattggttaccgggaactattagtccgcaacgacattgctgttcctccgtacagatcgaagtggaatgaggtgagatacatttattggagacggttcttccgtattgacaaagtggagactatagagtttggtcatctcagattcacacgagagatctcgacggacggcaagtcggtgaacatcaagattcggaagcccgaacgtgggccttccgagcccaatgcaaatgacctccaagctgccgacattggctctagatgggggttggatgcgagtaaatgcaacctcttggtcaccacaaaccaggacgacgaaacggttgtgtgctctggcaaagagtatcgcgaagacgcttacattacgaagagcagccagaagcaattgagatggatacgggatcgtccggacactggagctgcctttgcgagcatgccgacgaagaggagcatgttgctaaagcggtggcgggagtacgtcccatttatgacgcagcacctgcatctgctagtgacccccatgcagcacaaatcgtacagtcgccatcgacttcgaaggagcttctttaaaaagaagaacctatgtgagctctaccagaaacttgtatgtcacggagagcgaatttttatcgtcattgacaaccggagtaacggcgatccaaatggagcgatcaaagggaagccatccgcactcgtgcagaaattggcgctggagttgtcaaagacgtcgaactgtacggtcatcattattgccgagttccggatcagcaaagtgcactttggttaccaacaagaactgtccaagcaatacccgtatcgaaaggccgctgtccacgtacgcgcagtccacgaaagacgagccacgtacccagtttacggcttactccatttcagaaacaaaggttgttctggtatgagtgtgaacagggacgtgaatgcttcgaagaatatgctgcgcctgctcgattgtgaactcaacgagactcgcccagtcacctacacgcatcaagcaaacagatagataacaatacctttctagtgtcgctgtgtgcctatctaggggtgaggaagattacattgtgatagccggctcagaaattagcccttttggactctgtaggctacgtacctataggacacccttaggagaataatgggttaaacaaaggctcaatgaagcctggttgatttctgcatgaaatatttttcaaaacggtgatgtcctcctgtggatgaatatacttgtctttccgacagatagctcagcacgattgttgtctgctcgctttgcagaccattttgaccaattttaacacgtaaagccttaattgtgtccaattaaaatggttaaatgtaggtttgacattctgacaccttccgacaaatatgtgtctgaagtatttccaaaatatcaatatcttcatgcaaacaacaactgtaaaacgtatttttcaaatataccagccattcgtacaatgaggagtggccctaatgtaggaacactgaagaggatgaggtcgttggttggatgtccaccgttggtgtacactttaccagaagagtaacgtagccatggatcgtgcgtgatgcgtgggacataagcaaaataaacaaaggctgtgcttatgtcttcaatatgccacgggaagaccgcaaggtagcctgagtgctgtgcagctggaataaagagatcgcgcctcacgttgtggacgtcgcgacgctggaccatccgacgcgggagcggcttgaacgcttgcaggagctcctgtttagcacatgcacaggacgcaaggaacaccggttcaacgtgagtagaaaagtgcttggcgcttacctggtacggtactactcgcagcttaaagcgctagttcctgcagtgccgatcatcatcctgcttagtatctgcgggcatctcgtcaactgcattgcttgagtggtctgtagctggcggctccacctgctcaagaccaagaacaaactcaagacaaggcgcacacgttgccgagaagatggccaccttttggctgtgattgatgggcttatcgcctcgaacaaggtcatggctgcatcgtcgaggcggtactactaaataataagggtccacacgcaacaacggaagaaggacaactgcaagagccatcagatcaagaaccaaatcccaagcacagaaaaaagctgcgaacctgtcggccacatggcttgcgtggtacaagaggataccacgcgtgtgggactcaaccgatagaagtcggagtgtcgccacgtggtcgcctccatgaagctctccctcgacgatggcttcgttgtgaatgtcacagcggaagaattcaagaaccaagtcctcaacaccggccgcgcggaaattggactgctggagtttctaaagctagcggcgtcaacgaagggagccgggagtatcctgtgtgcgctgcacccgctgcatatgtccggtatattggacgagcaaatcatggtctacaggcaccaactcgtcataggaagcaccgaagaccctgcacatatcgacgcgcaagacatgctcggcattgtaggttatgtgtgagaacggtgaagttaattcattccaatatatgtattcattcgacataacatcgctgcttaacaagacaacatattcatgtgtacacatccacgcgcgcaggtcacctaatcaaagcgtaggctgcacaccgcacgatcgcaccgcgctcactcacccaccacatgcacagatcctcagcaatactgcacggtttaaagcactgatcccgacccaatcttgatcataaacaccggccaaaacgtggctgttgacgaagctagtattgcgtgtcgttcgcaatacgctcgccatattatagtgttctatccccaaaaccagacagggaaatatcacttcaagctgtatgcttgttgctgctcgacatcatggtatgtcgtgagtttcaaattgcactgtgcaagtgaacaaatagaccgtttggacggcgtggttccaagtccagaggtattacagcttgttgatctgacagcgaagtcctttgaaatttgttcccacgtaattgaagttgtggagtctttgaaaggatctaatcgcgttgtcaataccgataatatctacacctcctgcctgctactagaatcactaaggtcgattggcatgtatggtcgtggtacagtgctcacatccagcaaacacttcccccacttcacaatgatccgaaaagctgatggaaagcctagaggctacatgaaacatggcgtgtgcttagagtaacatatcgtagcggccagttggatagatggctctattgtgaatacagtctctaatgttgacgcctcctcttcctctacggtatatcatcgcataaaggaggaacatgttgcgtttaacgtcccggcctgcctcggtgaatacaacgcggggatgcagggagtcaaccgtcatgatcagcttcgcggtcggatttcgcttgccgatggtcactcatttcagaagtggcataaaaaattagcaatggctatgattg

SEQ ID NO: 14 - DNA, 10897 bp, unidentified
  variation 1401..1809: note = n is any nucleotide
  source 1..10897: mol_type = other DNA
  misc_feature 1..10897: note = Fanzor polypeptide
ctagctctcgtagagtttgcgctgaagaaagctcacgcacggtgctctggccacgccgatgcattcgtatcttcgggtaagatcatcacacttttaaagcttgcgctggcgtgtggaaaccctcaaatatttgccggtctatcaaccatactgaacaagatcgatggcaatcttctccacacagtgattaatgcgctctcgaaatacgtcaatgactcgagtttacctgaacagcgtgctacgctggcctcacttgcagcgagacgtcgtgaatggctattcgctgagatcgaagacacgaagcaaccactggacttgacgaagcgcgagatctaggcaatgctagccgacaacacaatcggctccgcgaagtacttttcaatcgtcgctgactttttgaaggtgtcaccgatgagcacgagattcctggggttaaggctctacctagtggacacatcgttcgagttcaagtcggtactcttggggactcgccatttcgcgcctcagtatgggggaccagatggcggaatacgaggaccactttaccggtggattggtgacgtcctggggggggggctttggtttgagtcgccataaccttttcggggctacaacgacggaggcagtgatgtcaaatggatgatgagggacggtctaaagttgtagcgggagtggtgcgtgccgcacttcatgcatgcggcaaccaatactgttttcggcatcgtcggtgacaacagctcgtccaagaacccagccatgaccgacatccttcgacgcatcaccaaaacgatgtacaaaacgcagcacgtcgaaggaaagggcactctattaagcgagttatgcagcgttatgaacccggagggtgtgcatccacgctagctcttaaacttccgcacgcatcgattcctgggactcacgcgcgtcgtccgacgcattcttctactctgggatccattggtgcaatggtacgaggagcgggccacaaaagcccgacgtgagaacgtgatgccgccggagtccttcccactagctcgggaaaagatggaactcattcaggtgctctcactgctggagccgatctcgaaactaaatcagattggacaggccgagtcggggggaccaatgcaacgtgcttcttggactctacaagctccgaatatccttgttggacatcaccacagccttgaaggactgaagacggagaatcggttcttccgaccggatgagctgtacaatctcgcatcgacaacccgttcgctacttcacaaagggtttcgtcgggttttcttccggcggtacaccgatcgtgataccatgaacgtctgctcctttgcctttgagatgcaactatttcttcaccccaacttcaagcatccatatggagcgctgataaaggtgttnnnnnnnnnnnnnnnnnnnnnnnnnnnnnnnnnnnnnnnnnnnnnnnnnnnnnnnnnnnnnnnnnnnnnnnnnnnnnnnnnnnnnnnnnnnnnnnnnnnnnnnnnnnnnnnnnnnnnnnnnnnnnnnnnnnnnnnnnnnnnnnnnnnnnnnnnnnnnnnnnnnnnnnnnnnnnnnnnnnnnnnnnnnnnnnnnnnnnnnnnnnnnnnnnnnnnnnnnnnnnnnnnnnnnnnnnnnnnnnnnnnnnnnnnnnnnnnnnnnnnnnnnnnnnnnnnnnnnnnnnnnnnnnnnnnnnnnnnnnnnnnnnnnnnnnnnnnnnnnnnnnnnnnnnnnnnnnnnnnnnnnnnnnnnnnnnnnnnnnnnnnnnnnnnnnnnnnnnnnnnnnnnnnnnnnnnnnnnnnnnnnnnnnnnggccctcatcatcggcccaaattgaacgcgactttgggatggcaggcaggatggtgacccccaccgcagctcgatggcgccttacaacgtggacatggccacatttctgagctgcagcagaacttacgtgggtatcacccagtacccaaagttgtcgtcgagcacagcaaaggatcaagtaccgtcaaacgccatggtgagcatggagcgagagttggacgacgagttcggatcgttgatgaacaaaggcatcgagttgggactctccgacgacgaaaacgacggtattaccgaaatgtagcgggagcgggctggggcggacgaaaacgtgagagaacgggagcacgtgtggaagtggaaacgggctatagctgccgtggtagagttctagccatgcatgtgcacgaaatgagtgtctttacttttcatcaacacgttctgaccgttgttggtgttagcttcgctatgcagcttatgtaaatagtattttgttttcacctatgctttcgtgctggtcgtttgattactagcaactctgtaacacgcattgcagcgcgtacacggatcgcctcctgtgtttcaagctagattcgctcgatttgggatcgatctcgcagtattcgcgaccgtgggcacacaggcgggttgctggaccgggtggcagctgctgaaacccgcgtagttggtgtcctggctgccgctgcttcttttctgcggtttgctccagcggctcgtgataatgcggtggtggagcctcgcgtgcttgcagttgcttctgtagggcccatcgctgctcctgttgaggaagttggcgtcggcgcgaacgttgggacgatggccgtggacttgtcttgacttgatacagatattcacatcggtgttcttgaggacatcactgtattatgctggtcctgtggtacgaactcggagtgccatcagttcacggggttttgtctcggcagtcttcttggccaccacgatggctgggcgaaaccgttcgcctgggtggttgttagccctctcttgctcctgatcctgacgcatgcgaatcgcgatgtcgtgttgatctagcccgccgttgatcagctctactacgcgaacctctgtacgagcggttgttgcctcttgcactacttcaaatttgcaaatgtcgtggcgctcttacgcagcacgcttgtgctcctcctctaccaggttgtgttgcttgaccctggaagactgcaatgtgactcgcaaaacgcctggtgaggagatcaaaagagatcatctttgaccaataaaacgagatcttgtttgccaataaaaaaagcaatttgcagagcgagccaagttctcgccctagctcggttcgaatgaaaagtaagcgaaccaagcccccccccccctccggttcaggtaaaaaagaaaagaagggtgaaaccgtggttccagttcagttcgtcccaggggtgggaaattcacgaagtgtaggaaagtgtaatagacttgcgaggagagctgctggtctttctactcagtccacaaatggaaagttctgtccgtgcagctctctcaagtctaacctaaagctctacactgccagtcatactgtacaccactcgtacaattgcctctctcacattgatggtcgcacgctcttcaattgttttcgtgaacccagcagccgcagtcaacggcaattcgaagatgtcgttgggtacgccccgaggcttcactgctccagcaagttctcacttttcctttcgcaccgtcaagcgcagtcactggtctccaacctccatcgcctgttagtagcgttgtatcaagccctatgtcggggaagggtgcgccaggaaagcgcaagcgcaagtgacacccatttgatgacgggaagagcgatagaaatggcactgaaggcgcatgcccgaactcggagggcgatgatgacctcgatgaggatgacgtagattatgaggacgcccaaccagtaacgacacgtccaagcaagaggcctgacgtcgcggagcgcatgaagggcaacaagaataccagcctcgtatatgtgaagatgtcactaggttccttcttgacaggcgaggagaaactgttgctgtcattcgatggcattctcgtagacttgagcattggattgttaaatgcctacgcgctgctgaacatccacatgatacggtgtgtgacaaaggacttcccattcctcgatttgagcagaacttcgtttgccaatgcttgacagacgtaatgtttaacgacagcaacgtgcacatagacgctgaactacatatatcgttggagctatacaatttgttgagaggctctaacgcttctcacgggcgtcgcgctggtatcaagaacgggtggcaacaggcgcagctcgggagatgatgaccgctatccagcatgcactcaaaaatgagtttccttcgccggtttaataaggtgctgcgggtatggtgtagacagaagcactggtagcacacattattgccccagagttcgagcggactacacccgacatccctgatcgtcagcgcctcgacaacgtagtcaacgagtggcgtggagaagtccctcagcgtcggagtgagctggtcaacttcacggcccaccgactggtgcttctgacttatcgactcctgcaaatgattgaggagcgtaacgacagagttgagcaaagcgtttgcgctgtttaagtgacaggggcgtctgattttgaagttagactaatccaagctgaagttatgaagacgttcactgttctaccaacaaagcaaggatttggaattagtcacctcacgatagatttgattggttaccgggaactattagtccgcaacgacattgctgttcctccgtacagatcgaagtggaatgaggtgagatacatttattggagacggttcttccgtattgacaaagtggagactatagagtttggtcatctcagattcacacgagagatctcgacggacggcaagtcggtgaacatcaagattcggaagcccgaacgtgggccttccgagcccaatgcaaatgacctccaagctgccgacattggctctagatgggggttggatgcgagtaaatgcaacctcttggtcaccacaaaccaggacgacgaaacggttgtgtgctctggcaaagagtatcgcgaagacgcttacattacgaagagcagccagaagcaattgagatggatacgggatcgtccggacactggagctgcctttgcgagcatgccgacgaagaggagcatgttgctaaagcggtggcgggagtacgtcccatttatgacgcagcacctgcatctgctagtgacccccatgcagcacaaatcgtacagtcgccatcgacttcgaaggagcttctttaaaaagaagaagctatgtgagctctaccagaaacttgtatgtcacggagagcgaatttttatcgtcattgacaaccggagtaacggcgatccaaatggagcgatcaaagggaagccatccgcactcgtgcagaaattggcgctggagttgtcaaagacgtcgaactgtacggtcatcattattgccgagttccggatcagcaaagtgcactttggttaccaacaagaactgtccaagcaatacccgtatcgaaaggccgctgtccacgtacgcgcagtccacgaaagacgagccacgtacccagtttacggcttactccatttcagaaacaaaggttgttctggtatgagtgtgaactgggacgtgaatgcttcgaagaatatgctgcgcctgctcgattgtgaactcaacgagactcgcccagtcacctacacgcatcaagcaaacagatagataacaatacatttctagtgtcgctgtgtgcctatctaggggtgaggaagattacattgtgatagccggctcagaaattagcccttttggactctgtaggctacgtacctataggacacccttaggagaataatgggttaaacaaaggctcaatgaagcctggttgatttctgcatgaaatatttttcaaaacggtgatgtcctcctgtggatgaatatacttgtctttccgacagatagctcagcacgattgttgtctgctcgctttgcagaccattttgaccaattttaacacgtaaagccttaattgtgtccaattaaaatggttaaatgtaggtttgacattctgacaccttccgacaaatatgtgtctgaagtatttccaaaatatcaatatcttcatgcaaacaacaacggtaaaacgtatttttcaaatataccagccattcgtacaatgaggagtggccctaatgtaggaacactgaagaggatgaggtcgttggttggatgtccaccgttggtgtacactttaccagaagagtaacgtagccatggatcgtgcgtgatgcgtgggacataagcaaaataaacaaaggctgtgcttatgtcttcaatatgccacgggaagaccgcaaggtagcctgagtgctgtgcagctggaataaagagatcgcgcctcacgttgtggacgtcgcgacgctggaccatccgacgcgggagcggcttgaacgcttgcaggagctcctgtttagcacatgcacaggacgcaaggaacaccggttcaacgtgagtagaaaagtgcttggcgcttacctggtacggtactactcgcagcttaaagcgctagttcctgcagtgccgatcatcatcctgcttagtatctgcgggcatctcgtcaactgcattgcttgagtggtctgtagctggcggctccacctgctcaagaccaagaacaaactcaagacaaggcgcacacgttgccgagaagatggccaccttttggctgtgattgatgggcttgtcgcctcgaacaaggtcatggctgcatcgtcgaggcggtactactaaataataagggtccacacgcaacaacggaagaaggacaactgcaagagccatcagatcaagaaccaaatcgcaagcacagaaaaaagctgcgaacctgtcggccacatggcttgcgtggtacaagaggataccacgcgtgtgggactcaaccgatagaagtcggagtgtcgccacgtggtcgcctccatgaagctctccctcgacgatggcttcgttgtgaatgtcacagcggaagaattcaagaaccaagtcctcaacaccggccgcgcggaaattggactgctggagtttctaaagctagcggcgtcaacgaagggagccgggagtatcctgcgtgcgctgcacccgctgcatattccggtatattggacgagcaaatcatggtctacaggcaccaactcgtcataggaagcaccgaagaccctgcacatatcgacgcgcaagacatgctcggcattgtaggttatgtgtgagaacggtgaagttaattcattccaatatatgtattcattcgacataacatcgctgcttaacaagacaacatattcatgtgtacacatccacgcgcgcaggtcacctaatcaaagcgtaggctgcacaccgcacgatcgcaccgcgctcactcacccaccacatgcacagatcctcagcaatactgcacggttcaaagcactgatcccgacccaatcttgatcataaacaccggccaaaacgtggctgttgacgaagctagtattgcgtgtcgttcgcaatacgctcgccatattatacttttctatccccaaaaccagacagggaaatatcacttcaagctgtatgcttgttgctgctcgacatcatggtatgtcgtgagtttcaaattgcactgtgcaagtgaacaaatagaccgtttggacggcgtggttccaagtccagaggtattacagcttgttgatctgacagcgaagtcctttgaaatttgttcccacgtaattgaagttgtggagtctttgaaaggatctaatcgcgttgtcaataccgataatatctacacctcctgcctgctactagaatcactaaggtcgattggcatgtatggtcgtggtacagtgcgcacatccagcaaacacttcccccacttcacaatgatccgaaaagctgatggaaagcctagaggctacatgaaacatggcgtgtgcttagagtaacatatcgtagcggccagttggatagattgctctattgtgaatacagtctctaatgttgacgcctcctcttcctctacggtatatcatcgcataaaggaggaacatgttgcgtttaacgtcccggcctgcctcggtgaatacaacgcggggatgcagggagtcaaccgtcatgatcagcttcgcggtcggatttcgcttgccgatggtcactcatttcagaagtggcataaaaaattagcaatggctatgattgatatcacgagatgtaatgcgtatgtatgcgataacttggcacgtgatacaagcgagatggatgttgcacagcctcgcaataatgcaagggcaagcgcccgtgacggtcaccgggcgtttgtcattccacttgtgcgagaattattcaatggagattggaagaagtccattgacagtgatgacgtaattgtgtacacttcgaacacaaaacccatgaccactgctgccaatttgaccagaaatacgaatgagttagaaacgccagcacatacatgtgtagcaaacgaatcgtggcttgtgttacaaggaaggagtcgggcaatgcacaaacggactgtttgtaaattcgagggcagggatgccacccagaaaacggattactgcgagacacatcgagttgcactctacaagcgtacctatcctatcgaccacagaaacccgcacctgtgtcagcagcaaaattggacgtgctggcaaaagtatcatttgttctacttgccaaaacaggtctatacagttgacggaaacctgagaaggtcgtctccaatttgtaaagcccagtgttcgttcttgaaggagcgtcgagaccaagataatactgaagagatcagcaaccacgactatcattcggctcatatatagtactgaaggtaaaagtagacactcaatacattgtgtgcacttgaactacgactgaaaaccagccagttacttgtactcacagcatcctccctccttgtacattgaccagtgcaatgtgcgccgctttgttgcctttcgtctaattatagagcacatgcatggtgctgcatgttaccctcagcaccaatgtctcgatgctccctctctaggcggctccagcacctcgatgtcacgtagaattctgtcgccgggcccgtgatgtcgagatcgccttgcggtgaacccgaggcgttccacgggctgtcgctgtcgctagttcgcccctgcaacgggcgccgtctgaaattctgcgtccttgctgcctttcgccttgtagggctgcgccatcatctcgttctgtcggtgtctagcgtgtggctgctgcatcgggcgccgttgtgccgcacatgtgcatgatgtagcacaataatgtcgggataggcgccaagcgttacgttcttgttggtgtcggcgcgagtaacttgagagacacaatagcatgagcgcgccgtgtctgatcaggatttagatcccacgctgtgattggcagtcaacgctgacattttcctagagaggcgcaaaaattgttgatcaaaagtcggtgccgtatcttaacttcactataggctagattagtctgctaccttcttttggaaaaatatcttcatgtatcattctggtatcgatagggttaaaccactagtggtacgcgaaggctggaataggatacagataatccgatctacactagtgacaataaagaaacgtaagtacgactctgttgcaagcccacagcattcatctagagaacgggtgtagctctaacgtcatcgaagttcttggcgtcgaagtaagctttgttgccttcgaactccgtgacacggcacgcttgcagagccactgttttgtattggtgcctcgtggttacagcgtcaacaaatccccccccccggagtgtgcagcacacctcgcttttggtgctatcaatcatcaaacaactgatctaatcgttctctggtctgtcgaccatcatcgacattgagtacctcatcgtcaaatgcaaaacccttcgggtcggcaacacagcagtagtaatagaccaacgcgacacgagggtgtcttgtaccagtgttgagcctttcccataaatcgaacctcctcatccgtaaaactaacacaggacagagcgtgaccttcaagctctccaagtctatcctgaataccccgttgtttttgcgcgcggcgggcgcgggccttgccgttcgttctcgaggtgctgctcccgttccagcaaactttcattggctctttgggtacggcgcttcttgctgcggtcttcagtgtcggccattgccttcccacgttgttattggtcgtcagccctctacaaaacaaactgttggataaagcctaaatcatacggcgccatgctcccccgactgcaccaatttgaatgcgctcccatcagtatagtcactacaaattatccatacaatcatgctctgtagtagcaaaatccccatctatgctgcccgagcgtcaagtacccaaatcgattcaccggtaaaactatcccgtcgcattaagatttttgaggcattttgctcgatggttcgcgaaagggttaacgcgccgaaggcgcatttcttgcagcctgtcggcgtcacacaaactgcgtgtcgtggtcggtccaacggcactggtgaattccagttcaacgtgcttcgtgtcggcccactgcttcgtgcagctcggacagtgcgtgtgttgctgatgtccttgcagcatatgtgactcgcaatccgttcctcatcaacaagctcatcaacatggcttgtgcaccttgcagggcagagccgccgtctttctccgagctcaatccagaacattcaggccagtgccaagagagtcatcaacagggcggaaggagacgcagccagttcgcgcaactccagacgacgcagaagaaccccacgccacagcagcgttccaggtctcctgctatgagccgcatttgcctgccggcgccaacgttcgggctcagttgcgagcgctgaacgtacgactccttcgcgccat

SEQ ID NO: 15 - DNA, 6329 bp, unidentified
  misc_feature 1..6329: note = Fanzor polypeptide
  source 1..6329: mol_type = other DNA
gccctcatcatcggcccaaattgaacgcgactttgggatggcaggcaggatggtgacccccaccgcagctcgatggcgccttacaacgtggacatggccacatttctgagctgcagcagaacttacgtgggtatcacccagtacccaaagttgtcgtcgagcacagcaaaggatcaagtaccgtcaaacgccatggtgagcatggagcgagagttggacgacgagttcggatcgttgatgaacaaaggcatcgagttgggactctccgacgacgaaaacgacggtattaccgaaatgtagcgggagcgggctggggcggacgaaaacgtgagagaacgggagcacgtgtggaagtggaaacgggctatagctgccgtggtagagttctagccatgcatgtgcacgaaatgagtgtctttacttttcatcaacacgttctgaccgttgttggtgttagcttcgctatgcagcttatgtaaatagtattttgttttcacctatgctttcgtgctggtcgtttgattactagcaactctgtaacacgcattgcagcgcgtacacggatcgcctcctgtgtttcaagctagattcgctcgatttgggatcgatctcgcagtattcgcgaccgtgggcacacaggcgggttgctggaccgggtggcagctgctgaaacccgcgtagttggtgtcctggctgccgctgcttcttttctgcggtttgctccagcggctcgtgataatgcggtggtggagcctcgcgtgcttgcagttgcttctgtagggcccatcgctgctcctgttgaggaagttggcgtcggcgcgaacgttgggacgatggccgtggacttgtcttgacttgatacagatattcacatcggtgttcttgaggacatcactgtattatgctggtcctgtggtacgaactcggagtgccatcagttcacggggttttgtctcggcagtcttcttggccaccacgatggctgggcgaaaccgttcgcctgggtggttgttagccctctcttgctcctgatcctgacgcatgcgaatcgcgatgtcgtgttgatctagcccgccgttgatcagctctactacgcgaacctctgtacgagcggttgttgcctcttgcactacttcaaatttgcaaatgtcgtggcgctcttacgcagcacgcttgtgctcctcctctaccaggttgtgttgcttgaccctggaagactgcaatgtgacttgcaaaacgcctggtgaggagatcaaaagagatcatctttgaccaataaaacgagatcttgtttgccaataaaaaaagcaatctgcagagcgagccaagttctcgccctagctcggttcgaatgaaaagtaagcgaaccaagcccccccccccctccggttcaggtaaaaaagaaaagaagggtgaaaccgtggttccagttcagttcgtcccaggggtgggaaattcacgaagtgtaggaaagtgtaatagacttgcgaggagagctgctggtctttctactcagtccacaaatggaaagttctgtccgtgcagctctctcaagtctaacctaaagctctacactgccagtcatactgtacaccactcgtacaattgcctctctcacattgatggtcgcacgctcttcaattgttttcgtgaacccagcagccgcagtcaacggcaattcgaagatgtcgttgggtacgccccgaggcttcactgctccagcaagttctcacttttcctttcgcaccgtcaagcgcagtcactggtctccaacctccatcgcctgttagtagcgttgtatcaagccctatgtcggggaagggtgcgccaggaaagcgcaagcgcaagtgacacccatttgatgacgggaagagcgatagaaatggcactgaaggcgcatgcccgaactcggagggcgatgatgacctcgatgaggatgacgtagattatgaggacgcccaaccagtaacgacacgtccaagcaagaggcctgacgtcgcggagcgcatgaagggcaacaagaataccagcctcgtatatgtgaagatgtcactaggttccttcttgacaggcgaggagaaactgttgctgtcattcgatggcattctcgtagacttgagcattggattgttaaatgcctacgcgctgctgaacatccacatgatacggtgtgtgacaaaggacttcccattcctcgatttgagcagaacttcgtttgccaatgcttgacagacgtaatgtttaacgacagcaacgtgcacatagacgctgaactacatatatcgttggagctatacaatttgttgagaggctctaacgcttctcacgggcgtcgcgctggtatcaagaacgggtggcaacaggcgcagctcgggagatgatgaccgctatccagcatgcactcaaaaatgagtttccttcgccggtttaataaggtgctgcgggtatggtgtagacagaagcactggtagcacacattattgccccagagtttgagcggactccacccgacattcctgatcgtcagcgcctcgacaacgtagtcaacgagtggcgtggagaagtccctcagcgtcggagtgagctggtcaacttcacggcccaccgactggtgcttctgacttatcgactcctgcaaatgattgaggagcgtaacgacagagttgagcaaagcgtttgcgctgtttaagtgacaggggcgtctgattttgaagttagactaatccaagctgaagttatgaagacgttcactgttctaccaacaaagcaaggatttggaattagtcacctcacgatagatttgattggtttccgggaactattagtccgcaacgacattgctgttcctccgtacagatcgaagtggaatgaggtgagatacatttattggagacggttcttccgtattgacaaagtggagactatagagtttggtcatctcagattcacacgagagatctcgacggacggcaagtcggtgaacatcaagattcggaagcccgaacgtgggccttccgagcccaatgcaaatgacctccaagctgccgacattggctctagatgggggttggatgcgagtaaatgcaacctcttggtcaccacaaaccaggacgacgaaacggttgtgtgctctggcaaagagtatcgcgaagacgcttacattacgaagagcagccagaagcaattgagatggatacgggatcgtccggacactggagctgcctttgcgagcatgccgacgaagaggagcatgttgctaaagcggtggcgggagtacgtcccatttatgacgcagcacctgcatctgctagtgacccccatgcagcacaaatcgtacagtcgccatcgacttcgaaggagcttctttaaaaagaagaacctatgtgagctctaccagaaacttgtatgtcacggagagcgaatttttatcgtcattgacaaccggagtaacggcgatccaaatggagcgatcaaagggaagccatccgcactcgtgcagaaattggcgctggagttgtcaaagacgtcgaactgtacggtcatcattattgccgagttccggatcagcaaagtgcactttggttaccaacaagaactgtccaagcaatacccgtatcgaaaggccgctgtccacgtacgcgcagtccacgaaagacgagccacgtacccagtttacggcttactccatttcagaaacaaaggttgttctggtatgagtgtgaactgggacgtgaatgcttcgaagaatatgctgcgcctgctcgattgtgaactcaacgagactcgcccagtcacctacacgcatcaagcaaacagatagataacaatacatttctagtgtcgctgtgtgcctatctaggggtgaggaagattacattgtgatagccggctcagaaattagcccttttggactctgtaggctacgtatctataggacacccttaggagaataatgggttaaacaaaggctcaatgaagcctggttgatttctgcatgaaatatttttcaaaacggtgatgtcctcctgtggatgaatatacttgtctttccgacagatagctcagcacgattgttgtctgctcgctttgcagaccattttgaccaattttaacacgtaaagccttaattgtgtccaattaaaatggttaaatgtaggtttgacattctgacaccttccgacaaatatgtgtctgaagtatttccaaaatatcaatatcttcatgcaaacaacaactgtaaaacgtatttttcaaatataccagccattcgtacaatgaggagtggccctaatgtaggaacactgaagaagatgaggtcgttggttggatgtccaccgttggtgtacactttaccagaagagtaacgtagccatagatcgtgcgtgatgcgtgggacataagcaaaataaacaaaggctgtgcttatgtcttcaatatgccacgggaagaccgcaaggtagcctgagtgctgtgcagctggaataaagagatcgcgcctcacgttgtggacgtcgcgacgctggaccatccgacgcgggagcggcttgaacgcttgcaggagctcctgtttagcacatgcacaggacgcaaggaacaccggttcaacgtgagtagaaaagtgcttggcgcttacctggtacggtactactcgcagcttaaagcgctagttcctgcagtgccgatcatcatcctgcttagtatctgcgggcatctcgtcaactgcattgcttgagtggtctgtagctggcggctccacctgctcaagaccaagaacaaactcaagacaaggcgcacacgttgccgagaagatggccaccttttggctgtgattgatgggcttgtcgcctcgaacaaggtcatggctgcatcgtcgaggcggtactactaaataataagggtccacacgcaacaacggaagaaggacaactgcaagagccatcagatcaagaaccaaatcccaagcacagaaaaaagctgcgaacctgtcggccacatggcttgcgtggtacaagaggataccacgcgtgtgggactcaaccgatagaagtcggagtgtcgccacgtggtcgcctccatgaagctctccctcgacgatagcttcgttgtgaatgtcacagcggaagaattcaagaaccaagtcctcaacaccggccgcgcggaaattggactgctggagtttctaaagctagcggcgtcaacgaagggagccgggagtatcctgtgtgcgctgcacccgctgcatatgtccggtatattggacgagcaaatcatggtctacaggcaccaactcgtcataggaagcaccgaagaccctgcacatatcgacgcgcaagacatgctcggcattgtaggttatgtgtgagaacggtgaagttaattcattccaatatatgtattcattcgacataacatcgctgcttaacaagacaacatattcatgtgtacacatccacgcgcgcaggtcacctaatcaaagcgtaggctgcacaccgcacgatcgcaccgcgctcactcacccaccacatgcacagatcctcagcaatactgcacggtttaaagcactgatcccgacccaatcttgatcataaacaccggccaaaacgtggctgttgacgaagctagtattgcgtgtcgttcgcaatacgctcgccatattatacttttctatccccaaaaccagacagggaaatatcacttcaagctgtatgcttgttgctgctcgacatcatggtatgtcgtgagtttcaaattgcactgtgcaagtgaacaaatagaccgtttggacggcgtggttccaagtccagaggtattacagcttgttgatctgacagcgaagtcctttgaaatttgttcccacgtaattgaagttgtggagtctttgaaaggatctaatcgcgttgtcaataccgataatatctacacctcctgcctgctactagaatcactaaggtcgattggcatgtatggtcgtggtacagtgctcacatccagcaaacacttcccccacttcacaatgatccgaaaagctgatggaaagcctagaggctacatgaaacatggcgtgtgcttagagtaacatatcgtagcggccagttggatagatggctctattgtgaatacagtctctaatgttgacgcctcctcttcctctacggtatatcgtcgcataaaggaggaacatgttgcgtttaacgtcccgacctgcctcggtgaatacaacgcggggatgcagggagtcaaccgtcatgatcagcttcgcggtcggatttcgcttgccgatggtcactcatttcagaagtggcataaaaaattagcaatggctatgattg

SEQ ID NO: 16 - DNA, 7271 bp, unidentified
  source 1..7271: mol_type = other DNA
  misc_feature 1..7271: note = Fanzor polypeptide
aggtagctgaccgacactacacgaagattcgacgcattatcattgacagcgtccgcagcatcatgacagcggctgacgccgagccgacgtcgactgatatcgttgccccaccgccagctactgggttatcagaggacttcgtggagctcttcacggagacagcgaacgaggtggcaccaccacatagactgcggtgcacgagcaacgcatcgacgatgagctcgaccgctggctgacaacgcctacttcgcttcaagcgattcaacccaatgcgttttactcagttctgagcttctggaagcgccagcaagagctggacatcttcctgcttcttcccttggttgcgcgcgtgctgttctcaatgccctcatcatcggcccaaattgaacgcgactttgggatggcaggcaggatggtgacccccaccgcagctcgatggcgccttacaacgtggacatggccacatttctgagctgcagcagaacttacgtgggtatcacccagtacccaaagttgtcgtcgagcacagcaaaggatcaagtaccgtcaaacgccatggtgagcatggagcgagagttggacgacgagttcggatcgttgatgaacaaaggcatcgagttgggactctccgacgacgaaaacgacggtattaccgaaatgtagcgggagcgggctggggcggacgaaaacgtgagagaacgggagcacgtgtggaagtggaaacgggctatagctgccgtggtagagttctagccatgcatgtgcacgaaatgagtgtctttacttttcatcaacacgttctgaccgttgttggtgttagcttcgctatgcagcttatgtaaatagtattttgttttcacctatgctttcgtgctggtcgtttgattactagcaactctgtaacacgcattgcagcgcgtacacggatcgcctcctgtgtttcaagctagattcgctcgatttgggatcgatctcgcagtattcgcgaccgtgggcacacaggcgggttgctggaccgggtggcagctgctgaaacccgcgtagttggtgtcctggctgccgctgcttcttttctgcggtttgctccagcggctcgtgataatgcggtggtggagcctcgcgtgcttgcagttgcttctgtagggcccatcgctgctcctgttgaggaagttggcgtcggcgcgaacgttgggacgatggccgtggacttgtcttgacttgatacagatattcacatcggtgttcttgaggacatcactgtattatgctggtcctgtggtacgaactcggagtgccatcagttcacggggttttgtctcggcagtcttcttggccaccacgatggctgggcgaaaccgttcgcctgggtggttgttagccctctcttgctcctgatcctgacgcatgcgaatcgcgatgtcgtgttgatctagcccgccgttgatcagctctactacgcgaacctctgtacgagcggttgttgcctcttgcactacttcaaatttgcaaatgtcgtggcgctcttacgcagcacgcttgtgctcctcctctaccaggttgtgttgcttgaccctggaagactgcaatgtgacttgcaaaacgcctggtgaggagatcaaaagagatcatctttgaccaataaaacgagatcttgtttgccaataaaaaaagcaatttgcagagcgaaccaagttctcgccctagctcggttcgaatgaaaagtaagcgaaccaagcccccccccccccggttcaggtaaaaaagaaaagaagggtgaaaccgtggttccagttcagttcgtcctaggggtgggaaattcacgaagtgtaggaaagtgtaatagacttgcgaggagagctgctggtctttctactcagtccacaaatggaaagttctgtccgtgcagctctctcaagtctaacctaaagctctacactgccagtcatactgtacaccactcgtacaattgcctctctcacattgatggtcgcacgctcttcaattgttttcgtgaacccagcagccgcagtcaacggcaattcgaagatgtcgttgggtacgccccgaggcttcactgctccagcaagttctcacttttcctttcgcaccgtcaagcgcagtcactggtctccaacctccatcgcctgttagcagcgttgtatcaagccctatgtcggggaagggtgcgccaggaaagcgcaagcgcaagtgacacccatttgatgacgggaagagcgatagaaatggcactgaaggcgcatgcccgaactcggagggcgatgatgacctcgatgaggatgacgtagattatgaggacgcccaaccagtaacgacacgtccaagcaagaggcctgacgtcgcggagcgcatgaagggcaacaagaataccagcctcgtatatgtgaagatgtcactaggttccttcttgacaggcgaggagaaactgttgctgtcattcgatggcattctcgtagacttgagcattggattgttaaatgcctacgcgctgctgaacatccacatgatacggtgtgtgacaaaggacttcccattcctcgatttgagcagaacttcgtttgccaatgcttgacagacgtaatgtttaacgacagcaacgtgcacatagacgctgaactacatatatcgttggagctatacaatttgttgagaggctctaacgcttctcacgggcgtcgcgctggtatcaagaacgggtggcaacaggcgcagctcgggagatgatgaccgctatccagcatgcactcaaaaatgagtttccttcgccggtttaataaggtgctgcgggtatggtgtagacagaagcactggtagcacacattattgccccagagttcgagcggactacacccgacatccctgatcgtcagcgcctcgacaacgtagtcaacgagtggcgtggagaagtccctcagcgtcggagtgagctggtcaacttcacggcccaccgactggtgcttctgacttatcgactcctgcaaatgattgaggagcgtaacgacagagttgagcaaagcgtttgcgctgtttaagtgacaggggcgtctgatttgaagttagactaatccaagctgaagttatgaagacgttcactgttctaccaacaaagcaaggatttggaattagtcacctcacgatagatttgattggtttccgggaactattagtccgcaacgacattgctgttcctccgtacagatcgaagtggaatgaggtgagatacatttattggagacggttcttccgtattgacaaagtggagactatagagtttggtcatctcagattcacacgagagatctcgacggacggcaagtcggtgaacatcaagattcggaagcccgaacgtgggccttccgagcccaatgcaaatgacctccaagctgccgacattggctctagatgggggttggatgcgagtaaatgcaacctcttggtcaccacaaaccaggacgacgaaacggttgtgtgctctggcaaagagtatcgcgaagacgcttacattacgaagagcagccagaagcaattgagatggatacgggatcgtccggacactggagctgcctttgcgagcatgccgacgaagaggagcatgttgctaaagcggtggcgggagtacgtcccatttatgacgcagcacctgcatctgctagtgacctccatgcagcacaaatcgtacagtcgccatcgacttcgaaggagcttctttaaaaagaagaacctatgtgagctctaccagaaacttgtatgtcacggagagcgaatttttatcgtcattgacaaccggagtaacggcgatccaaatggagcgatcaaagggaagccatcggcactcgtgcagaaattggcgctggagttgtcaaagacgtcgaactgtacggtcatcattattgccgagttccggatcagcaaagtgcactttggttaccaacaagaactgtccaagcaatacccgtatcgaaaggccgctgtccacgtacgcgcagtccacgaaagacgagccacgtacccagtttacggcttactccatttcagaaacaaaggttgttctggtatgagtgtgaacagggacgtgaatgcttcgaagaatatgctgcgcctgctcgattgtgaactcaacgagactcgcccagtcacctacacgcatcaagcaaacagatagataacaatacatttctagtgtcgctgtgtgcctatctaggggtgaggaagattacattgtgatagccggctcagaaattagcccttttggactctgtaggctacgtatctataggacacccttaggagaataatgggttaaacaaaggctcaatgaagcctggttgatttctgcatgaaatatttttcaaaacggtgatgtcctcctgtggatgaatatacttgtctttccgacagatagctcagcacgattgttgtctgctcgctttgcagaccattttgaccaattttaacacgtaaagccttaattgtgtccaattaaaatggttaaatgtaggtttgacattctgacaccttccgacaaatatgtgtctgaagtatttccaaaatatcaatatcttcatgcaaacaacaactgtaaaacgtatttttcaaatataccagccattcgtacaatgaggagtggccctaatgtaggaacactgaagaagatgaggtcgttggttggatgtccaccgttggtgtacactttaccagaagagtaacgtagccatggatcgtgcgtgatgcgtgggacataagcaaaataaacaaaggctgtgcttatgtcttcaatatgccacgggaagaccgcaaggtagcctgagtgctgtgcagctggaataaagagatcgcgcctcacgttgtggacgtcgcgacgctggaccatccgacgcgggagcggcttgaacgcttgcaggagctcctgtttagcacatgcacaggacgcaaggaacaccggttcaacgtgagtagaaaagtgcttggcgcttacctggtacggtactactcgcagcttaaagcgctagttcctgcagtgccgatcatcatcctgcttagtatctgcgggcatctcgtcaactgcattgcttgagtggtctgtagctggcggctccacctgctcaaaaccaagaacaaactcaagacaaggcgcacacgttgccgagaagatggccaccttttggctgtgattgatgggcttgtcgcctcgaacaaggtcatggctgcatcgtcgaggcggtactactaaataataagggtccacacgcaacaacggaagaaggacaactgcaagagccatcagatcaagaaccaaatcgcaagcacagaaaaaagctgcgaacctgtcggccacatggcttgcgtggtacaagaggataccacgcgtgtgggactcaaccgatagaagtcggagtgtcgccacgtggtcgcctccatgaagctctccctcgacgatagcttcgttgtgaatgtcacagcggaagaattcaagaaccaagtcctcaacaccggccgcgcggaaattggactgctggagtttctaaagctagcggcgtcaacgaagggagccgggagtatcctgtgtgcgctgcacccgctgcatatgtccggtatattggacgagcaaatcatggtctacaggcaccaactcgtcataggaagcaccgaagaccctgcacatatcgacgcgcaagacatgctcggcattgtaggttatgtgtgagaacggtgaagttaattcattccaatatatgtattcattcgacataacatcgctgcttaacaagacaacatattcatgtgtacacatccacgcgcgcaggtcacctaatcaaagcgtaggctgcacaccgcacgatcgcaccgcgctcactcacccaccacatgcacagatcctcagcaatactgcacggttcaaagcactgatcccgacccaatcttgatcataaacaccggccaaaacgtggctgttgacgaagctagtattgcgtgtcgttcgcaatacgctcgccatattatagtgttctatccccaaaaccagacagggaaatatcacttcaagctgtatgcttgttgctgctcgacatcatggtatgtcgtgagtttcaaattgcactgtgcaagtgaacaaatagaccgtttggacggcgtggttccaagtccagaggtattacagcttgttgatctgacagcgaagtcctttgaaatttgttcccacgtaattgaagttgtggagtctttgaaaggatctaatcgcgttgtcaataccgataatatctacacctcctgcctgctactagaatcactaaggtcgattggcatgtatggtcgtggtacagtgctcacatccagcaaacacttcccccacttcacaatgatccgaaaagctgatggaaagcctagaggctacatgaaacaaggcgtgtgcttagagtaacatatcgtagcggccagttggatagatggctctattgtgaatacagtctctaatgttgacgcctcctcttcctctacggtatatcgtcgcataaaggaggaacatgttgcgtttaacgtcccgacctgcctcggtgaatacaacgcggggatgcagggagtcaaccgtcatgatcagcttcgcggtcggatttcgcttgccgatggtcactcatttcagaagtggcataaaaaattagcaatggctatgattgatatcacgagatgtaatgcgtatgtatgcgataacttggcacgtgatacaagcgagatggatgttgcacagcctcgcaataatgcaagggcaagcgcccgtgacggtcaccgggcgtttgtcattccacttgtgcgagaattattcaatggagattggaagaagtgcattgacagtgatgacgtaattgtgtacacttcgaacacaaaacccatgacaacagctgccaatttgaccagaaatacgaatgagttagaaacgccagcacatacatgtgtagcaaaagagtcgtggcttgtgttacaaggaaggagtcgggcaatgcacaaatggactgtatgtaaattcgagggcagggatgacacccagaaaacggattattgcgagacgcatcgagttgcactctgcaagcgtacctatcctactgaccacagaaaaccgcacttgtgtcagcagcaaaactggacgtgctggcaaaaatatcgtttgttctacttgccaaaacaggtctatacagttgacggaaatctgagaaggtcgtctccaatttgtaaagcccagtgttcgttcttgaaggagcgtc

SEQ ID NO: 17 - DNA, 7102 bp, unidentified
  source 1..7102: mol_type = other DNA
  misc_feature 1..7102: note = Fanzor polypeptide
gccctcatcatcggcccaaattgaacgcgactttgggatggcaggcaggatggtgacccccaccgcagctcgatggcgccttacaacgtggacatggccacatttctgagctgcagcagaacttacgtgggtatcacccagtacccaaagttgtcgtcgagcacagcaaaggatcaagtaccgtcaaacgccatggtgagcatggagcgagagttggacgacgagttcggatcgttgatgaacaaaggcatcgagttgggactctccgacgacgaaaacgacggtattaccgaaatgtagcgggagcgggctggggcggacgaaaacgtgagagaacgggagcacgtgtggaagtggaaacgggctatagctgccgtggtagagtgctagccatgcatgtgcatgaaatgagtgtctttgcttttcatcaacacgttctgatgttagcttcgctatgcagcatatgtaaatagtattttgctttcacctatgctttcgtgctggtcgtttgattactagcaactctgtaacacgcattgcagcgcgtacacggatcgcctcctgtgtttcaagctagattcgctcgatttgggatcgatctcgcagtattcgcgaccgtgggcacacaggcgggttgctggaccgggtggcagctgctgaaacccgcgtagttggtgtcctggctgccgctgcttcttttctgcggtttgctccagcggctcgtgataatgcggtggtggagcctcgcgtgcttgcagttgcttctgtagggcccatcgctgctcctgttgaggaagttggcgtcggcgcgaacgttgggacgatggccgtggacttgtcttgacttgatacagatattcacatcggtgttcttgaggacatcactgtattatgctggtcctgtggtacgaactcggagtgccatcagttcacggggttttgtctcggcagtcttcttggccaccacgatggctgggcgaaaccgttcgcctgggtggttgttagccctctcttgctcctgatcctgacgcatgcgaatcgcgatgtcgtgttgatctagcccgccgttgatcagctctactacgcgaacctctgtacgagcggttgttgcctcttgcactacttcaaatttgcaaatgtcgtggcgctcttacgcagcacgcttgtgctcctcctctaccaggttgtgttgcttgaccctggaagactgcaatgtgactcgcaaaacgcctggtgaggagatcaaaagagatcatctttgaccaataaaacgagatcttgtttgccaataaaaaaagcaatttgcagagcgagccaagttctcgccctagctcggttcgaatgaaaagtaagcgaaccaagcccccccccccctccggttcaggtaaaaaagaaaagaagggtgaaaccgtggttccagttcagttcgtcctaggggtgggaaattcacgaagtgtaggaaagtgtaatagacttgcgaggagagctgctggtctttctactcagtccacaaatggaaagttctgtccgtgcagctctctcaagtctaacctaaagctctacactgccagtcatactgtacaccactcgtacaattgcctctctcacattgatggtcgcacgctcttcaattgttttcgtgaacccagcagccgcagtcaacggcaattcgaagatgtcgttgggtacgccccgaggcttcactgctccagcaagttctcacttttcctttcgcaccgtcaagcgcagtcactggtctccaacctccatcgcctgttagcagcgttgtatcaagccctatgtcggggaagggtgcgccaggaaagcgcaagcgcaagtgacacccatttgatgacgggaagagcgatagaaatggcactgaaggcgcatgcccgaactcggagggcgatgatgacctcgatgaggatgacgtagattatgaggacgcccaaccagtaacgacacgtccaagcaagaggcctgacgtcgcggagcgcatgaagggcaacaagaataccagcctcgtatatgtgaagatgtcactaggttccttcttgacaggcgaggagaaactgttgctgtcattcgatggcattctcgtagacttgagcattggattgttaaatgcctacgcgctgctgaacatccacatgatacggtgtgtgacaaaggacttcccattcctcgatttgagcagaacttcgtttgccaatgcttgacagacgtaatgtttaacgacagcaacgtgcacatagacgctgaactacatatatcgttggagctatacaatttgttgagaggctctaacgcttctcacgggcgtcgcgctggtatcaagaacgggtggcaacaggcgcagctcgggagatgatgaccgctatccagcatgcactcaaaaatgagtttccttcgccggtttaataaggtgctgcgggtatggtgtagacagaagcactggtagcacacattattgccccagagttcgagcggactacacccgacatccctgatcgtcagcgcctcgacaacgtagtcaacgagtggcgtggagaagtccctcagcgtcggagtgagctggtcaacttcacggcccaccgactggtgcttctgacttatcgactcctgcaaatgattgaggagcgtaacgacagagttgagcaaagcgtttgcgctgtttaagtgacaggggcgtctgatttgaagttagactaatccaagctgaagttatgaagacgttcactgttctaccaacaaagcaaggatttggaattagtcacctcacgatagatttgattggttaccgggaactattagtccgcaacgacattgctgttcctccgtacagatcgaagtggaatgaggtgagatacatttattggagacggttcttccgtattgacaaagtggagactatagagtttggtcatctcagattcacacgagagatctcgacggacggcaagtcggtgaacatcaagattcggaagcccgaacgtgggccttccgagcccaatgcaaatgacctccaagctgccgacattggctctagatgggggttggatgcgagtaaatgcaacctcttggtcaccacaaaccaggacgacgaaacggttgtgtgctctggcaaagagtatcgcgaagacgcttacattacgaagagcagccagaagcaattgagatggatacgggatcgtccggacactggagctgcctttgcgagcatgccgacgaagaggagcatgttgctaaagcggtggcgggagtacgtcccatttatgacgcagcacctgcatctgctagtgacccccatgcagcacaaatcgtacagtcgccatcgacttcgaaggagcttctttaaaaagaagaagctatgtgagctctaccagaaacttgtatgtcacggagagcgaatttttatcgtcattgacaaccggagtaacggcgatccaaatggagcgatcaaagggaagccatcggcactcgtgcagaaattggcgctggagttgtcaaagacgtcgaactgtacggtcatcattattgccgagttccggatcagcaaagtgcactttggttaccaacaagaactgtccaagcaatacccgtatcgaaaggccgctgtccacgtacgcgcagtccacgaaagacgagccacgtacccagtttacggcttactccatttcagaaacaaaggttgttctggtatgagtgtgaacagggacgtgaatgcttcgaagaatatgctgcgcctgctcgattgtgaactcaacgagactcgcccagtcacctacacgcatcaagcaaacagatagataacaatacctttctagtgtcgctgtgtgcctatctaggggtgaggaagattacattgtgatagccggctcagaaattagcccttttggactctgtaggctacgtacctataggacacccttaggagaataatgggttaaacaaaggctcaatgaagcctggttgatttctgcatgaaatatttttcaaaacggtgatgtcctcctgtggatgaatatacttgtctttccgacagatagctcagcacgattgttgtctgctcgctttgcagaccattttgaccaattttaacacgtaaagccttaattgtgtccaattaaaatggttaaatgtaggtttgacattctgacaccttccgacaaatatgtgtctgaagtatttccaaaatatcaatatcttcatgcaaacaacaactgtaaaacgtatttttcaaatataccagccattcgtacaatgaggagtggccctaatgtaggaacactgaagaggatgaggtcgttggttggatgtccaccgttggtgtacactttaccagaagagtaacgtagccatggatcgtgcgtgatgcgtgggacataagcaaaataaacaaaggctgtgcttatgtcttcaatatgccacgggaagaccgcaaggtagcctgagtgctgtgcagctggaataaagagatcgcgcctcacgttgtggacgtcgcgacgctggaccatccgacgcgggagcggcttgaacgcttgcaggagctcctgtttagcacatgcacaggacgcaaggaacaccggttcaacgtgagtagaaaagtgcttggcgcttacctggtacggtactactcgcagcttaaagcgctagttcctgcagtgccgatcatcatcctgcttagtatctgcgggcatctcgtcaactgcattgcttgagtggtctgtagctggcggctccacctgctcaaaaccaagaacaaactcaagacaaggcgcacacgttgccgagaagatggccaccttttggctgtgattgatgggcttgtcgcctcgaacaaggtcatggctgcatcgtcgaggcggtactactaaataataagggtccacacgcaacaacggaagaaggacaactgcaagagccatcagatcaagaaccaaatcgcaagcacagaaaaaagctgcgaacctgtcggccacatggcttgcgtggtacaagaggataccacgcgtgtgggactcaaccgatagaagtcggagtgtcgccacgtggtcgcctccatgaagctctccctcgacgatggcttcgttgtgaatgtcacagcggaagaattcaagaaccaagtcctcaacaccggccgcgcggaaattggactgctggagtttctaaagctagcggcgtcaacgaagggagccgggagtatcctgtgtgcgctgcacccgctgcatatgtccggtatattggacgagcaaatcatggtctacaggcaccaactcgtcataggaagcaccgaagaccctgcacatatcgacgcgcaagacatgctcggcattgtaggtcatgtgtgagaacggtgaagttaattcattccaatatatgtattcattcgacataacatcgctgcttaacaagacaacatattcatgtgtacacatccacgcgcgcaggtcacctaatcaaagcgtaggctgcacaccgcacgatcgcaccgcgctcactcacccaccacatgcacagatcctcagcaatactgcacggttcaaagcactgatcccgacccaatcttgatcataaacaccggccaaaacgtggctgttgacgaagctagtattgcgtgtcgttcgcaatacgctcgccatattatacttttctatccccaaaaccagacagggaaatatcacttcaagctgtatgcttgttgctgctcgacatcatggtatgtcgtgagtttcaaattgcactgtgcaagtgaacaaatagaccgtttggacggcgtggttccaagtccagaggtattacagcttgttgatctgacagcgaagtcctttgaaatttgttcccacgtaattgaagttgtggagtctttgaaaggatctaatcgcgttgtcaataccgataatatctacacctcctgcctgctactagaatcactaaggtcgattggcatgtatggtcgtggtacagtgctcacatccagcaaacacttcccccacttcacaatgatccgaaaagctgatggaaagcctagaggctacatgaaacatggcgtgtgcttagagtaacatatcgtagcggccagttggatagatggctctattgtgaatacagtctctaatgttgacgcctcctcttcctctacggtatatcatcgcataaaggaggaacatgttgcgtttaacgtcccggcctgcctcggtgaatacaacgcggggatgcagggagtcaaccgtcatgatcagcttcgcggtcggatttcgcttgccgatggtcactcatttcagaagtggcataaaaaattagcaatggctatgattgatatcacgagatgtaatgcgtatgtatgcgataacttggcacgtgatacaagcgagatggatgttgcacagcctcgcaataatgcaagggcaagcgcccgtgacggtcaccgggcgtttgtcattccacttgtgcgagaattattcaatggagattggaagaagtccattgacagtgatgacgtaattgtgtacacttcgaacacaaaacccatgacaacagctgccaatttgaccagaaatacgaatgagttagaaacgccagcacatacatgtgtagcaaacgaatcgtggcttgtgttacaaggaaggagtcgggcaatgcacaaacggactgtttgtaaattcgagggcagggatgacacccagaaaacggattattgcgagacgcatcgagttgcactctgcaagcgtacctatcctactgaccacagaaaaccgcacttgtgtcagcagcaaaactggacgtgctggcaaaaatatcatttgttctacttgccaaaacaggtctatacagttgacggaaacctgagaaggtcgtctccaatttgtaaagcccagtgttcgttcttgaaggagcgtcgagaccaggataatactgaagagatcagcaaccacgactagcattcggctcatatatagtactgaaggtaaaagtagacactcaatacattgtgtgcacttgaactacgactgaaaatcagccagttacttgtactcgcggcattccccctccttgtacattgaccagtgcaatgtgcgccgctttgttgcctttcgtctaa

SEQ ID NO: 18 - DNA, 14474 bp, unidentified
  misc_feature 1..14474: note = Fanzor polypeptide
  source 1..14474: mol_type = other DNA
ctacagttgtagactactggttttctcgcgacgaagctgcacctcagaagctcattgatttgctcgacggcgcagagacctcagtagatatcgctatgttcatcttgacgcatcctgaaccgacagacgctatcatccgggcctcccagcgtgctatcgttgatcgggcacaagtctccgagaaaagctcagctatgatgatcgaaaacggggtcaacgtatttcacgcaaaggccccaaactcatgcactggaagatggtctgttgccttgcaaaacaactggaaaggtgagatacccgcggtactgttcatctgtagcccacatacacacacaggacagggttctgcaacttgagcttttgcgcttatgcacaatcgccacaataaacggagctgttctgcgtggcggcttggagcttcggccgagtggctggctcaagagtttgtctgcagtgagaacgagagagaaatgtagaggagatgaaggtgctccgaggttttcgggatcccgagttttggagttttggatcgcccggtgctacactgctttcgtccggaccggtaagaaggacatcaaggccatctgcgaggagcacccgggctggaatcgacggacggtcgcgcattactacgccatgtacgaaaatggagagagtttgcagccaaggtgtggcattgtggcaccggtcgagcattctgaaggcgcgtgcagaaggctgcaccattcgcatgatcgtcgacgagcgaagcgcgctccaaaagaaaaaaaacatgacttgggtacgcaagtgcggggatcccggtcaagactggacgcgtggccagcttcatggtccacaacaagtggaccatcgtcaacggcgagttcattttacaaggcacgggcaactacagcgcggttgcgttcgatggagcccgccacgcagagacctttgagacgcgcacgggtcaggcgcaccttgattcgatcaagcgcgagttcgagcagctctgggaagaaggacgggtgcttcaatgggcctcgaggcgtactgcttgcttcatgtacttgggggaggacgaggatgaaacgaaaatgtacccccccccggggagagcaggacgaggacgaggacgtttatgtgtaggatatggttgaacgtgcaagccagtaagtaactttgttggtgcccactttgacttgggcttacattggccgtgcaggagtgccatcgtagttacaatagagctcgaggatcatgatgagtcctctcagtccttaccagccaaaaaaggcaaactgcacctagcgcattgagctggcaacggcagccccatcgacggcggctccagctacaacgggatctccgtcacttgactcgtcccttcagtccactgttgcttcttcgtcgctcgacaatttgatcgcgtctgctggatcgggttcgttcattgatccgagttcagtagtggtaaacggcgagctgctaccagcgagatcaagtcgacgtaccgcaactgggtggggcctcgcgccgtctcccccgacgccgcgtgctaccgtgaagcactcatcatggacgcatgcccgaccaacttcgaccagaacgaggttaccaacacgtgctgggccgagtgcccgatcgcctacccggtcgagtgcggcatggaatgcatccgtcagaacgatgactgtgctatggaggtgcttaacaaggtcggtgctgttgctagcacgtctagtcatcgctaccgttggtgcgtctcagaaactgtggcagctttcaaagggtgcgacgcgcgcattcgactgcgctaacatgatgatcggtacgatgagatccatcatccgttacgtgcgtaacatcaagaccacggacccgcaggcctcgacggacaaaattctcaacatcctgtaccagtcgaacaacatcgtgacggacctgccgatggccatttacatttgcatgggctgggacttgccgaggcctctcgatgtctcgggtcgtgtgcttacgacgatgaactggatcttgctaaacgccatcgggtacaaggacgacctcgtgtctagctggagcaagttcaaggctttcttgatcggcgccaacttcacggaggccgccaacaagatcaacgagacggagatcaggacgctgagtgacgccctgaaggccaactccacctgcggctacgacttgcgagtgatgacggacctcacgtgacgaggaaacgcagcataatgcgggtcaagatgagaacgtgatacttgccctcatgctgtccacatcgtgcacacggacggatgctgagtctgtcggtgttgatgcactttcagtcgtcgaccgtaatcgcttccagtttttgagggacgcgaacatttttcttgagtcagggaagaagctggtgttttacctggtgcgtcttcgttatcgagctccgattctccggcagaacgaccagtcggaagtgaaacaattgatgcagagcatgatctggtattcgatcaccggcgcgaagatcgacggtggcaagttgcacgatgccgagtggaccaagaagctggatttcttgaatcctgccaacgaaacactgtcgcagctgtgggaaagtggagagagaagcaccagctcggagcacgaacgttttgcacttattggctggcctgcttccgccgacataatgaacgcagtcgcattgtttggaaaagtgtcctgtgtgcctgtaattcttgcacagtgctacaacgctccgaatgcttctcagcgccgaacttgatgaaaatggatgccatttcgctcaaactctcaaaatcttcgagaagagcaatgcatctgttgagtttgtacccctttgccgggagctaggtgctgccatcgttgacttgggtgacactacactgatccaggcgtttttcaagaagtatgttgcccagctgaaagacaaggacagacagttatttctccaatggcttccagctctcgtgcgcgcatttggatgggcatacgttagtgctgccacactgaatgccatcgacgtgcaatcaactgaaattcgctcggatcgagctttggaactcgcaaacacactccatgacaacgatgctgcacttctagctctcgtagcgtttgcgctgaagaaagctcacgcacggtgctctggccacgccgatgcattcgtatcttcgggtaagatcatcacacttttaaagcttgcgctggcgtgtggaaaccctcaaatatttgccggtctatcaaccatactgaacaagatcgatggcaatcttctccacacagtgattaatgcgctctcgaaatacgtcaatgactcgagtttacctgaacaacgtgctacgctggcctcacttgcagcgagacgtcgtgaatggctattcgctgagatcgaagacacgaagcaaccactggacttgacgaagcgcgagatctaggcaatgctagccgacaacacaatcggctccgcgaagtacttttcaatcgtcgctgactttttgaaggtgtcaccgatgagcacgagattcctggggttaaggctctacctagtggacacatcgttcgagttcaagtcagtactcttggggactcgccatttcgcgcctcagtatgggggaccagatggcggaatacgcggaccactttaccggtggattggtgacgtcctggggggggggggggggggctttggtttgagtcgccataaccttttcggggctacaacagtgatgtcaaatggatgatgagggacggtctaaagttgtagcgggagtagtgcgtgccgcacttcatgcatgcggcaaccaatactgttttcggcatcgtcggtgacaacagctcgtccaagaacccagccatgaccgacatccttcgacgcatcatcaaaacgatgtacaaaacgcagcacgtcgaaggaaagggcactctattaagcgagttatgcagcgttatgaacccggagggtgtgcatccacgctagctcttaaacttccgcacgcatcgattcctgggactcacgcgcgtcgtccgacgcattcttctactctgggatccattggtgcaatggtacgaggagcgggccacaaaagcccgacgtgagaacgtgatgccgccggagtccttcccactagctcgggaaaagatggaatgctctcactgctggagccgatctcgaaactaaatcagattggacaggccgagtcggggggaccaatgcaacgtgcttcttggactctacaagctccgaatatccttgttggacatcaccacagccttgaaggactgaagacggagaatcggttcttccgaccggatgagctgtacgatctcgcatcgacaacccgttcgctacttcacaaagggtttcgtcgggttttcttccggcggtacaccgatcgtgataccatgaacgtctgctcctttgcctttgagatgcaactatttcttcaccccaacttcaagcatccatatggagcgctgataaaggtgttaccaaggtcaatatacaggcaggtgcctcccagcaggtagctgaccgacactacacgaagattcgacgcattatcattgacagcgtccgcagcatcatgacagcggctgacgccgagccgacgtcgactgatatcgttgccccaccgccagctactgggttatcagaggacttcgtggagctcttcacggagacagcgaacgaggtggcaccaccacatagactgcggtgcacgagcaacgcatcgacgatgagctcgaccgctggctgacaacgcctacttcgcttcaagcgattcaacccggtgcgtttgactcagttctgagcttctggaagcgccagcaagagctgggcaacttcctgcttcttcccttggttgcgcgcgtgctgttctcaatgccctcatcatcggcccaaattgaacgcgactttgggatggcaggcaggatggtgacccccaccgcagctcgatggcgccttacaacgtggacatggccacatttctgagctgcagcagaacttacgtgggtatcacccagtacccaaagttgtcgtcgagcacagcaaaggatcaagtaccgtcaaacgccatggtgagcatggagcgagagttggacgacgagttcggatcgttgatgaacaaaggcatcgagttgggactctccgacgacgaaaacgacggtattaccgaaatgtagcgggagcgggctggggcggacgaaaacgtgagagaacgggagcacgtgtggaagtggaaacgggctatagctgccgtggtagagttctagccatgcatgtgcacgaaatgagtgtctttacttttcatcaacacgttctgaccgtgtttggtgttagcttcgctatgcagcatatgtaaatagtatttcgctttcacctatgctttcgtgctggtcgtttgattactagcaactctgtaacacgcattgcagcgcgtacacggatcgcctcctgtgtttcaagctagattcgctcgatttgagatcgatctcgcagtattcgcgaccgtgggcacacaggcgggttgctggaccgggtggaagctgctgaaacccgcgtagttggtgtcctggctgccgctgcttcttttctgcggtttgctccagcggctcgtgataatgcggtggtggagcctcgcgtgcttgcagttgcttctgtagggcccatcgctgctcctgttgaggaagttggcgtcggcgcgaacgttgggacgatggccgtggacttgtctcgacttgatacagatattcacatcggtgttcttgaggacatcactgtattatgctggtcctgtggtacgaactcagagtgccatcagttcacggggttttgtctcggcagtcttcttgaccaccacgatggctgggcgaaaccgttcgcctgggtggttgttagccctctcttgctcctgatcctgacgcatgcgaatcgcgatgtcgtgttgatctagcccgccgttgatcagctctactacgcgaacctctgtacgagcggttgttgcctcttgcactacttcaaatttgcaaatgtcgtggcgctcttacgcagcacgcttgtgctcctcctctaccaggttgtgttgcttgaccctggaagactgcaatgtgacttgcaaaacgcctggtgaggagatcaaaagagatcatctttgaccaataaaacgagatcttgtttgccaataaaaaaagcaatttgcagagcgaaccaagttctcgccctagctcggttcgaatgaaaagtaagcgaaccaagccccccccccccccaccccccccccccctccggttcaggtaaaaaagaaaagaaaagaagggtgaaaccgtggttccagttcagttcgtcccaggggtgggaaattcacgaagtgtaggaaagtgtaatagacttgcgaggagagctgctggtctttctactcagtccacaaatggaaagttctgtccgtgcagctctctcaagtctaacctaaagctctacactgccagtcatactgtacaccactcgtacaattgcctctctcacattgatggtcgcacgctcttcaattgttttcgtgaacccagcagccgcagtcaacggcaattcgaagatgtcgttgggtacgccccgaggcttcactgctccagcaagttctcacttttcctttcgcaccgtcaagcgcagtcactggtctccaacctccatcgcctgttagtagcgttgtatcaagccctatgtcggggaagggtgcgccaggaaagcgcaagcgcaagtgacacccatttgatgacgggaagagcgatagaaatggcactgaaggtgcatgcccgaactcggagggcgatgatgacctcgatgaggatgacgtagattatgaggacgcccaaccagtaacgacacgtccaagcaagaggcctgacgtcgcggagtgcatgaagggcaacaagaataccagcctcgtatatgtgaagatgtcactaggttccttcttgacaggcgaggagaaactgttgctgtcattcgatggcattctcgtagacttgagcattggattgttaaatgcctacgcgctgctgaacatccacatgatacggtgtgtgacaaaggacttcccattcctcgatttgagcagaacttcgtttgccaatgcttgacagacgtaatgtttaacgacagcaacgtgcacatagacgctgaactacatatatcgttggagctatacaatttgttgagaggctctaacgcttctcacgggcgtcgcgctggtatcaagaacgggtggcaacaggcgcagctcgggagatgatgaccgctatccagcatgcactcaaaaatgagtttccttcgccggtttaataaggtgctgcgggtatggtgtagacagaagcactggtagcacacattattgccccagagttcgagcggactccacccgacattcctgatcgtcagcgcctcgacaacgtagtcaacgagtggcgtggagaagtccctcagcgtcggagtgagctggtcaacttcacggcccaccgactggtgcttctgacttatcgactcctgcaaatgattgaggagcgtaacgacagagttgagcaaagcgtttgcgctgtttaagtgacaggggcgtctgattttgaagttagactaatccaagctgaagttatgaagacgttcactgttctaccaacaaagcttggatttggaattagtcacctcacgatagatttgattagtttccgggaactattagtccgcaacgacattgctgttcctccgtacagatcgaagtggaatgaggtgagatacatttattggagacggttcttccgtattgacaaagtggagactatagagtttggtcatcgcagattcacacgagagatctcggcggacggcaagtcggtgaacatcaagattcggaagcccgaacgtgggccttccgagcccaatgcaaatgacctccaagctgccgacattggctctagatgggggttggatgcgagtaaatgcaacctattggtcaccacaaaccaggacgacgaaacggttgtgtgctctggcaaagagtatcgcgaagacgcttacattacgaagagcagccagaagcatttgagatggatacgggatcgtccgggcactggagctgcttttgcgagcatgccgacgaagaggagcatgttgctaaagcggtggcgggagtacgtcccatttatgacgcagcacctgcatctgctagtgacccccgtgcagcacaaatcgtaccgtcgccatcgacttcgaaggagcttctttaaaaagaagaagctatgtgagctctaccagaaacttgtatgtcacggagagcgaatttttatcgtcattgacaaccggagtaacggcgatccaaatggagcgatcaaagggaagccatcggcactcgtgcagaaattggcgctggagttgtcaaagacgtcgaactgtacggtcatcattattgccgagttccggatcagcaaagtgcactttggttaccaacaagaactgtccaagcaatacccgtatcgaaaggccgctgtccacgtacgcgcagtccacgaaagacgagccacgtacccagtttacggcttactccatttcagaaacaaaggttgttctggtatgagtgtgaacagggacgtgaatgcttcgaagaatatgctgcgcctgctcgattgtgaactcaactagactcgcccagtcacctacacgcatcaagcaaacagatagataacaatacatttctagtgtcgctgtgtgcctatctaggggtgaggaagattacattgtgatagccggctcagaaattagcccttttggaatctgtaggctacgtacctataggacacccttaggagaataatgggttaaagaaaggctcaatgaagcctggttgatttctgcatgaaatatttttcaaaacggtgatgtcctcctgtggatgaatatacttgtctttccgacagatagctcagcacgattgttgtctgctcgctttgcaggccattttgaccaattttaacacgtaaagccttaattgtgtccaattaaaatggttaaatgtaggtttgacattctgacaccttccgacaaatatgtgtctgaagtatttccaaaatatcaatatcttcatgcaaacaacaactgtaaaacgtatttttcaaatataccagccattcgtacaatgaggagtggccctaatgtaggaacactgaagaagatgaggtcgttggttggatgtccaccgttggtgtacactttaccagaagagtaacgtagccatggatcgtgcgtgatgcgtgggacataagcaaaataaacaaaggctgtgcttatgtcttcaatatgccacgggaagaccgcaaggtagcctgagtgctgtgcagctggaataaagagattgcgcctcacgttgtggacgtcgcgacgctggaccatccgacgcgggagcggcttgaacgcttgcaggagctcctgtttagcacatgcacaggacgcaaggaacaccggttcaacgtgagtagaaaagtgcttagcgcttacctggtacggtactactcgcagcttaaagcgctagttcctgcagtgccgatcatcatcctgcttagtatctgcgggcatatcgtcaactgcattgcttgagtggtctgtagctggcggctccacctgctcaagaccaagaacaaactcaagacaaggcgcacacgttgccgagaagatggccaccttttggctgtgagtgatgggcttatcgcctcgaacaaggtcatggctgcatcgtcgaggcggtactactaaataataagggtccacacgcaacaacggaagaaggacaactgcaagagccatcagatcaagaaccaaatcccaagcacagaaaaaagctgcgaacctgtcggccacatggcttgcgtggtacaagaggataccacgcgtgtgggactcaaccgatagaagtcggagtgtcgccacgtggtcgcctccatgaagctctccctcgacgatagcttcgttgtgaatatcacagcggaagaattcaagaaccaagtcctcaacaccggccgcgcggaaattggactgctggagtttctaaagctagcggcgtcaacgaagggagccgggagtatcctgcgtgcgctgcacccgctgcatacgtccggtatattggacgagcaaatcatggtctacaggcaccaactcgtcataggaagcaccgaagaccctgcacatatcgacgcgcaagacatgctcggcattgtaggtcatgtgtgagaacggtgaagttaattcattccaatatatgtattcattcgacataacatcgctgcttaacaagacaacatattcatgtgtacacatccacgcgcgcaggtcacctaatcaaagcgtaggctgcacaccgcacgatcgcaccgcgctcactcacccaccacatgcacagatcctcagcaatactgcacggttcaaagcactgatcccgacccaatcttgatcataaacaccggccaaaacgtggctgttgacgaagctagtattgcgtgtcgttcgcaatacgctcgccatattatagttttctatccccaaaaccagacagggaaatatcacttcaagctgtatgcttgttgctgctcgacatcatggtatgtcgtgagtttcaaattgcactgtgcaagtgaacaaatagaccgtttggacggcgtggttccaagtccagaggtattacagcttgttgatctgacagcgaagtcctttgaaatttgttcccacgtaattgaagttgtggagtctttgaaaggatctaatcgcgttgtcaataccgataatatctacacctcctgcctgctactagaatcactaaggtcgattggcatgtatggtcgtggtacagtgcgcacatccagcaaacacttcccccacttcacaatgatccgaaaagctgatggaaagcctagaggctacatgaaacaaggcgtgtgcttagagtaacatatcgtagcggccagttggatagatggctctattgtgaatacagtctctaatgttgacgcctcctcttcctctacggtatatcgtcgcataaaggaggaacgtgttgcgtttaaagccccgacctgcatcggtgaatacaacgcggggatgcagggagtcgaccatcatgatcagcttcgcggtcggttttcgctagccgatggtcactcatttcagaagtggcataaaaaaatagcaatggctatgattgatatcgcgaggtgtaatgcgtatgtatgcgatagcttggcacgtgatacaagcgagatggatgttgcacagcctcgcaataatacgagggaaagcgcccgtgacagccaccgggcgtttgtcatttcaattgtgcgagaattattcaatggaggttgaaagaagtgcattgacagtgatgacggaattgtgtacacttcgaatacaaaacccatgacaactgctgccaatttgaccagaaatacgaatgagctagatacgccagcacatacatgtgtagcaaaagaatcgtggattgtgttacaaggaaggagtcgggcaatgcgcaaatgcattgtttgtaagttcgagggcagggatgccacccagaaaacggattactgcgagacgcatcgagttgcactctgcaagcgtacctatcctaccgaccacagaaaaccgcacctgtgtcaacagcaaactggacgtgctggcaaaagtatcatttgttctacttgccgaagcaggtgtgtacagttggcggaaatctgagaaggccgtctccaatttataaagtacagagctcgttcttgaaggagcgtcgagacaaagagaatactgaagagaacagcaaccacgactagcgttcagctcatatataatactgaaggtaaaagtaggcactcaatacattgtgtgcacttgaactacgactgaaaatcaaccagttacttggactcacgacatcctccctccttgtacattgacccgtgcaatgtgcgccgccttgttgcctttcgtcaaatcatagagcacatgcatggtgctgcatgttaccatcagcagcaatgtctccatgcttcctctctaggcggctccagcaccttgatgtcacgtagaattctgttaccgggctcgtgatgtcgagatcgcctcgcggcgaatccgaggcagtccgcgggctgtcgctagttcgcccccgcaacgggcgccgtcggaaactctgcgtccttgctgcctttcgccttgtagggctgcgccaccatctcgttctgacggtgtctagcgtatggctggtgcatcgggcgccgtattcgcgccgtactggatctccttagcctcgtccctccttattgctcgcgccgttgtgccgcacacgtgcatgatgtagcacaataatgtcgggataggcgccaagccttacgctcttgttggtgttggcgcaagtagcttgagagacacagtagcatgagcgtgccgtgtgtgtttaggcgcgagtaacttgagaaacacaatagcttgagcgcgccgtgtctgttcaggatttagatcccacgttgtgataggctgtcaacgctgacattttgctggaggggcgcaaaaattgttgatcaaaagtcggtgccgtatcttaacttcactataggctacagcagtctcattaccttcttttggaaaaggatacttcatgtatcattctggtaacgatagggttaacggacatctgtgtttcttcatcttcgcacaatacaggttgggacgctgcgataaatctcgctctagttgctaccaggtcaaacggcagcgattttcatcgacacggcttatcgccaccatggcttaccgacgtcgatcgtgtccgatcgcgatcctcgattgactgcagcactctggccaacgctattccagtcactgaggccatgctcaacgcgtcacattcagagacggacggccagagtgaacgcgtaaacagggttgccaaggacgtctttcaaagcttcgccacgtcgtttcagtcgtggagcacactcctgcctctcgggtgaacagcgcggttcacgcgtctacgggtctcacaccattctacgtgaactatggtcgacatctccgagttccagtgctcctcggtatggagcgctcggtttcaagaagcgaaactggcgaagacaacgcggaccctaccgtatcacacaaaatatcaccgtcctccgatacacctttggctagtgatttcgagtccgctaccgttgattgtcttgagagtgctcacaacacattctctaccttgctgaatagggtcaatactcgtcagagttttacaagaatgctgcgcaaggagtgcgcgcgcataccgccacgaagacggcataatcccgcattgcaacttggacatctcaggcgttgatcaatatgcgtcaacgtcattgtgccgtcgaataccaagacgcatcggcgcggctgagtcacccgtttcaatgccagctaacttcgaccccattccagtgccgctgtcacacgacactgcggttgtctacacgttcctacaacagcgcgaaccggtgacacgctatgcgcgctacatgatcgcgacagcgtcgatcacatcccgaccggcgcgggcgtaacattttggagaagttcgccgtgggcggctatgtgtattgtccacgacccaccgctgttacaaattggacacgaataagctcgcgcctcgctttattggaccatttaaagtgacgaaaggttctgaagacgcttacgcactacacgttcctacggctctacatctgtatccaaccttctatgtcggtcggctcggtcgatacaacgcggtgactatcgccatcgacgccgctaactctgcggcggcgcgtggcacggcgcttcttcccgacgctcccgatgacgttgctcctggttcaccacaggacgggcaagacgatcatgatgctgagcccattgatagtgcgggttacgtgcggcatatcgtagaggagacgctgcagcacgacgacgcgcatgctgccacacaggatgcgcgtcaaggccacgacattcgttaccgtgctagcaatattcctccgcaccgccaatgccatgtacgttggctgggttcaatgactgatagttgaaacctcgttcgggtcttgtcgcggatgttccagactgcgtagcggcgtatccgcgccagacgtgttgatggtcacctcaggacctctgccaaaattcaagtagtcacacgtcacagggaaaatatggtggacacaaatatgggcagcagcaaattacttgtgttcagtatgcaggtctaaacgtcggcgaaagctacaactgagttctggtcgagagctacaggcccttgagtgagcgcggacccagctaactgcgccctgcatcttctgccggatgccaccgccttcttttgctgcgctgccacttggcgcttcagtctccctgctgctgcagcttgctgacgtgctgcttttcg

SEQ ID NO: 19 - DNA, 21782 bp, Chlorella sp.
  variation 1..1067: note = n is any nucleotide
  variation 13283..13307: note = n is any nucleotide
  source 1..21782: mol_type = other DNA
  variation 5313..9306: note = n is any nucleotide
nnnnnnnnnnnnnnnnnnnnnnnnnnnnnnnnnnnnnnnnnnnnnnnnnnnnnnnnnnnnnnnnnnnnnnnnnnnnnnnnnnnnnnnnnnnnnnnnnnnnnnnnnnnnnnnnnnnnnnnnnnnnnnnnnnnnnnnnnnnnnnnnnnnnnnnnnnnnnnnnnnnnnnnnnnnnnnnnnnnnnnnnnnnnnnnnnnnnnnnnnnnnnnnnnnnnnnnnnnnnnnnnnnnnnnnnnnnnnnnnnnnnnnnnnnnnnnnnnnnnnnnnnnnnnnnnnnnnnnnnnnnnnnnnnnnnnnnnnnnnnnnnnnnnnnnnnnnnnnnnnnnnnnnnnnnnnnnnnnnnnnnnnnnnnnnnnnnnnnnnnnnnnnnnnnnnnnnnnnnnnnnnnnnnnnnnnnnnnnnnnnnnnnnnnnnnnnnnnnnnnnnnnnnnnnnnnnnnnnnnnnnnnnnnnnnnnnnnnnnnnnnnnnnnnnnnnnnnnnnnnnnnnnnnnnnnnnnnnnnnnnnnnnnnnnnnnnnnnnnnnnnnnnnnnnnnnnnnnnnnnnnnnnnnnnnnnnnnnnnnnnnnnnnnnnnnnnnnnnnnnnnnnnnnnnnnnnnnnnnnnnnnnnnnnnnnnnnnnnnnnnnnnnnnnnnnnnnnnnnnnnnnnnnnnnnnnnnnnnnnnnnnnnnnnnnnnnnnnnnnnnnnnnnnnnnnnnnnnnnnnnnnnnnnnnnnnnnnnnnnnnnnnnnnnnnnnnnnnnnnnnnnnnnnnnnnnnnnnnnnnnnnnnnnnnnnnnnnnnnnnnnnnnnnnnnnnnnnnnnnnnnnnnnnnnnnnnnnnnnnnnnnnnnnnnnnnnnnnnnnnnnnnnnnnnnnnnnnnnnnnnnnnnnnnnnnnnnnnnnnnnnnnnnnnnnnnnnnnnnnnnnnnnnnnnnnnnnnnnnnnnnnnnnnnnnnnnnnnnnnnnnnnnnnnnnnnnnnnnnnnnnnnnnnnnnnnnnnnnnnnnnnnnnnnnnnnnnnnnnnnnnnnnnnnnnnnnnnnnnnnnnnnnnnnnnnnnnnnnnnnnnnnnnnnnnnnnnnnnnnnnnnnnncaatccccggagctggagcgcgtcagcagcatctcgacgggaatcgcggtgtggaggcacaacaacccctttgccttcaagaggaggcaatggaacaccgttgaaatgtactgtgcactcaacacgcctgggaaaaaggatggagtcatgcaactcacggtgaacggaaagtcacagaggctcacgtcggtgcggtacaggtacgacaacatgctcatcacaggcttccacctcgtgtccttctttggggggggcgacctgtcatacgcaccaccagctacgacacacgcgtggtttgctgattacaagttcacgaaaatgggttgacgtgtatcgggacgtgtgcccaggtataaagtcagggtcacatggaccatccggtcactaaccatgaaacgacgtgccgaagcactgagcacgacgcacaaaagacacaaaggcaacaatgatgagctggaacaagatatcgacaagtacaagaagctcctggcacaacgagaccagtgcatccaacaacgagacgagtgcatccaacaacgagacgagtgcattgccgcacagtccgcatgcatcacccaacagtccctgcgtatcgcccaacgagacgcgtacctggcccagcgggatgcgtgcctggcccagcgagatgcctgcatcgccctacagtccaagtgcatagcagaacgagacgcgggcattgccgaacgagacgcgggcattgcagaacgagacgcgtacatagccttgtgtcaacgggacttccaagagcaagcgtattgggacaccgagaaactgaggacaaagtaccacttcctggctctcagcctcgcgtcaaggacgaacaagttcaaacgacgcagttatccgtccaaagatttcccccacggtgctgtcatttaatatgtaaatgacgtccagaaaacgtccaaagtgggaaaaccacggacaccgatcaaagtcaacaagccgcgcggtgagagtatggcagtgtgccacggtagatttcgtgtggtcccattcgtgtggttatgtcatcccgtgccttgcatgctgtgccacgtgtgtggtgggcactcaagcagatatcggtatgacggtagcaaaaacaaagaaacaatggcgcgcttctggttggctatcctcctagcagcgtgcgtgaccgggtacgcctggggctggtgctgctgccaggagtaccaggagcacgtgttcaagctggtggatggtgcctactaccccgcgtgcctgaacaagacagactggccttctccactgtacacactggaggcgaagtcgagcgccctcaggctcgcccccagcctcggactgggactcgtcgctgccgtgctgctgtggctctcatgcatgtaaaccattcgaaattagctcccaggaggcacgcattgagagccttcgagtccaagaaacgggttgaaagaaccttggcccatcgcttgatgggtgcacggccgtacacttgcctgttcgtagagcgcgtgtggagccaggcaaatattctatgcacacggcatgccgaccgatagcagaccactgaaatcattggctgcaacctcccaagaagaagaacctccgtgcaccagcaacttgtcagtgtgcatgcgcaggaccctggtggacggcctggccatcattgtcgcgtacgcattcatcgtgtacgtcacggaacatcgactgctgtccgcactcaaggtggtgaagttctacggcctgtttgcagcactggcgttcctgttcaggctgatgagtgtcgagctcgaccaactcacacgcgtggcagggttccaattgggcatcaaactgttctccgtgctggggtgacagacaatcgcacgcgcgggtcaggttgacgtgaacagggcacgggcctcctcggtgtcaaggcaccaatcgaccatgcgactagggtgccaggtcctcgccatgagctcctccttgtacaccctggtctgctggacgcagctcaacgcttccgaacccttgtacaggtcctggcatggagcgggcttgcgcctgacaaccctggcgacgccttgaacgatccagtcctcacacccgtttagaacgtcatcgcatcttccgaaacatcagcttcgcggcgccgacttccatctggtcgttggcacgtcgccaaatgtctccacgaccgtcctggatatcccggaggcgtctgtcccgtttaaacgatactttcaaaggcaatcacatgtcgcgtgtgacagacgacataatactggcgtccttccaagaatcgtacgatccagaggtcctgcggggttgcacccacatcctgaacgttgcggaggagttgaacgtgtcgggtcgcgtggacagggagtacgcgaagcacggcgttccggacgattgcagcgacacggacatcacgcgcatcctggccccttgcattcaattcatcgcagacgcccacgctgggggaggtactgtcttggtgcactgcctggaaggggtcagcaggtcggtgtgcgtggtcctggcatacctgtgcgtgtctcgtggcctggcgttcgacgatgcttacacccgcgtgcgtgacgtgcgcccacacgtcgatgtgtttccaaagtacgaatccgacacaaggcgctgggtggcctcggagtgcaacggcgtgtagaaatctgtacgtctcgttattgttacatcagtccaatccatattgttacatcagtccaatggtaaagctttcacgacagttgtcacggcaactagttgttgccctacgtccccaagacggcgcaaatgctcctccaacatgcgcttgaggacgctcaaatcttccatcatgccgctgcggcgcacgtgtgcgtattcatccaggtcttcgtgatatctcagataccgccccaagtcctgaacagtgcgagcaaacatctccagcttttctgcttggtacaggagctcgtgccccgccattgccaacgtgtgcactgactcttttggcagagtcattttcaaagaatgaacaacaccgcgcgacctggcttttatacctggcttgtgtaccttgccacgctgagtccacgttggcacgccagcactacgcaccgcgacgcgtggctcggggcgtcgaggaaaggacctcagacttgaataccttcagccagttcagatgttgctcccgctgttcatccagaatttgcgattggaactctttgttgttgttggcgtgcatgtctgcaatgtctgcggcgctgattctaacgcccttgcgagttttgtactggggagatttcagctcgagtagcagctcagaagcacgctgctggaattctgcgttgtgtttcggaacgcagtatgttgcaatgtactctatatggcccaggttttgagcgagccttttggacacaaacttgctcaatggcgtgtagaccgttcctgtttccgtggtctcaatgacgtgccgcttagccaactgcagattttgcagtctgggtgggccgtggataccgtgcatgttccggaagatggagcatgcaccgtcttcgggtggacatgccacgacaaggagtgccatccgctcgttgtcgtggtagcagtccatcatcacttcgacttctgcttggcttcctgaagggagaagtttggtcttcacaggcttggtggcggtggccgactcgtcgacggtggcaagtgcttcgttggacacttccttagacacagctgtggctgacacactgaagccagtatcggtgtcaccttccccggatagctgaacatgccttgtctcgattcccgtgtggccgcacttcctcgattgatgcttgcgaatgtccccgcggtgcgcactcgtgtacgtacatgtcccacactgaaggagggttatggggtagacatactccttgaaactacccaaggccatgatgcctgcgacaggcaccctctttaagcccctgtctgttcttttgtgtcttcagaagcactttcaagacacgcgcaggggtgcattgggctccactcgaaaggtgtggcgtgtgcgttgccgtcaccgtctcctgaaatctgcataatgtgcgacacaatgccaacatcaccgcaactccagttttggtgccgcttaatgttggatgcaaactcactcgtgaatgcacagttgacacattggtgcatggtgcaaaggaacacatagggtttgagactcatgaaacttgaatggtttccatgcctttaagcctgggatggtatatcagcagcaccagcgtgacacacnnnnnnnnnnnnnnnnnnnnnnnnnnnnnnnnnnnnnnnnnnnnnnnnnnnnnnnnnnnnnnnnnnnnnnnnnnnnnnnnnnnnnnnnnnnnnnnnnnnnnnnnnnnnnnnnnnnnnnnnnnnnnnnnnnnnnnnnnnnnnnnnnnnnnnnnnnnnnnnnnnnnnnnnnnnnnnnnnnnnnnnnnnnnnnnnnnnnnnnnnnnnnnnnnnnnnnnnnnnnnnnnnnnnnnnnnnnnnnnnnnnnnnnnnnnnnnnnnnnnnnnnnnnnnnnnnnnnnnnnnnnnnnnnnnnnnnnnnnnnnnnnnnnnnnnnnnnnnnnnnnnnnnnnnnnnnnnnnnnnnnnnnnnnnnnnnnnnnnnnnnnnnnnnnnnnnnnnnnnnnnnnnnnnnnnnnnnnnnnnnnnnnnnnnnnnnnnnnnnnnnnnnnnnnnnnnnnnnnnnnnnnnnnnnnnnnnnnnnnnnnnnnnnnnnnnnnnnnnnnnnnnnnnnnnnnnnnnnnnnnnnnnnnnnnnnnnnnnnnnnnnnnnnnnnnnnnnnnnnnnnnnnnnnnnnnnnnnnnnnnnnnnnnnnnnnnnnnnnnnnnnnnnnnnnnnnnnnnnnnnnnnnnnnnnnnnnnnnnnnnnnnnnnnnnnnnnnnnnnnnnnnnnnnnnnnnnnnnnnnnnnnnnnnnnnnnnnnnnnnnnnnnnnnnnnnnnnnnnnnnnnnnnnnnnnnnnnnnnnnnnnnnnnnnnnnnnnnnnnnnnnnnnnnnnnnnnnnnnnnnnnnnnnnnnnnnnnnnnnnnnnnnnnnnnnnnnnnnnnnnnnnnnnnnnnnnnnnnnnnnnnnnnnnnnnnnnnnnnnnnnnnnnnnnnnnnnnnnnnnnnnnnnnnnnnnnnnnnnnnnnnnnnnnnnnnnnnnnnnnnnnnnnnnnnnnnnnnnnnnnnnnnnnnnnnnnnnnnnnnnnnnnnnnnnnnnnnnnnnnnnnnnnnnnnnnnnnnnnnnnnnnnnnnnnnnnnnnnnnnnnnnnnnnnnnnnnnnnnnnnnnnnnnnnnnnnnnnnnnnnnnnnnnnnnnnnnnnnnnnnnnnnnnnnnnnnnnnnnnnnnnnnnnnnnnnnnnnnnnnnnnnnnnnnnnnnnnnnnnnnnnnnnnnnnnnnnnnnnnnnnnnnnnnnnnnnnnnnnnnnnnnnnnnnnnnnnnnnnnnnnnnnnnnnnnnnnnnnnnnnnnnnnnnnnnnnnnnnnnnnnnnnnnnnnnnnnnnnnnnnnnnnnnnnnnnnnnnnnnnnnnnnnnnnnnnnnnnnnnnnnnnnnnnnnnnnnnnnnnnnnnnnnnnnnnnnnnnnnnnnnnnnnnnnnnnnnnnnnnnnnnnnnnnnnnnnnnnnnnnnnnnnnnnnnnnnnnnnnnnnnnnnnnnnnnnnnnnnnnnnnnnnnnnnnnnnnnnnnnnnnnnnnnnnnnnnnnnnnnnnnnnnnnnnnnnnnnnnnnnnnnnnnnnnnnnnnnnnnnnnnnnnnnnnnnnnnnnnnnnnnnnnnnnnnnnnnnnnnnnnnnnnnnnnnnnnnnnnnnnnnnnnnnnnnnnnnnnnnnnnnnnnnnnnnnnnnnnnnnnnnnnnnnnnnnnnnnnnnnnnnnnnnnnnnnnnnnnnnnnnnnnnnnnnnnnnnnnnnnnnnnnnnnnnnnnnnnnnnnnnnnnnnnnnnnnnnnnnnnnnnnnnnnnnnnnnnnnnnnnnnnnnnnnnnnnnnnnnnnnnnnnnnnnnnnnnnnnnnnnnnnnnnnnnnnnnnnnnnnnnnnnnnnnnnnnnnnnnnnnnnnnnnnnnnnnnnnnnnnnnnnnnnnnnnnnnnnnnnnnnnnnnnnnnnnnnnnnnnnnnnnnnnnnnnnnnnnnnnnnnnnnnnnnnnnnnnnnnnnnnnnnnnnnnnnnnnnnnnnnnnnnnnnnnnnnnnnnnnnnnnnnnnnnnnnnnnnnnnnnnnnnnnnnnnnnnnnnnnnnnnnnnnnnnnnnnnnnnnnnnnnnnnnnnnnnnnnnnnnnnnnnnnnnnnnnnnnnnnnnnnnnnnnnnnnnnnnnnnnnnnnnnnnnnnnnnnnnnnnnnnnnnnnnnnnnnnnnnnnnnnnnnnnnnnnnnnnnnnnnnnnnnnnnnnnnnnnnnnnnnnnnnnnnnnnnnnnnnnnnnnnnnnnnnnnnnnnnnnnnnnnnnnnnnnnnnnnnnnnnnnnnnnnnnnnnnnnnnnnnnnnnnnnnnnnnnnnnnnnnnnnnnnnnnnnnnnnnnnnnnnnnnnnnnnnnnnnnnnnnnnnnnnnnnnnnnnnnnnnnnnnnnnnnnnnnnnnnnnnnnnnnnnnnnnnnnnnnnnnnnnnnnnnnnnnnnnnnnnnnnnnnnnnnnnnnnnnnnnnnnnnnnnnnnnnnnnnnnnnnnnnnnnnnnnnnnnnnnnnnnnnnnnnnnnnnnnnnnnnnnnnnnnnnnnnnnnnnnnnnnnnnnnnnnnnnnnnnnnnnnnnnnnnnnnnnnnnnnnnnnnnnnnnnnnnnnnnnnnnnnnnnnnnnnnnnnnnnnnnnnnnnnnnnnnnnnnnnnnnnnnnnnnnnnnnnnnnnnnnnnnnnnnnnnnnnnnnnnnnnnnnnnnnnnnnnnnnnnnnnnnnnnnnnnnnnnnnnnnnnnnnnnnnnnnnnnnnnnnnnnnnnnnnnnnnnnnnnnnnnnnnnnnnnnnnnnnnnnnnnnnnnnnnnnnnnnnnnnnnnnnnnnnnnnnnnnnnnnnnnnnnnnnnnnnnnnnnnnnnnnnnnnnnnnnnnnnnnnnnnnnnnnnnnnnnnnnnnnnnnnnnnnnnnnnnnnnnnnnnnnnnnnnnnnnnnnnnnnnnnnnnnnnnnnnnnnnnnnnnnnnnnnnnnnnnnnnnnnnnnnnnnnnnnnnnnnnnnnnnnnnnnnnnnnnnnnnnnnnnnnnnnnnnnnnnnnnnnnnnnnnnnnnnnnnnnnnnnnnnnnnnnnnnnnnnnnnnnnnnnnnnnnnnnnnnnnnnnnnnnnnnnnnnnnnnnnnnnnnnnnnnnnnnnnnnnnnnnnnnnnnnnnnnnnnnnnnnnnnnnnnnnnnnnnnnnnnnnnnnnnnnnnnnnnnnnnnnnnnnnnnnnnnnnnnnnnnnnnnnnnnnnnnnnnnnnnnnnnnnnnnnnnnnnnnnnnnnnnnnnnnnnnnnnnnnnnnnnnnnnnnnnnnnnnnnnnnnnnnnnnnnnnnnnnnnnnnnnnnnnnnnnnnnnnnnnnnnnnnnnnnnnnnnnnnnnnnnnnnnnnnnnnnnnnnnnnnnnnnnnnnnnnnnnnnnnnnnnnnnnnnnnnnnnnnnnnnnnnnnnnnnnnnnnnnnnnnnnnnnnnnnnnnnnnnnnnnnnnnnnnnnnnnnnnnnnnnnnnnnnnnnnnnnnnnnnnnnnnnnnnnnnnnnnnnnnnnnnnnnnnnnnnnnnnnnnnnnnnnnnnnnnnnnnnnnnnnnnnnnnnnnnnnnnnnnnnnnnnnnnnnnnnnnnnnnnnnnnnnnnnnnnnnnnnnnnnnnnnnnnnnnnnnnnnnnnnnnnnnnnnnnnnnnnnnnnnnnnnnnnnnnnnnnnnnnnnnnnnnnnnnnnnnnnnnnnnnnnnnnnnnnnnnnnnnnnnnnnnnnnnnnnnnnnnnnnnnnnnnnnnnnnnnnnnnnnnnnnnnnnnnnnnnnnnnnnnnnnnnnnnnnnnnnnnnnnnnnnnnnnnnnnnnnnnnnnnnnnnnnnnnnnnnnnnnnnnnnnnnnnnnnnnnnnnnnnnnnnnnnnnnnnnnnnnnnnnnnnnnnnnnnnnnnnnnnnnnnnnnnnnnnnnnnnnnnnnnnnnnnnnnnnnnnnnnnnnnnnnnnnnnnnnnnnnnnnnnnnnnnnnnnnnnnnnnnnnnnnnnnnnnnnnnnnnnnnnnnnnnnnnnnnnnnnnnnnnnnnnnnnnnnnnnnnnnnnnnnnnnnnnnnnnnnnnnnnnnnnnnnnnnnnnnnnnnnnnnnnnnnnnnnnnnnnnnnnnnnnnnnnnnnnnnnnnnnnnnggaacatcttgacagctctttggaacaacttgacagctctttggaacaacttgacacaaggacgcaattcagtgatgtgtgtggcttgtctcgctgtcggcaaggcttgctgtctctgaggtgtcagtcacgtcagtctcgtccgtggtctcacgagtcgattcctgggtctccttggggacctcgtgtgcgccatctttgttctgttcttgccgcagcttgtacttgccagtgtccttgtcaaactcgtacttgccattgtcgtctcccagctcgtgcgtgatggtgcggccgtagtgcaacttgtagagccagcccagcgtggccccgtcagccaggatcgtgaggaacaacccggacagcgctgcgtcgatgggcatggcaccgtaccaagagccatacttcagctgcaagtttttcaatatcacgtacaacacgatgtacaggaacgcccccaccaggaatgtcctcgcgttgcgtttgccgtgcccaggttcctttgacgcaggcaggaacgagtgacacgcataccacagcatgtcttggctgtccgcgtgacaaaacggatccgaatttgacgcgtggtaattacactaagacaacacgtggatgcatgccatgcggcagtgtcaatcggctgggactgtttgccgtcccaaaaaactattggtgtctatggtaattaacgcgttaaatctcgaactttaatatgtctaccctcaccacgacaatacacgccgtgcaatgctcatctcaggcaagaaggcggctgcacagctcggggtctgtctcgacaccctcagacgactcgcagacgacgggcagctcgcaagcatcaggctcccctccggacacaggcgctacgacatctcagacgtacttgccacaagcacacaccccggtgacaatgacagcctcaagcgaaaattctgctactgcagagtctccaggaaacaccaacagcacgacttgcagcgccaggtcgagtacatgcgcgaacgcttcccagaacacgagatcgtcacggacatcgcttcagggatcaacttcaagcgaaagggcctgcagaccattcttcgacacgcgatgctcggaaatgtccaagaggttgtggttgcctacagagaccgccttgcaagaatcgcgagtgacctcgtggaatggatcctcacaaacaacggagccaaactcgtggtgctgcatcaggcagtggacagccccgaaggagaccttgcagaggacctcatgtcaatcgtcaacgtcttttgctgtagggcaaacgggcgcagaaagtactcggaccaaagcaaagaagcctccaaaagaaggaaagaaaccccaagcgacacactcacggaaagttcgcatcttcccttgccgtgaagacggagagaagctgacgcaatggatgggttgccatcgggtcgtatacaacagggctctggcgtttgcaaagaagactggtcaacggaattacgcggagatgggcaaacggttcgtggcgtccagaaacatcgaggagccgtggttgaagcaatgccctcaggtcatccggagttgcgccgtacgtgacctcaaggccgccttcgacagcaactttgccaagcggaagatcaacccagaacacacatttgacgtcaagttcaaggccaagaaagacgacgtgaccgctgtgcgcatcgagcgagtgaacggtgcgttcaaggtgttggacgacggcaagcacgtctccttcttccccaagtcgttgaagcccatgggggtggaccccagagctttgcaaggcatcgtgcttaaccacgacatcacgctaacgaaggaccgtctaggcagatttacgctccatgttccctaccgtcgcgaaaaccaagcgccgaaggaacacgagacatggtgtgccatcgaccccggcgtccgcacgtttgccaccgtattcagtccagcagacgcctgcaagattggcgatggagccgcgacgagactggccaagttgtgcgcacacctcgacaagctgatatcggacacgaccaaagcctcgggcctccaaaggagacggaggatgaagaaggcacaagtgcgtgtgcggaatcgcatcgtacacttggtggacgaactccattggcaggcggcttcgtttctgtgcaagcactacacggacatcctactgccagtgttcgaaagccagaagatggcttgccggctgtcgaggaagatcggttcgaagacggcgcgctccatgctgacgctgagtcactataagttccggatgcgcttgatccacaaagcaagggagcatgggtgccgcgtgcacctttgcacggaagagtacacgtccaagacctgcacccgttgcggcgcgttgaagcacaatctgggaggtgccaaagtgtacaggtgctcttcgtgtatgctacgaatcgaccgcgacattgcaggtgggcgcaacatcttcctaaaaaacgcggtagctcttgattgagctgcctttgcctcgttagagcctcgtccaatgtgacgtgcagaagactccccctcatgagctgtggccatcgagtcctgtggcaacgcaggaagctgtgaaagcagtaatgactgacgggcgagcccagactttatgttgaagtctgtgagttcttgagttttaatctagcggtaacttgcgacatgacaccacgtcgagctgcttgctcaacgttttgcagcggtttggggcggtttacagtgtgcacatggcctttgcccctactcccagcacttatgacggcatgcgacaccaatgggcgatcgtgaaatttgtggatgccactgccgcccacgatgccatagcatgcctgaacggccaggtgctggacagcttgtgctgcatcccgctcaaagtggcccgttatgtaaggaaagcctagcacaacaggcggtacagagcccgtagaagtggccacaaaagcagctcagacatcttttccgcacttattcaatgaaagacgtggctctgatccaaaccttcggtggtgaggcgtactgcatcgagtgcagctcccgcatggtgccggtggcggatttgacggtggaggaaatcgaggcgctgaagaggctccacggaattgacggagcagatggggccgaggacgaccttgacacgtacaaggcgttggaagctcggctcgggaaacctgtcaggctcctggctgacgttgcccgtgacgtgcgcgttgttacgtgccaaacgtactacgtgtgacgtactacgtgtaacattcaatgtactatgtgtaacattcacggaccacggaccagtcccttgattttgttggttaagttgctgggcagcctcagcttggtggccagctggcgacgctgaacagcccagagctgctcgcacatgtggaaagccaggtgaccgagcaatttcgccttggagcgttcagcccgccagtcgtctacaagcccgtcgtcgtcgttgctgttgctactgttgttgctgtttcggttgcggaagtagttgcggtttgtgttttggggttcaacaatggcgtcgagcacgtcgtcgattgcaccctgggactgcctgtcgacacccgagtacgcgcccctcaagtcttgcaggctcttgcgattttcgtgtggagactgagggcgcatcatctcgttgattgcgaacaccgcctgcgcgtatgccttgaaaggtcccttgggcttgttcagttcctggcctgcgtacctggaaaacccaccccagaatagtccgccggtgacgtatcccaagagtgtctcgtaccaatgtagatcgccgttcaggtatgccttttccaccgtgagcccccgtgccttgagggctgacacgcgcttgcacaagtcttgcaaccataggatgcggtgcacctgcgtgtagttcttggggactttcaacgcggccctggtcaccggcttgcctgtcgcgggattgacaaagtaatgcgcggcattgaggtggcgtagtnnnnnnnnnnnnnnnnnnnnnnnnnaaacccaccccagaatagtccgccggtgacgtatcccaagagtgtctcgtaccaatgtagatcgccgttcaggtatgccttttccaccgtgagcccccgtgccttgagggctgacatgcgcttgcacaagtcttgcaaccataggatgcggtgcacctgcgtgtagttcttggggactttcaacgcggccctggtcaccggcttgcctgtcgcgggattgacaaagtaatgcgcggcattgaggtggcgtagttgccacgcgttggcctttgatggctcacgtttgtgcaggttgccacccggagccacgcgaagccgttggaactcggcctgtgtcaggttcatggagtgagtgacccttgtgcccttcttggctccggcaacggtccacgtgtaccttactttgccacttgggacggtgttgggggctgtcagcctggttttcttccgcttggggggcattggcttaagtttgcgtaagccacatttgaccgagccacatttgtgagtttacacacacacgtctgttacacacacacgacattcggatacacacgacatcattgattggtgaaagaactcgggcaaggccgtgatgatgtagcggcgttcattgtgcggccgctttggtgcatcatctgaatgtgttgacgctatgctcagtgggctgattgtcaaggagccttgaatcttcagctcacacttcaaagctgtgtgagtgcagcccagggagcaatgtgtctgctcaccatcacaaccgaaagcttgggcccccttgcaagcacagcacgcgcaccttgcgctggtacggcgggatgaggatgagagcaaattaccctcgattccaccttcatttattcaagctcccgcgcgtcctcacaaactcgtcggtttgcccttttcccgcgccgccgttcgaaaagcgaagtgtgatggccgccaagtttgccctcctcgcgctgttggcgctggcaccatgctgtctggcccatacgtgagcccatgcgggcgttgcttgacctgtgctgcgctgatacgcgatgctgtgatgctgggtaccaggcaccttatcgaaaccactgccgccgctccctccttttctcctccctgctgcagctacttcaaggctgatctgatgccccatggagaccaggcaccaggtaggcaagcaaagcggcctggacagcggcagtgaatgagttgtacctgcactacaccctcgcgatgccgtcaccagtttgctgtcatgccgtgcgtccatccccccttgcagatgccccagacgcagctgcggtgttggactttttcgtgcaccagggcgaggccatgtggaccctcaacattacaggcgtggaaggcatgtctgccgctaagattgtgtacggcgacccagacgtctatggcgaggatggtgagggcaactgctctttccttgttgctctctcctttcttgccgctacccttcttgtctggaggccttctacctccaatgccctgccagtcgtccagcgggactcttagcccagcctggctgttgggttcttctctggtcagccatactgacttgacgtccaccccgcccgtggctcctgctgctgcttgcagtggtaacctacctgtcccaggatgagcccgtggacgtggctgagcccaccgtcttcgagggcatgttcaatgccaccgattttttgccccagtatccttggaccatggacgggctaatggccaatggcggcctcgagcatttgtgggcagtcgtcgtcagcaacgccagctaccagaacatcctgctgtctggcccggtgctgaactatgtgccagagggagaaagctagggccgacctcccgctttcatttggctggcgcgctgttgtgaaaacaatatgctgccagcgtcacattcctgtctggctttagcctctcggggatccaggttcctgtcaccaaactgtaatgcacaacaaacaacgcgcaaaacaacacggcctatttgcgggcacgaaccttgatgccgcacggcacaagagatgattcttgaccatcgcaaggtactttaacgtgatgtacttcaacgttttcagcacggtgcgatgtcgcggtgaatgtgagcctgtcaaggacctggcgctctattcagacctcaagttatgcgtggaataccaccagagccttccaacgaagtccgcgattttacgggctgtcttcaccgcaactcgaaccgctgcaatcgcatgatgctgggttgcaagcgcatgtgctatacaagtgccgccgctgctgcccctgccgccgccgcatgtgccgctgcgtctgttaattcacacttgctcacgaccgttgctgctgctggcctgtgtgtgcagatggcggcgttggaggtcagtggtggcaaagtgctcgtgtgcaggctgccgcccctgttcatggcacagcggctggccggtatcagtgacgcggcagctgcctacgccgccacacagtttgccttgttttctcatgcggagctggagccacaccttgaccacacggtcgtctgtgacccccccgccgcctctgtggacgacgtgtgggctcaagtgcggcacgacggcgacctggtgccattcttgatggtgtgcggcagtagcgacgatatgtatgtgcgtgcagacactcaccacaccctcttgttcgtgacccgtgagccttgactgtcatatcttgttacacacaccacagcgtcaaatttcaatggccttgaagcaacggcagaggtctttgcaggagcgatggccgtagctgtcttgcacggactgatttgtttgcttgctgtagtgctttggcggcagccgggggtgtgctaggcgcgggctggggggaaacatgcgacggcatctaattgagctggcgcccacagcaggggctggggtgcgtggctgtggggtgcatgccgggttttatgccatctgtgcatacgtgcagcagcctggagccagcctgaggcgtgttgcaggccggggctggcatgacacccaacgataaagtgctgttgcataacagccatgcagcagggcacccttttccaggtgtattcactgtcgtgactgaacaacaccgcgttgacttgcgcgcttacgcatttggcactcgtcagcatctctgggctctagtttaccgcatgtaatatggccaaagcaagtgaggctgggttcaaagtgccaagtcattcactgacacatcacggtacccaaggcgggcgtcacgcaggccattggaccagaacactttgagaattgccaaaagctttgccttgttgggtatgctgaccaggtcgttctccgagaagtgtgggtctctcttcagttcaccagtgttgaaaagggattccagcaccttgcgaatgacgcctttgggggccatcacgctgcctacgctgttcaccaatgtgtccaacgtcacaggctgtccagtccgagccagcctgtcaactactcgctccaagagacgcacgtagaggccgctgcatcaggcaggaaaggcagctgctcggcacggcataggtagaacaaggcgctcctgtcgcaacagctcttcctcaacgaccagcaacaaatttatagcttgccttttcttttcgtaagccatggcgagcctctcaaagatgtttcgagcagcttgcgacaaccctgggtcctgcaaagcctgattgatctcctcataggtaggcgcctcggagctcatgctgctgatcctgcacggcaaataaagggtggtgaatggacgagcgagcagcggcggtggctacaaggcagcagggcgacggcagcagtggcggccgccatggggaacagcggcgggcagcagcatctcacaacggcgacacacgtaggcttccagtgctgcaagctcacctgtgcagcaggcagcctgtgatcagcagcggcggcgatcagcggcacaggcccagtcgccggacaggggtggcgtaccccaggactcttctggaactttagatgatgagcgcgggcactccgcgtgaaacccggacagcgcagactggtgcgaaccctgccgtactgtacctctcgaagctctgcgttcccgtggcttgctgcgtttagcaattgcgcagtcagagcaataaagtaatcagcaaccgcccaccacccccgactgcgtcaagcagcctactccgcgaggggtctatcaaatggtctggggctttgcaaggagaaaacgtgtatccggttgtttagggtgcgagggaacagtacttccattcttatcttatgcagctctttctcccctctgctaatatgcagcagtttgtacatttcctcgactgtgtaccgccaccgggggtccgacaacctgtcagctcttgtgccacagaatgttacaataaagttgctcgggtacaatcaccggccagaatgaacctcccaattctagccaagtaagcaacggcggcaggggcctggtgcagcctgttagggtaggctgccgttcgttgctccaatcaactcaatcctcaagcagattgggacaacgaagtggcgtgcacccctgccatcttgacctcatcgagacgctgttgcatgcgacggtgatacacagcaaaagccaagctaccaagcaagactacgccagccacacatcccacaacaacaccggcaattgctccgtcactgagactgctgccgcctgagcttgtggcacagctggtgttgttgatattggccagtgccttggaggcagtgtgcagttggcatgcagtgtagctgtcattctcgcaggcgtcgcaccattcgccgatattactcatcgatttgggctccacaaaagctctgaatgcttccaggctgcacgctcccggaccagcaaggatctctgcaccgtctgatgcacagggcagaggaatggtcgtgtagtttgcagacgggccatcctgcaacagtgcaggtgcatgagtgctcaggcagtattacaccagtgaagcacatgaacacggggcacaccactggtaggcttccttaatttcaagacacacctgcattaccaaacgaaccgcaagctcttgagggcgctgtgaagattcgccgccatgcagctcaaacgccattatggcagccaacgaagggattttcctgcattatccacaattcactgtgggcagtgatgtaggcagccccatcaccactcacaggggaacatacttgaaccatgtcaggtttgcatcgtcgagatactgatccaactccattgcccccagcatgccaagttgggtgttgtaatgggcagacacgtggacggtcttgtagtacaaaggaccaatcacattgcttgtgatagctgtcacagcagaatctaaatagttcaacaggtcaccaatcatgattccagacagcaggttctcggtcagattggaccgcatcttactcgtctctagccaatatcccagctgcaagagagggtggggctcacgttgatccctgaactccggactcacaaaactgcccaatatgcaggtttcttacctgctgcatctcagcaaaggttgcgttgtcgatgggaggcatgggcgtgcccacattgaacgtccggtacacgttgaagcctgttccagtgaataatatcactcttaacactttcatattgttgtgcatgcaaagaagtccaactcaccatcatatacgttccaccagttttgcaaagaggtgtccaagcccgaggcctgagccaatatgctgtttcggaaagcttctgtctcctgctccttctgtacaaactccggtgaatcataccactccaacaagcgagcatcgtatacgggacaggccgtgtaaccacggatgagggcgttcccatcttctggatagctgtacacaggaaccacctgtgtgcacgatgcaccttgaaaaattcattagactcgtgggaatatatgccatcagcaccgcctgtgtgcggcgtgcttgcctgttggccatcaggcaggtagcgcgtcgccgtgggcgcattgatgggaaggaacacagcatccaggaacgagcgtgcggtcatgatcgcacggtctagagccgacgagcgaatcaatgtgttgaaattattgaaggagccatttgccgtgccaacaacgccataccttggccctgaattggtttgggacaaaccgtcaaagaaataaaagattgcaacatacgaaatcggcgtccaccttctgaggtaacagtggtatcgaggcaggctcaccttctggggtaacagtggcatcgaggcaggttgcatcggcagaggtgcatgcagtggtgttcaagtaccgcaatcggtaacctgcgcccacattgtaggcctggagctggccctctggcagaagagtggggcccccagcggcatccgtctcctgcaagtagcacttgggcaacaactggggtgcaaacccccaagcctagagcatgttcttgcaacggaaatttaccttcaaagtgtccgttttgggcagaacgttgcgagctccgtggcgctgcacgctatacaccattagcacctctgcttcaacagcgagggccaggcccaggaaggtgacaatactggcagtgcgcattgtagcgagagagccactccacgtttctctaagctgcggttgtgcactcagcagctaggtggggtccgtatccgacccagaacgcgaggataaggcattctggcatatgtactgtcgttgtcccgcccgagcgcactcgacacccatggcccgcgcaccgtggcctgtcgggctgcagcacgcacgcgactttcagtatgcccttgatcattttgtgtgttatgaaaacatgcctggtctattcgagtggatgcggctgttgccaccacgaaccgagttgttgtaatgtctcaggcacgtgatggcttcgatcgcatccaccaccgcacacactttggccgtttcgccaaccgccacacccgtcgaccaatgtgggcacaaaggacaaaggcgcgtcacagcgtggccctgaagtaacggaggaagtctttgcaggtttgctggcgatgagatttccagtcggcgtgttggcacttgggagaacagtataacgcaacataacagccagtgcacatgtgcaacgtcggttcaccttcggaagggcaacctgtgaagttgcagcgaggttcaatgctgatgtaaagctgccgcgcccggcacgccttgtactcagcccgggtgttgaaggcgctggccacaatctggaggacggcccctgtctgcttcgacagcaccaccatgatggcgtagtttgtgctggggccgttgccgctgtcgccgttgtcgctgttgccgttgtcgctgccggtgccgtcgccgccgccgctgtcgcctcttatgcctccgaagcagaagcgcacgtcgtgttgcgagggatctgaagcgagatattctgccactgcatcgcacacaacatccacggtcaagagggctttctgcgcgggtgtggaagtgcacagttctactgtgccatgcagcaactcgcgattgacaacatggaccactgatgtctgtgtgaaagtcattgcgaacagatcaggcacacgatgactccctattgtcaatcgcgtacctcttgtactgggtcgaaacaacagggtgactcagcgcatcggttgccaccgcaaagctgtcgtgcttgtagttcacgtgcctggcaaacacggtaagcatggatgcattatgttgaagcgaggccttgctgcattctcgcgcggagcacgcacaccacgcggagaacacacacacagacacacacacgcatggccccgttgtttgctgcaggctattcaaccatggccgccgccaccgccgccgccaccgctgccgccttcagcgtcctgcccgctgaggtgctggtctgtgtcgcacagaagctgccagtcctcgagaggcgtcacctccctgctgtctgccagcgtctcagggccctgtctcggtctgggcgcttctggtctcacggcgatgactcgtcagtgcggctggtgtacagttctaccgaccgcttgaaggtgctggtgaagttcctcagctccttggagggccccatcacatggcgcagtctggacctggaaataaaatgctgtgtgagtgggttttgggcagcttgggcacagcctgcgccgctgctggggacagcctgcgccgctgctggggaccttagtctgccgtcgacagcgtctcgccccattgactgcaggtacctgacctggacgactacctcttgagcctgggtgtgtcgctgccctggctgaccagtttccaggttgatggcgtttgccctggcgattcgacccctggtggtctcgccgtctcaccctggctgtcgtcttttgtcaagctgactcgcctttccatcacaagggttcctgttctcttccaaggccgcttcccccttgctgcgactgcacgcctgacggagttgacgttatgtcgcaccggcgtgtgccgca

SEQ ID NO: 20 - DNA, 21782 bp, Chlorella sp.
  source 1..21782: mol_type = other DNA
  variation 721..2891: note = n is any nucleotide
ctgtagattggacgtgccagatacggcaagtgtggtcaagtttgcagaagtcccacgtatcgttcccagcgttgcgctgccaaatgccgcggtgtcagacgagatgtcgcctgcccgcacggcgtcgcattcgagccggctctggtgtgcggtgtacgcgtaccatgacatgacttgatcaggcacaacagaataaatccacaactgagccagacaatagcacgcgcgggtcaggttgatgtgaacagcgcacgggcctccttggtgtcaaggcaccaatcgaccatgcgactagggtgccaggtcctcgccatgagctcctccttgtacgccatggtccgctggacgcagctcaagcttccgaacccttgtacaggtcctggtgtggaggggccttgcgcctgacaaccctggccacgccttgaacgatccagtcctcacacccgtttagaacgtcatccgtgtaggccttgtcatcggtgtattggaacgtccgccacacgctgctgacggggtcgtctattatgacgtacatcactccgtggtacatagcgttagacatcacatgctgccgcacctccagctggaacaccacgccgtcaggtctcactgctgatatcgccagggttgcattaatgacgtcagggtcccacaccgtggccaagaactcgcgcacggtcgcgcggaggtccaaccgcgtagcacgcagcacggcctcgtnnnnnnnnnnnnnnnnnnnnnnnnnnnnnnnnnnnnnnnnnnnnnnnnnnnnnnnnnnnnnnnnnnnnnnnnnnnnnnnnnnnnnnnnnnnnnnnnnnnnnnnnnnnnnnnnnnnnnnnnnnnnnnnnnnnnnnnnnnnnnnnnnnnnnnnnnnnnnnnnnnnnnnnnnnnnnnnnnnnnnnnnnnnnnnnnnnnnnnnnnnnnnnnnnnnnnnnnnnnnnnnnnnnnnnnnnnnnnnnnnnnnnnnnnnnnnnnnnnnnnnnnnnnnnnnnnnnnnnnnnnnnnnnnnnnnnnnnnnnnnnnnnnnnnnnnnnnnnnnnnnnnnnnnnnnnnnnnnnnnnnnnnnnnnnnnnnnnnnnnnnnnnnnnnnnnnnnnnnnnnnnnnnnnnnnnnnnnnnnnnnnnnnnnnnnnnnnnnnnnnnnnnnnnnnnnnnnnnnnnnnnnnnnnnnnnnnnnnnnnnnnnnnnnnnnnnnnnnnnnnnnnnnnnnnnnnnnnnnnnnnnnnnnnnnnnnnnnnnnnnnnnnnnnnnnnnnnnnnnnnnnnnnnnnnnnnnnnnnnnnnnnnnnnnnnnnnnnnnnnnnnnnnnnnnnnnnnnnnnnnnnnnnnnnnnnnnnnnnnnnnnnnnnnnnnnnnnnnnnnnnnnnnnnnnnnnnnnnnnnnnnnnnnnnnnnnnnnnnnnnnnnnnnnnnnnnnnnnnnnnnnnnnnnnnnnnnnnnnnnnnnnnnnnnnnnnnnnnnnnnnnnnnnnnnnnnnnnnnnnnnnnnnnnnnnnnnnnnnnnnnnnnnnnnnnnnnnnnnnnnnnnnnnnnnnnnnnnnnnnnnnnnnnnnnnnnnnnnnnnnnnnnnnnnnnnnnnnnnnnnnnnnnnnnnnnnnnnnnnnnnnnnnnnnnnnnnnnnnnnnnnnnnnnnnnnnnnnnnnnnnnnnnnnnnnnnnnnnnnnnnnnnnnnnnnnnnnnnnnnnnnnnnnnnnnnnnnnnnnnnnnnnnnnnnnnnnnnnnnnnnnnnnnnnnnnnnnnnnnnnnnnnnnnnnnnnnnnnnnnnnnnnnnnnnnnnnnnnnnnnnnnnnnnnnnnnnnnnnnnnnnnnnnnnnnnnnnnnnnnnnnnnnnnnnnnnnnnnnnnnnnnnnnnnnnnnnnnnnnnnnnnnnnnnnnnnnnnnnnnnnnnnnnnnnnnnnnnnnnnnnnnnnnnnnnnnnnnnnnnnnnnnnnnnnnnnnnnnnnnnnnnnnnnnnnnnnnnnnnnnnnnnnnnnnnnnnnnnnnnnnnnnnnnnnnnnnnnnnnnnnnnnnnnnnnnnnnnnnnnnnnnnnnnnnnnnnnnnnnnnnnnnnnnnnnnnnnnnnnnnnnnnnnnnnnnnnnnnnnnnnnnnnnnnnnnnnnnnnnnnnnnnnnnnnnnnnnnnnnnnnnnnnnnnnnnnnnnnnnnnnnnnnnnnnnnnnnnnnnnnnnnnnnnnnnnnnnnnnnnnnnnnnnnnnnnnnnnnnnnnnnnnnnnnnnnnnnnnnnnnnnnnnnnnnnnnnnnnnnnnnnnnnnnnnnnnnnnnnnnnnnnnnnnnnnnnnnnnnnnnnnnnnnnnnnnnnnnnnnnnnnnnnnnnnnnnnnnnnnnnnnnnnnnnnnnnnnnnnnnnnnnnnnnnnnnnnnnnnnnnnnnnnnnnnnnnnnnnnnnnnnnnnnnnnnnnnnnnnnnnnnnnnnnnnnnnnnnnnnnnnnnnnnnnnnnnnnnnnnnnnnnnnnnnnnnnnnnnnnnnnnnnnnnnnnnnnnnnnnnnnnnnnnnnnnnnnnnnnnnnnnnnnnnnnnnnnnnnnnnnnnnnnnnnnnnnnnnnnnnnnnnnnnnnnnnnnnnnnnnnnnnnnnnnnnnnnnnnnnnnnnnnnnnnnnnnnnnnnnnnnnnnnnnnnnnnnnnnnnnnnnnnnnnnnnnnnnnnnnnnnnnnnnnnnnnnnnnnnnnnnnnnnnnnnnnnnnnnnnnnnnnnnnnnnnnnnnnnnnnnnnnnnnnnnnnnnnnnnnnnnnnnnnnnnnnnnnnnnnnnnnnnnnnnnnnnnnnnnnnnnnnnnnnnnnnnnnnnnnnnnnnnnnnnnnnnnnnnnnnnnnnnnnnnnnnnnnnnnnnnnnnnnnnnnnnnnnnnnnnnnnnnnnnnnnnnnnnnnnnnnnnnnnnnnnnnnnnnnnnnnnnnnnnnnngacggcgtccagtgctcggtgtctccgtgaacaagcccccgcggggtccacgccacaccgtaaggcccgtgactgggtccttcatgttggtgttttgcttatgtttcataacgtcaggccagaaaattaatcagtcagagcggtttgttggccgtttccaagagcacaagcctcctcgatatcaaggcaccaatcgaccatacggctggggtgccaggtccttgccatgagctcctccttgtacaccctggtctgcttgacgcagcacgacgcttgcgaacccttgtacaggacgtcgctcggggggggcttgcgcctgacagatctggttacgctatgaacgatccagtcctcacagccgttcagagcgtcatccgtgtaggccttgtcattggtgtaggaactcccggcttctaccatcacgctcgtcactccgtcgtgcagccatgtggacaccacgtagtgccgcacctccagcaagaacaaagcgccgccgggtctcctggccagtatttccaaggaagcaaacgtcacgtccggttcccacaccgtggccaagaactcgcgtacggtcgcgcggaggtccaaccgcgttgcacgcaccacggcctcgtcatcgtccatctgatctacaagacctgggtgagcaccctatgtggtcttcttttcaattgtgagtgcggggaaggctcgaagggcccactgatgtacaacccattacgcacaagcacacgtgtcacgtaagtgcttctaccgtaattatctcacccaagtccgccgctgacaccgctgcgatcgcacgtgcacctttggatgctcgatcggctcgagtacacgatcgacaagggcgagtggaagtacaggccgtcgtcgttcgagtacctggcgcgcatgccggtgctggggttcgcgggcgaggacctctactcctctgacgtgctagtgtacggggcacgcaaacgtctcgaggtctggtaccgggggctccaaacagtggcgcacttgtgcatgccggatcatgccaccatggaaggagccagggtgagcttctcgcacgcgcatctcccccaccgctgcaagcgggacgtctgcaacgcggcccgtgctgcccgccggaacgacgttcgggcctacgagcgggccgcggcgcgcttcgatttcggccagcacaatatgtgggcagtgcgcctgtgcctcgtgtccgcactggacatggacgctattgacgtcgcggcgcacatcctgcggcacagtggcttgacaaaggcagacttcctggcggccggagaagacgcgttccatcgtgacagggacgggacccagggctgggtggaggtgcggccccagggcccccctggaacgttacagtgggcaacgtggacgcacgcagtggtcgtcgaggcgttcgggatcaccgcggacgacgtggaggacgttgtgcgcgaggaaactcgggaccgccacggcgagccgtacatgctctgttggatccccagcgggtgcctcaaacgcaagccccgcatatgaattttggtagctgctattgtaacttcgttcggctgtaccccgggcccggagacgtgcacgcgtttaaacgatacttcaaaggcaaaggcaatcacatgtcgcgtgtgacagacgacataatactggcatccttccaagaatcgtacgatccagaggtcctgcggggttgcacccacatcctgaacgttgcggaggagttgaacgtgtcgggtcgcgtggacagggagtacgcgaagcacggcgttccggacgattgcagcgacacggacatcacgtgcatcctgggcccttgcattcaattcatcgcagacgcccacgccgcgggaggcatcgtcttggtgcactgcctggaaggggtcagcaggtcggtgtgcgtggtcctggcatacctgtgcgtgtctcgtggcatggcgttccacgatgcctacgcccgtgtgcgtgacgtgcgcccacacgtcgatgtgtttccacagtacgaatccgacacgaggcgctgggtggcttcgaagtgcaatggcgagtagagatctgtgttgctcgttattgttacatcagtccaatggtaatgttttcacaacagttgtcacggcaactagctgttgccctacgtccccaagacggcgcaaatgctcctccaacatgcgcttgaggacgctcaaatcttccatcatgccgctgcggcgcacgtgtgcgtattcatccaggtcttcgtgatatctcagataccgccccaagtccttaacagtgcgagcaaacatctccagcttttctgcttgatacaggagctcgtggcccgccattgccagcgtgtgcactgactccttcggcagagtcattctcaaagaatgaacaacaccgcgcgacctggcttttatacctggcttgtgtaccttgccacgctgagtccacgttggcacgccagcactacgcaccgcgacgcgtggctcgaggcgtcgaggaaaggacctcgtttttgaataccttcagccagttcagatgttgcttccgctgttcttccagaatttgcgattggaactctttgttgttgttggcgtgcatctctgcaatgtctgcggcgctgattctatcgcccttgcgagttttgtaccggggagatttcagctcacgtagcagctcataagcacgctgctggaaatttgcgttgtcttgtggcccgcagtatgttgcaatgtactctatatggcccaggttttgagcgagccgtttggacacaaacttgctcaatggcgtgtagaccgttcctgtttccgaggtctcaatgatgtgccgcttagccagttgcagattttgcagtctgggtgggccgccggatccgtgcatgttccggaagatggagcatgcaccgtcttcgggtggacatgccacgacaaggagtgccatccgctcgttgtcgtggtagcagtccatcatcacttcgacttctgcttggcttcctgaagggagaactttcgtcttcacaggcttggtggtggtggccgactcgtcgacagtggcaggtgctgccttggccacagcattctcgacgtcgccgcctcctgaaaccagctcagagcgcgacgtgatcccaacatcaccgcatctcttctcttggtgtctcttcacgtgagactcgtggaagctcgtgtatgcacagttggcacattggtggacggtcgcgcgaaccacatagggtttgagactcatgatcttgaatggtggaggtgcctttaaacctgcagctgaccggctgtatatacggaagacgtattggacgggtgcgaagactggaacgttctctgtatagacagggcgtttgagcgcatcccagacatgctgcactcgggtaaagaggtgctgcttgccgtggacaacacgcatacgtacaaggaagagctcatggcaaaggcctggcaccccagccggatggtcgattggtgcctggacaccgaagaagcggcagtgtttcgaaataaaagtctcgaagtcgtgtaatgagacccgaatcatactaccgcgatgccatcaactctggaaaactggataagatgtcagagaagaaacgggatgagttcctgacggcgatgatgaaggacagcatgatttccgccgacgaacggttccggcagcgatccccggtattgcacgccttcaggccgttgctgacccgcgtcgccgatgagaccggattctcggatgcgctgttcagggccagcaagtaacttaaccgaccgatcgattccctccgaatcaaagagatccggtgcacccccagtcgggaatgtgccttgacacgcgcaagggtgctctgggcttcggatgtgtgcaaataattatggctagaagtgcttacgtgacacacacaagggtgcatcgggcttcgtgcgggttagtactccaaagggctcccgtgcgtgtctatggacctgtaattatttgcaccctagtgttcacccttttggtggtgacctgcggacgaaaataattatgaaaatccttttgctgggaacaagttgcgctcaaaccgagagacccggatcgcgttcccacagcaacaaccataagccgtaattattttcgtccgcaggtcaccaccaaaagggtgaacacttgggtgcgaataattatggctagaagcacgtacgtgacacgcgcaagggttgtgttgggctttgggtgctgtagctgtaaaacacgtacccgtatcttctggaattcttcataactatccgcgccttagtgttcacccttttgatggtcacctgcggacgaaaataattatgaaaattcttttactgggaacaagttgcgctcaaaccgagagacccggatcgcgttcccacagcaacaaccataagccgtaattattttcgtccgcaggtcaccaccaaaagggtgaacacttgggtgcgaataattatggctagaagcacgtacgtgacacgcgcaagggttgtgttgggctttgggtgctgtagctgtaaaacacgtacccgtatcttctggaattcttcataactatccgcgccttagtgttcacccttttgatggtcacctgcggacgaaaataattatgaaaattcttttactgggaacaagttgcgctcaaaccgagagacccggatcgcgttcccacagcaacaaccataagccgtaattattttcgtccgcaggtcaccaccaaaagggtgaacacttgggtgcgaataattatggctagaagcacgtacgtgacacgcgcaagggttgtgttgggctttgggtgctgtagctgtaaaacacgtacccgtatcttctggaattcttcataactatccgcgccttagtgttcacccttttgatggtcacctgcggacgaaaataattatgaaaattcttttactgggaacaagttgcgctcaaaccgagagacccggatcgcgttcccacagcaacaaccataagccgtaattattttcgtccgcaggtcaccaccaaaagggtgaacacttgggtgcgaataattatggctagaagcacgtacgtgacacgcgcaagggttgtgttgggctttgggtgctgtagctgtaaaacacgtacccgtatcttctggaattcttcataactatccgcgccttagtgttcacccttttgatggtcacctgcggacgaaaataattatgaaaattcttttactgggaacaagttgcgctcaaaccgagagacccggatcgcgttcccacagcaacaaccataagccgtaattattttcgtccgcaggtcaccaccaaaagggtgaacacttgggtgcgaataattatggctagaagcacgtacgtgacacgcgcaagggttgtgttgggctttgggtgctgtagctgtaaaacacgtacccgtatcttctggaattcttcataactatccgcgccttagtgttcacccttttgatggtcacctgcggacgaaaataattatgaaaattcttttactgggaacaagttgcgctcaaaccgagagacccggatcgcgttcccacagcaacaaccataagccgtaattattttcgtccgcaggtcaccaccaaaagggtgaacacttgggtgcgaataattatggctagaagcacgtacgtgacacgcgcaaggctgtatcgggccctgtacgtgtgagtacacgaaagcgctcccgtgcgcgctgctagcttcgtaactttgacgtagttaccgcaccggcttgatgggcgcagacgtcgcttagttcatggggtttaaaaggttctcacgtacgacctggtgtttgtcgatgccggtgaccttcgacagctcggtcgcggccaagtacccgtggggccccgctggcctgcccttctccggctggctgccacgggtcgccgacacccacactctgccggccggcaatctcgctcgcgtggacagtgcagcgcgtcataccggcccgttcaggatatggcgagggagcgcccatgtggaactggactggggggagcacacgtgtgtcaatttgctggagctgcggttcgccaacccccatgggctaccgctgcaccacattattcatcgcgtcgccctggagatcggcatcagctgcgtcgatacagtgtaccccggagaacagctcgactggctgctggagcaccacgcgcgcggcccggtcacaacctcgtgcgggaccacgcgggtcccgctgccgctcggtggcacccacgctgaggacctcctgccgttggtacggcaccacgtggccaagctgaaggtcgatgtggcagacgggcacagcctcgagcacgcgcacttggaggtatgggcgatgtgctacaccgagccgtttggcatgcccgtgccagcgctgaccggggatcacgggccgccggcgcccatcgagaacccgtggcgggcaggtatcgctggtgcagccacgacgggcgcgtcgacccgcatctccaccgtgcacaagaacgcgtggaagaaccccgcgccacccggcaagcgactccacgtggtgcgcttctgggcgcccgcgtcaatgaccatcgaatgcatggcagtgtggccggcagacgacgtcgcgctcctcacggtgttagcctcccccggggtcccgcaggaggttctggccacgtgggagcccgagccggctggattcgaggacccgcgcgtgcgggcagcagcgggatgtctgagaatgctaccgcccgagctggtgtcgcggatcgtaaggccgctgttcatgcgcccggagccccgtgccgtcatctcgttctccacgcccgtcaaccccaacacggcaaacctgctggtggagctgcagttgagagaaggcgtaccagcggacacgaacttcggctacgcgaccattggcctcaatgccatggtgtttggtgggggattgttcggcctgatgtacggtggctgaggcggggaaccacgggctccatgtgtgtgagcgtgtgtgtgtgtctgtgcgtgcgtgtgtgtgtgttacaggttcaggtgtcatatttgctccaaaaatggccctgctcggctgggactgtttgccggaatattccaaaaaactatgggtgtctatggtaattaacgcgttaaatctcgaactttaatatgtctaccctcaccacgacaatacacaccgtgcaatgctcatctcaggcaagaaggcggctgcacagctcggggtctgtctcgacaccctcagacgactcgcagacgacgggcagctcgcaagcatcaggctcccctccggacacaggcgctacgacatctcagacgtacttgccacaagcacacaccccggtgacaatgccagcctcaagcgaaaattctgctactgcagagtctccaggaaacaccaacagcacgacttgcagcggcaggtcgagtacatgcgcgaacgcttcccagaacacgagatcgtcacggacatcgcttcagggatcaacttcaagcgaaagggcctgcagaccattcttcgacacgcgatgctcggaaatgtccaagaggttgtggttgcctacagagaccgccttgcaagaatcgcgagtgacctcgtggaatggatcctcacaaacaacggagccaaactcgtggtgctgcatcaggcaatggacagccccgaaggagaccttgcagaggacctcatgtcaatcgtcaacgtcttttgctgtagggcaaacgggcgcagaaagtactcggaccaaagcaaagaagcctccaaaagaaggaaagaaaccccaggcgacacactcgcggaaagttcgcatcttcccttgccgtgaagacggagagaagctgacgcaatggatgggttgccatcgggtcgtatacaacagggctctggcgtttgcaaagaagactggtcaacggaattacgcggagatgggcaaacggttcgtggcgtccagaaacatcgaggagccgtggttgaagcaatgccctcaggtcatccggagttgcgccatacgtgacctcaaggccgccttcgacagcaactttgccaagcggaagatcaacccagaacacacatttgacgtcaagttcaaggccaagaaggacgacgtgaccgctgtgcgcatcgagcgagtgaacggtgcgttcaaggtgttggacgacggcaagcacgtctccttcttccccaagtcgttgaagcccatgggggtggagcccagagctttgcaaggcatcgaactgaaacatgacatcacgctaacgaaggaccgcctaggcagattcacactccatgttccctaccgtcgcgaaaaccaagcggcacaggaaccggacacgtggtgtgctattgaccctggcgtccgcacctttgccaccgtattcagtccagcagacgcctgcaagattggcgatggagccgcgacgagactggccaagctgtgcgcacacctcgacaagctgacttcggacacgaccaaagccttgggcctccaaaggagacggaggatgaagaaggcacaagtgcgcgtgcggaatcgcatcatacacttggtggacgaactccattggcaggcggcttcgtttctgtgcaagcactacacggacatcctactgccagtgttcgaaagccagaagatggcttgccggctgtcgaggaagatcggttcgaagacggcgcgctccatgctgacgctgagtcactataagttccgcatgcgcttgatccacaaagcaagggagcatgggtgtcgcgtgcacctttgcacggaagagtacacgtccaagacctgcacccgttgcggcgcgttgaagcacaatctgggaggtgccaaagtgtacaggtgccctgtgtgtatgcttcgtatcgaccgcgacattgcaggtgggcgcaacatcttcctgaaaaacgcggtagctcttgattgagctgcctttgcctcgttagagcctcgtccaatgtgacgtgcagaagactccccctcatgagctgtggccatcgattcctgtggcaacgcaggaagctgtgaaagcagtaatgactgacgggcgagcccagactttatgttgaagtctgtgagttcttgagttttaatctagcggcccagatgcagacgacaacactcccggcagggacggcaaacgtcttcaaaccgcccggaagcgaatgtatggccgctcggagctctccggatacttcttcggagaattcggtttccagcgattcccacagcttgcggtgctcgtcggtcacactcgcccacggcaccatcaacggctccggattgaaggccgcgtgcatttcggcggcccaatctcccgtggacacgtagagcaagtactcgcgaacgtgctcggcttcggcgatcgcccgtcgttggcgcttggcttcccgagcggcggccctctcgagcgctcgctcggcggcggcagcctggcatacttccgtgagagacaaagacatcgagagaaaaaaaagtgcccgaaccataagccgtaattattttcgggaggtgcgaataattacggcctacgtggcttagcacgcgcagcacgggcctacttgaacagtcggttctcccgttcttacactttgcaatgtctgagttcgcgttgcttgtagagcacagcacggaaaccgtgttttacctgataccacaggcgcagcttacggaccccgacaggtcgttgttgggcaggctgcacggcaccgatttggacaatgacgggcaaacggaggacaaacaagcctacgagcgtatgatgtggcgattcgtggactgtggtggcgacgtcatctacttgccccgcggtggaaccgtcacgctcgtatgtcagctctttgtaacaacttgacagctctttggaacaacttgacagctctttggaacaacttgacacatggacacaattcagtgatgcgtgtggctcgtctcgctaccggcaaggcttgctgtctctgaggtgtcagtcacgtcagtctcgtccgtggtctcacgagtcaaatcccgggtctccttggggacctcgtgtgcgcgatcgttgttctggtcttgccgcagcttgtacttgccagtgtccttgtcaaactcgtacttgccattgtcgtctcccagctcgtgcgtgatggtgcggccgtagtgcaacttgtagagccagcccagcgtggccccatcagccaggatcgtgaggaacaacccggacagcgctgcgtcgatgggcatggcaccgtaccaagagccatacttcagctgcaagtttttcaagatcacgtacaatacgatgtacaggaacgcccccaccaggaatgtcctcgcgttgcgtttgccgtgcccaggttcctttgaagcaggcaggaacgagtgacacgcataccacagcatgtcttggctgttcacgtgacaaaaggaatccgtatttgacgcgtggtaattacatacagacaacacgtggatgcataccatgcggcagtgtcaatcggctggctaagtgatcccgttcaaacatggactccactgtggcactggccccgtacacctcgaggtccaacggtgtggttgtgcacagcatgggtgccgctccaaggtcgctgcgcagcttgatgagctccaaggcttgcgcattgatgcatttcagggcgggcaagggctgagccagcaacagatgagtctgcgttcgtatggtgccgagcttgcggatgactgtcagctcttccagcctgctcagggtgcccggccggtcgagcaccaccactccactgacccattcgcggtcttggtaatagcaagatcccagtaccagtctcttgaggcggggcgggtccacgtccaacagggccttgatgcggactggggcagccggggcagcctgaacggaccaagacaccgctcagaccaccactcatagcacaaccaggacagcccgtgttccaatgagcacaacgcaccttccgtctgttttggcaggtgccccagtacagcgcgcccagcacgagctcctcgagattgggcaatttcctcagcgcttcctcgaaccagccatcagcatggtaggattgcgtcgacacatccaggctggtcaacttgctgaagtccagccacggctgcttgcgctgacgccctatcatgcatctgaacaaggtgacggcggtcttggagcggcatacgtgcgcggcaacgactggctgcctggcccagtccttgcacaccaggcggtggtcggccgggcgggaggtcaggtccagcacgcgcgcctgtagctccgcgggcaaatcgttccatgtagcggtggatgcgcgcgcgactgacattgaaatgagcgaaatgtggctgcgcggagctcttgacatcgcgtgccagggtggcgtcctacgtggcatcatgactacagcaatcggaaattatgcctccctgccgccggcctcctcaccccccactcttgttgcccatgcgcaccccaggatgcctgcctgcctgcctctgagttccagcggatagtcaaggacctgtcttccattggggacaccggtgaggcagggaaggagggagggaggggtctcacagggctgctgggagagcaggggtggacgggaggcatgtggctgccagggtgtgcctgactggctgattgaggggctgaggggcatatgcgaggcgctggctgtgggagacgcatgtgacagcgcagatgcgggtgtgaccttgtggtcggctttgcggggctgggcaaactagagcctgcaataaacctatgtcaccccgcgatctattttgccatgcctgttgttgagctcaccggagttccccgcaccacgagtgttgaggacatgtgggctttgtgcgaaagcatcggggaagtgttgagcttggatttccatttcgaccgcgaaaacgggctcgctttggtgacatttgcgtctgattcggaggccttgactgttgctgacgtgaccgtaaattgcacacgttcgacgggtgacaggcttaaaggttttcacgtgcgttacatttacggttttcttctcgactacacaagcatggatgacgaccaagcaaagtatgtcgcatccaggaaggcagcaacttactacgactgcgacccaagaacactcgtcaattgggcggacaagggactcgtgccatttaggctcacaccggaaggacagcggaggtacgccatccccgtcaacgacgcaccccgcaaaaaagaggcggacaacacaaaagcaaagtactgctactgccgagtgtccacacagaagcaacgagccgacctcagcaggcagcaagacgccatgcgggcagaatacccaggccacaagctcgtctcggacatcggcagcggactcaacttcaaacgcccgggtctgcttgccattctggaatcggcaatgcgcggagaggtcgaagaaattgtggttgcccacagagacaggctcgcgcgtttctccatcgaactcttcgagtggattctacgaaagcacggagtcaggctcgtggttcaacacgcgtcgttggactcatcaccagaggcagaacttgtcgaggacctgctcgcagtggtcaccgtcttcgcctgcagaacccacggccgcagaagccataagaagcgcaaggcgggtgaggctgttcccgacaccacaagatgcgcaggtgctgaggcgctgggtggggtgctacagggcgctgtacaacacggcggtggctcactgcaccgagacgaagacatacaactacttcaaagtcaggccaacattgaccaacgacgcaactgtgccggcccacctcaagtgccttccggtcgccatgaggaagtacgcagtgaaggacgcgacacaggcgtttgtcacaaactttgccaagaagaggaagaactcggggcacagcttccaagtgaagttcaagaccaagaaacactcaaccaaggtcctcaagctggaggccgcaaagatgggcgtcaagatcgtggacggccggccaaggcttgtcgtgggagacgcaaggcaacaccagctagggcgtgaaggcatctccttcgaccgccggggagaggccctggtacgagacaccaaggacccggttcttcaaatcgacgaccttggccgcttctggctcatcaccgtgtgcacccgccagcccgagacccaagggcagcggacgcaaggtgtggtggccttggacccgggtgtgcgtacctttcagacgacctacagcccagatgggacgagctacaaacttggcgacaccgcgtccaaccgcgtgtacaggctgcttctcgtgcgtgacaagtacattggcttggcgcacatgagagggccatctcgccgtgttcggcggtcttacgggaaaaaggcagccaagatcatggcccgcatccaacacatagtggacgagctgcactggaagacggcccgattcttggcacaaggttggtccgagatcctgattcccgtgtttgggaccgctgccatgagcaagaagtaccaggcgtcgcgcgccaaacaccggtgcattggccgcaagacgacgcggcagatgttgcacctgcgccactacacgttccgccagcgcctccatcacgttgcgaagatgacgggcacgatcgtgcgcgaagttaccgaggagtacacgagcaagacgtgtggtaactgtggcgagatcaaggcggacctgggcggtgcaaagacgtaccggtgccaagagtgcggcgtgtgcttggatcgtgacggcaacggcgcccgcaacatattcatcaaaagcgtcctttaggggacttcggacggtacaccctctcttcggagtgctatacacccgggcaagagtcttttgacttggagcatgctccctttgttgcctgtttcttccatgggttacggatgaatgtggtgtttgaagtaccggcattggcttacgcaaagaatttaagtttgaccgagccacaatgttgtcatcatgagttcgtgaaagcactcgggcagggccgtgatgatgtagcggcgttcattgtacggccccggtggtgcacgcgaaatgaacgaagaggaaaacacgtctatcagcttgtcaagcatgtcaggaacgaggtgatctcgtatcggtacaaatcgatctcgtatcggtacaaatcgatcgtggttggttccccgtgcgtgcaccagcaagtgacccgggctgtgaatgacagcaaacaggcgttccagctcattcccagcaactttggccgcttgcacatccttcagccgtgctgcccgaaacctggcttcgactgcatccaggttctgcctgtaaccttcacgcagagcacggtccaattcagtgacgatcgcttcgacgagagctggatgggtcacctctgccgcggcgcccggtgttcctggcattgcgagcgcctcgacaaccagcgctgtgcccgttcccgctaatgttgccgtgaacacttgtaggtcgtcagtggcgcggccaaggaagttgaactcccccagggcgtggcgcatgctgacggtttgcggcggcggcgaggatgtgtgcatcctggaaaaacagaacgttcgggacatctgtctgaacgagcgaattgattccgaacccctgtttcagctacgcaaatgtgctgcggaaccctgcaatgccgtcagtgtgttgtactgtttgttgtactgcccacgaaggccacatttcgcatgctgagcctagcccgcgctgacaacttttcaagtatttccgcggccgcagtctctttgcaagccaacactcgtagcccgagggccgccaggcgccagtgcccagccccgtgccctacctcaatcggtatcatgaagccgcgtgtgaatgtgttttaggcagcacgtttgtctcgcgcgtgctgtagggctggttgctgactgaagagtacctgccgcaattgcgtgcaatacgaataacaactctgcacgcactctggccccgtttgtcccagggccacgccgcaaatcgcaaatcggacaaaatcggacaagtcgtcgccttgcgcgaatcgcttttcgcacctgcgttgcacaaccatggcgaccgctggccaggtaaacatcagagcactgatatcgcatgagagtgggtcatccaccaagtgactgaacctgctggcaacctgtttgtgacctcctccagatcgccaaggacagcagcagcgaaatcgatgtggtgcacagctcatccgagcttgtctccggcagcagtgactctccgtcgcaagacctggaacattcgtggtcatggcgccagtttgcgtccttttgcggttctggccttttgatggtcgctgcattcctggtgggcttcagatctatgatgcctgttatgtgcaggctgatgcatacagcgcgcctcttcctctggtttccgtcttcaatcacggtgctggtgtctcctctcacaggatcctggcaacctagaagctgatatccaagtaggcgctaagacaggttttgcacttctgtggtgggttgctcttgttacgcttatctgtggcagctcatttcagtgcctcagtggccgcttgggcctagtgacgggaaaggacttggcccgtcactgtggcgagcgctggccacgtgtcacctgctggttcttgtgggtaatgctggagctggccattgtggcagtggacatccaagagacaataggcagtgcccaagccctctttatgttgtccaacggacagttgcctctctgggcaggtactgtcgcgctaggtggactgcccttatgttgcggcctattagtgggatgattgtacctgagtgttgtatgtgcacctcccttttcatgcttctgggaagcgcacctgacgtgtagcctcacctacctctcccacgtatcatgtgtaggctgcattgttgtctctttctcagccttcattcttctgatgttggagcgctttggcacacgatggctggaagcgctttttggtagcattattgctctaatgggggtgtcaatggcagttaatttcttccgttctggtgtgccagcaaaagaggtggccctgggtgaggaagagaaattgtttacaggaagatgtgcatcagaatttgtatgctagatatgccgaacttgccgcaagtgcctaacagatgacctgattcatatgctgttgacgggttcactgccagcctgcttgctgacactgcaccttctccctgctgcaggcctattccgaccaacgctgccggcaggttctattggcccagctgttggcactttgggggccctggtgatgccgtacaacttgtttttccattctgctgtggttggtactcggtgcgaggcaaacgctcatttcaagtgagctacgctgctgcagagtttgcttgccaagccacgtgcctcttttctcctcgcaggcgtcccagcccaccatcccctggcagcatgcgtggtgtgctgcgctacctgcgtttggagacagttatcgtgctatttcttgccttcttgatcaatatgtgtgttatatgcgtgtttgcacaggggttctatggcactggtgcgtcggcatgctgtagctctgtttgcttccaagttgcaaaagtctgtgtcttccccattctgctcttccccataaatgctcagcgcccggatttgctgtagatcaagagattgggttgcaggcagcaggtgacctgctggccgacaagtttgggtcagaattcaaggtgttctgggcagtgggtctgctggcatccgggcaggcaagcaactgtgttccctgtgtagcacttcagttctgcggttcatgagcatgtcgttgcatagagaggtgcacgtcaggcattggtatgctgttgccccgggccatggctgaaccgctatgctgctaccttgctgtgtgcatttctaggtgtcgaccattgcattgacatacgctgggcaagttgtgatgagtggcctactgatgattgatgtgaagagctggctgcgcatgattggcacacgcctttttgctctggtgcctgcactgacaggtgcctgttcttctgctctagcttctacgcctgtcctcagcatgctatccccagttgcctttggctcatgcctcggtgcccagaaagatggcctactaaccctgctaagagcactccggctgtcccgcttcctttgtgcagttgcgctggttagccaaacaaacaatagctttgacaggctgaatcagatgctgaacgtggtgcaaagtgttctactgccttttgcaatcattccggtaaggtagcattgctcattgccttgatgctgtatttgaatgagcctgagcttgaacagccatgccgacatacgggtagctagctgttgcattgagatgcgcctctctctgggccatgccttgctcgcagctcatccacatggctggcaaccgggcagtgatgggcccaccgggtgcgtttgccacagcccgctggctcaatgtattttgctccgtggtggctgtggcacttgctgccatcaatggctatttcctggtgacttttcgacaagaaaatttgccagacggcactggtaagcttcgtgtgtaaagcgattgtttatctgtgatgataatgatataagcccagcatgcttgttgttttgttgtgcctgatcatgcttgctcggtggttccttgcctgtgcaagcaagcaacaatgtgcttgtagttaggcagcagtgaagtgcacagagttcgtgttagggtcgcgctgctgatgctcctaaacctgtggctgttttcaggtgtcatggtgggctggggcttcctgatggctgcttactactgtgccatggcgtgcattgcgattggtccagaacgactggatttatgggtaacaccccacttgcaccgtgcgcgaggctcagtaacaaaggcaagcagttcggccgttcgcgcagctggtggcatggcagagtgggtcaagggaatcaactggcgtgaccctgagagcctagtggaggtacacatctaagcttccagtattattgattactatcaatgcaccatggcaactggccttgctgggaagctgctcatttccacaccctatctttttttttttgagcacacaacaagctcacacatcatctctgtcccagcagctgatccagttccctcatgtacaactgcactgtttgtcttgttgcttttctgcatggagttagagcttgtctatcactctctgaacttttgatccagcaattcgtgccttaagttgcaagaaagcatcagaaatgtgatcgtcagagcagtcagcgtgccaagtttgtgacgatattgccatgcggatgggtgggttggtgacaagcacatgtacacatgcggaggcaaacatgcctctccagcagcaacagacatcactagtcagaacctctgctctgtgctgtgccatgactgaggctgccgttagtttctcgctacatacacctgcccacatgcagttgccgtgtgcaatttcagcagtgttggatgtagtacctggctttacaacaacagggtcgcaaggcacaatcaatcagcagcaaatacctatcgtgcaaaggtcagttacaatcaccccactggtaggccgcgtcagcagacctggggcaggaggcaaacagcaggtgcttataagctaaaatggcaaatggatgatgcagtgtttacgcatgtgtcagcaaaaggtgactagtactcacaaagggatgatgcgaggggtggtgcacagatacaaaattgacatctggtgcaacggctttgggaacagccataagggttgctgtgcacgataaacaacatggcatgcacgttaggtgcagggtgtgagcatgggcaggtgcaaaagtgcatgcaatgtgcaggctggacagctagcagctgctggctagctggcagcaggcagggcgcaaccgctctgcttgacaaacgggcctgtgggcagtggttt

SEQ ID NO: 21 - DNA, 14348 bp, unidentified
  misc_feature 1..14348: note = Fanzor polypeptide
  source 1..14348: mol_type = other DNA
ggtcctgtggcacagctttgcaggggtgctgagcctgctggctggcaggtggcgcggttcgaggcgatggccatcccggcgctgggcacggcctgcatgggcattgcacgacatgtcgtacattgcaggggtgatacccctgcggcaggcctattttcctacactgatgggtcgtttaaaatgaaacgttgccgtagccattcactgttgccaatgtctggcagtcataattttgagttcggtttgcgtcaaaggaaacctggattgaatttgccacatgccagcgtatcccttcatttaccgtgtacgggccattgagctggttcggcagcttggcctggctgtgacccttcgtcagctgaaggtgtcacggaccacgttgtggcgctggaggaagactgccattgattcttggctcatgcaaaaccatggcaggcccaagcggcatactcagaaagcaaggcgtgttgcgccactgctcaaacccttactcgagcagagcccgcacatgacacaaagcgacatgcgcaaagccttgctgcacgtgcatggacttgatgtgtcatgtaaaacaatccgcaccgccctcaagctgttggccatgacacgtaagcgtgcaagaacaaggggaccttcgcatttcacacatgcgcatcaagacaggcatgtacggtgtcgtgacatgctggtctccgccaatttggctggacgccacatggtgtccgttgatgagtgtggctttgatgagcggcttgtacccaagtttgggtactccacggttgggacaccagtcttgctgaagtgcccaggcagctggaagcattacagcctgctcttggcagtggacaacgagggccgcatcctgctgtcccgagtaaaggaaaaggggtttacaaagcacgactttgcgcagtttgtgtgtgatttgcagcttggccccgcctccctgctgctcctggacaacgcctccatccacaagaatttgggcgtagatccccgctccacgccagatttcctctacattccaccgtactcgccgcagtacaatccaattgagatggtgttccatgctgtcaagtctcggttccggcgtggctttgctgccaatgatgccgacgtgccaacacgaattgctgatgcgttgctcggtgcaacaccaacctgcgtccgtaactgcttccagcatgttctggagatgtgtcgcggaagctacagaccagggtaaaaggacttaaggtggcctggcgttgatgtaagtatggtcagcaggcagtaatcgtgtccataccttccgtgcttgtgcagttgtacacagcccaacagcgggtttacccacggagcattgcacccaaacggacttaaggccgcacgaacatacgttttcatgacgtgaagcaagtcctggcaaaggcaagccaatgcccaccgttgaggaaatacggagaaagtgcagccaccttccgaagccccgtaaattcagccaatggaagaaggctgactggcttgcctttgcgcagacgcatggcatagatctcggagcgggagacaacagtgttcaatcacctgctgggccttgtgaagcagagccagtagcagagccagtagcagagccagcccctgagtacgaaccggcaaccaagaatgccatcatttccgtcatcaagtgctccctgcgccacgccatgcagatgtcggacacagattaccaggtgttcctgcagcgtgtggatgcgctcgtggagtatgtgagtgtacacctgcggaacgcaagcctccgtctggccaccgacatcacagcgcgacttcgctatgggcaagagattccggacctgtacaacaagtcagacgtgttctggaagaacctgatcaagaaccagaaaggcgtgctggacgaggcagcgcatttcaaggtggtgcgtgtctgggacacaagcggagagatgaagctgaaggttgtacggcatgtaccattccagctggatgctccacaatgcaaggtcaagctgagctgcgatgacaagacgtcctacgtcaaggtgcagctaaccaagcccaagtacgaacagccctttggcctggaccaagtggtgcagtacgcagggattggcttcaggaccatggttggcaacaacgcctgggtcctgctgtggaaccgcctggcgcgcctgacctccgcggtggtcaagcgctgcggcaaagtcagaggctgcaccacaccaaaagcctacaccgtggtgaagtgcatccgtaatggcacccttggcgatggcgcagccaccagcagcgacaactggtcccggtggccagaacccatcaagacgttcgccacggaggcgcgcaacaggctgctggcaggcaacgatcctgcaaccgtcatgtacgacgagtacgccaagaagctgtcattcagcaacgtcatgcgcttcaactactggatgcagcagcagtttgaggcgctcagcgtgcgcaggatgaagctgatgcccatctacgatgtggggcgcaagcacatccggctcgataccaaaagcttgctgggcctgctctgtagcgcgttccctgcagaccaaaacgtcctggccctcaaacagcttctccgggccagcgcagagaggggagaggaggaagaagcggaaggggaggaaggggaggaaggggagggagagggtggagcgaaggacgaggaggacgaaatggaaggggaggaagggaagtccagcacaggagaggacgcggagggcaagaagaaacggaacaagggtcgccaccctgacagctacatgctgccagagctgcggctcaccaagggccgcagaggcatgagcaaggcagataaggaggagcttacccagctccaagcggcggagcgtcaggcttggctgcacgaggtgcaagccgtgcggcaaactgtggcgtaccaggcggccaaggagcgcggtgacgcgttgacagccgcggaggacaaggtggtcacgaccttcttccgaaagctgccagtcaagaagggttacaccttcgactgcagcatcatgacagacggcgtgtcagtgagcctgcagtactcgaagcccggcaagaagcccccaagtggtggcagcaagcgcaaagcggcggcagcagcggcacgcgcaggcaaggatgccatcccaccgcttgtggattacgaccgaacgcccgacatgtacattgcggagagcaacactgtcgtggtcggcctggaccccgggaggcgccagctggcatccctggcggttgaaacacatttcaggctcaacccagacaccggcaggctggaccgggtggacaagaaacaggtgcacacctggtccctgtcccgcggccagtaccgccaggagtcgggcatccgggcggaggacaagcgcaaggccagacgcacacgtgagctggggccgctctggcacagcctggccagcgcggaaacagcgctgcggacgacagaccccgtcacaatcatgcagtacgtgtccaaggcagagccgcgcatgcagcgctggtgggagctggcactgcggaagcgcgaggcccgtgccaacctggcgcgatactcaggcaagcgcagcgtgctggacacgttcttcagcaaggtgaagaagaggctggacgggctgttcccaggcgccagccaggtggtcgcgtatggcagcagcggacccaccatgtcgccgtcagggaagggagagtgcgcggtccccacaactggcacctaccacgcctgcaagcggaccttccagcagcaagtgcaccttacagacgagttccggagcacactggtggactacgcaacgggcacccggacgctggctgtttacaaggaggttcgggaggccaccaaacaggaggtcacgcggcaaaagaaattgaagctgcgggctgagcagcaaggagtcaaacagccagagacatccaggcgacaggtgaagaggcggctgcaggagaagcgacaggagaagcgcgggtgtggttctggcagtgacttgagcagcaagtgcacagtggaggtgctgcacgccacccaagcaaagcgaggcccactggtcaaaccaggggacaagcgctttccgctgctgagtcggctgctggggaagcgcaaggagaaggacagcaggagacggggtggtggtggggttcacggggatgtagcgggtgcatgtggagacacggagggtctgagattcccactggtgatgggtctgcgcttttcgaccaaaacgcgcatgtaccgcaaccgggacgttgctgcagcactgaccatcggcaagcttgccatgtatgaccgggcgggcctggggcggccggctccgttctgccgtggcgtcaagctggttgcatgatggccaagagttgctgaccaacgaaacaaaacaacggcgcagccgccaatgtcatactgttctgtgtgcaatgcacacgcggtacgagtgaggcgccgttcgcagaacatgtagagttctgcattacagccgtcgagggcggatgccctgtggatgattgatggcatgcaacgcttcacgctgcgcatgtttcatttgtcagtgacacgactgtatcaaacgaccactctgctcaactaagctcgcagctctgtactcgaaatggcgaacctctttgggcctcaggcacgtgccatgtccaccgccaccaaaggtgcgcagggcgtgccgcctgtagagttacacttcaacaaacctacgggtcccatcagccaggtcgtcctagagcacattaacgagcgcgccattgtggtggccggcgccaaggtctacttcctcgacatgcgcggcctggcccggcagcgcaaggctggcacccgctcacacccgctcgtcttcgcgcccacggagaacatctctgtccgcccgcgccgtaacatctggaccgctcgggctgtctttgacgacgcctacgcgcagcttcagcccgcccaaggcgtccaggtaggcggggcattagttgtcgctacgtccagtcgacaccgccgctgcaagtcagtcacataagcatcaaaacatcccacaaagaactgatgcgaaaatgatgacagacgcctctctctcgtatttgcacgtgggatgtgccttgggatggggatgggcctcagacggcaattatttgcttcatatgcaatattatgccaatatttgcatgagatttgcgtgtctgcgctcatgccggctaacactcatgccggctaataattgctacaaaattcctctacattctgactgatctggttatcaaagccattttgtcacttgaggtatgccgccgcggctacatgctgagtgttcggcggcatttgcgatttgcgcgactggctctgacaatcggctttttgctcgttcaggtgtacaagcacttatatgtgttctcggacggacgctggcagcagctggtcgacgtgtcccgacactggagcctgaccgcgccgacgcgggcgcccaggggggtggctttagggtttgcggcgcagccggccgtgagcgagcctgcgcggtacgatggggatgccatggaggacagcgacgacggtggggttgacatgtccgacatggccggccccgccgccgctccccccaccaccaccattgccgccgctccccccaccaccaccatcgccgccgctccccccgccacgaccatcgccgccgctcccactgccaccaccaccgctaccgccgcccccgccaggcagccgcctcccgccctcaccgccgctgcccctgcagccgctaccgctcgcgtcatgcagcagccggccgcccccgccaggcagccgcctcccgccctcaccgccgctgcccctgcagccgctaccgctcgcgtcatgcagccgccggccgcccctgccaggcagccgcctcacgcccacacctccgtgctgcagcgacacgccctggccaccgctgcccctgcagccgctaccactcgcgtcatgcagcagcccgtctcctcctcctccgccgccgcccccgtccctgcctctgcgcagccggacaccgcctccgacatggcagagtgctgcatttgctacgaggacggcgtcgagcgcttcacagcgccgtgcggcgccgtgtactgcaagccgtgcctaaggatttatttcggtggcgacctgaagtacaagctgcccaagtgcgctggcggcgccggccacgaccacacgctgatgctgacgccggagatggcgaaggcgctgccaagcagcagctacctgcggtggaccaagcgggtgaacaagggcgcggacacccacgagtgccccttgtgctgccacccggtcgccttgcccatgttcgcggcgctcttctactgcagcaaccccgcctgcatcaacccgaagtacggctactgcgccgagtgcaggcgcggggtcaagcaggtgccgcaccggtgcggcacggaggaggatgagcacaacgaccggctgtgccgcacgtacctggccgacacgggcgtgcacccctgcccggactgcagcttgtgcgccgagaagagcaaccaggaggagtgcaaccacatgacctgccgctgcggcaccaagttctgcggggcgtgcggccacaagtttgcggtcgacgcaaggggcagcgccgtgcaccaccacaagtgcgcctcaaacaacatcttccacctgaacacccccagcgagcgcgccatggtgcgcaaggcgtacggggtgaagtagtgacctttggagggcgggaagggtgtgggaagggtacgggaagggtgggtagagtgcgggaagggggcagggcacttgggttgcgcatgcaagggccaagggggggggggaagggtcggggggggggcgagcaccatggcgggagtgccagacttgaacgaaggcccggcggtcggggcggcggatgggtagggggtgcgtgcagaacataaatagtagcgggtaagggggtgcggtggagagaagtggggtgggcaggagcaagggacggggcttgagctgtgcacgcaagggccatggtggtgcgggttgaatcgcggggtgacatgtaggtgcaaggaggcgggttgagtgtgcttgcgttgcaacgggacatctggctgggacactgggtgtccaaaggcgtgcgcagggcatgtgtttgcgggtggcaggcgcggggcgacggggcgaggaggccctagctgtgccttgcgccgccaagtcgctctgttgttgagtgtatgagtgtatgagtgtatgaggtttttgtgattacttattactgaactcgaagtcaacgagtcaagtacccatcgcggcctgcagcagcgcgagcacgccggaggagcggcctaaagcacggtgggtgggcgggggcgggccgccaggcggtaaacgcagagtgaatagtcctcggggcggggcggcgggagggtactgaaatgccgtgtgtactacggcctcttgcactccgcgcaacccttgcgtgcatacccctgctgagcggccgctgctgcgcatgaataagcactgtgcgccctttccccgttcccgttgcccgctccctgcaggccccatggcgtcggtgtgctactggctgcacacgccccttgccgcctgctgcgttcctggccctgcaacccctggcaaggtaggtggtagtcaggggtggggcgggatgggccctgtgtacggctgccgggcgggctgggtgcgtgatcctgcttggggagagggggtggggtttttgcctgatgcccacgtattcctgtgtttaccctgtacgggccgttgagctggctctgcggcttggcctagctgtagctcatcgcctgctgcggcgctggtcccgtgctgcaaccagccttcctgtgccctcgtgctggcccaccccccacacagggccccatggctggcgcgcggcttgcgggcggcggtgccgccctgccccgccctgtgcgtttcaccgcccgcttccctgggtcccctgcggcggccgcgcctgcgtgcgtgctgtagcgggtgagttggaccgtttgtcggtgctttgtccgggcgcggcggggtgcggagcagcgccgagggtgtgggctgcgcagggttgtcagccgggagcggtagcggccctgtgcatgtgtagcgatgcacgccggtgtctggccgtgccaagggacaggatggtcacgaacggccgcaccatgcgcatggataccgtaagcactgtgcgcaacccctcgctcccgttgcccgctccctgcaggccccatggcgtcggtgtgctactggctgcacacgccccttgccgcctgctgcgttgccggcgcggcaacccctggcaaggtaggtggtagtggggggtggggcgggatgggccctgtgtaaggctgctgggcgggctgggtgcgcgatcctgcttggggagagggggtggggcttggctggccgaccggcgctcggccttggccccacccaccagctccgtccggtctccccgtagccctcgcgaccgcggtcgcaaccacgccacccgccggtctttcctatgctgcgcgacgtttgcctgatgcccacgtattcctgtgtttaccctgtacgggccgttgagctggctctgcggcttggcctagctgtagctcatcgcctgctgcggcgctggtcccgtgctgcaaccagccttcctgtgccctcgtgctggcccaccccccacacagggccccatggctggcgcgcggcttgcgggcggcggtgccgccctgccccgccctgtgcgtttcaccgcccgcttccctgggtcccctgcggcggccgcgcctgcgtgcgtgctgtagcgggtgagttggaccgtttgtcggtgctttgtccgggcgcggcgggtgcggagcagcgccgagggtgtgggctgcgcagggttgtcagccgggagcggtagcggccctgtgcatgtgtagcgatgcacgccggtgtctggccgtgccaagggacaggatggtcatgaacggccgcactccactgccccacccccaggcaccggcgcgccccgcctccgcgccgccgccagctggttgcctaagtgcttcggctcacgccgtggccctcagcacggtgggtgggttgggttggggccgcgtgcaccggggccgggtgttgacatgccgttcttggtcttgatgcacgggtggcagcacaagggggggggcttcgtcctgtgttcgtgccctgtgggttcctctggttccagcgccgtgacgcgggctctaggccgcccagcctcccgccgtacttggcgccacccttgcgtgcatagccctgctgagcggcctctgctgcgcgtgaatatcgtaagcactgtgcgcaacccctcgttcccgttgcccgctccctgcaggccccatggcgtcggtgtgctactggctgcacacgccccttgccgcctgctgcgtgccactgctgcggcaaagcccagcaacgtgctgcgttgcctgcctgtcaaggtgacggatgagtggggcaccaacaagtacgacatggagagcggggagcccaagcgcaaggtgcatcgggtgatcaccatggagaagagcagcaagactggtaagatggagctgcgcagcaaggcagtgccctgccagctgcagcaggacgggagcagcagcgcgggccctccccctgtgccacgtggggcccagcaggctgtggccctgtggtgcaagcgtgagaagcagcgtgcagctcggcgctgcggaggagggagacgtcaagacgaaggcacacgcaatgcacagagaagagcagatggcttgtggtgtttggaaaaggagatggcagatctcacggaggaggatgtgatgaaagcagggcagtaccctgaggtgcgcggtcttcaggccaaccaggccgggaagtttgtggctcgggtcaaggccagtgctgttgcaattgggacgtgcagagtgatgaagctgctgggcaagggccgcccggccccattctgtcggtcgcacaacaaatcgtagagttccgttgagacgaacggagacttggcacagaagtcctgccaatacaccacgcatggctcgtcatggtgtcacggtctacggtatcaccgtcagcggcacggtaccggcagaacgttgcatatagcgttttgctgccttttgcattggtgttttggtgctgcaagcatgagccatggaggtagagctgcgatcggtggtgcatgcgagatcactgccgtacgttgcaagtctatttgagcgcagaaccgcgacgttgtcgctggttcttgtacattttctgcgtaagcgttatgtgacacaatggaccccgctgtggttaggcagtgttcggccgagcctcagcgtaaccatcggacacatgtaacaacccgtgcagagaagccgtctcccagttgcgtttcctagcagctagttatagcggctagaggtcatttcagttgcgattgctgagcgatcgggcggcattgggcgcagccgtcatgccgatcgtccacaagtggccactaggcacatgaaatgcacgtctgcactacgctggaccgtgacaatgggaggttacatttccagtcgttccaggtgtacggctccgctttggcaaggttggttgcgggtcgctgggcggccttgggaacttgtggcggcaggcggatggagagagagagagagcagagagacggtacacggtgtatttggggcatgggtggcggaagcatgggcgcgcgttggcgaagtcgaggtgggtgtatgtcaaggcccggttcccctgcaaagccccggctgagactggaatgtcgtggagactcgtgattcgtgttactgtcggagttcagttcgcatgcacattggcccgtatacgctgtggacgtacaagacagggcaagtgtgtaagtactttgaggctcggttgcgttcaatttcccctgtcgtctgtcgtttggaggtgaggcatcgatcggttgttgctgcaggttgggtaaggttgagggcagacgggggcttgtgccggcgggcagctccgtggcggtgcgggatgggcgcatggcggggtgagtatcgcctgggaactggggcctcttttttggcccgtttacaatgccttagttccggacttcggcacggcttccgtgtcaaacgcaagtaccggtactgtcaggtgtctgacacactgttgtggaaggatttctggggaccatacttgcatgtgcagcaaatacgtccgaatgcgatgagccacactgccgagatgcggggaagcggcgaaaccctacagacactggggcccagtgggaccgagcggcgtgtgtggctctgttttggcagcagtaggcaggtgcgtcagcgccttgcccgcatcaacaacgccgtgcgtggagagccccgccctttcgtagcctactgccgtcggtgcactgcgcatgttcggcttgagcgcctgccgtgcgtagtagtcatcgcaaagggcctcgcgtgtgatcgcttgccggccccagggcagggggctgcacttgcaacgagcagcacggacaatcacggcgcgtgcgtgcgaggcaccttgtgtaaggctccttgcatgcggcaaccaccaagacccaccgtgcctggaaaccgtgtacggactgctttgcagtaacgttcggttggcgtcaccgcgtctcatcccacgcagcaaacgcacgcacaacagcacaccgcccctacacgcggcgtcggtacgtcagatgtcaggctccttgggccgtttcttgagtgaacctgaaactgaatgcaccctgatgcgaccaaaggagttcgtttcctgcctgcgcgtcctgggccgtacggacatccggcccccgtaccacaagctcccacctacgggtgctgccagctgcaggactgcggagctgtgcataccccctttcctgattcctggctgatttccgccgttcgtattgaggtgtacgggctaggactgggcgcaggtgtgcaactggaaggcatgatccgcctgcatccgcttagggaagcaaccaaggcgcagggcaacggagtacttagtcttcacaaacgaaattcctccacaattttccgctgcgcaccgctaaggatatattggctgtgttgcgacaggctggcggtggtgacaggctggcagtatagtgtgttaattggctgcggcggtggctacaggcatgactcagactgcatgactcagatgcgattcaggcctcacgcaaccgtaatactccattgaatgctgttcatttacaagcgatcaggtcggcgacgcgtttggctcttggctcatttgggttcgtcgggcaggtgcatcacagctcgcactgtgacattccgacactcgaccatatccgcctacacctgacagaccgtcgcatccgcgttgtaaacacaaacaacagctatgatacttaagtgcatggcagatgaacttgatgcagcggcatggcaaggcccgcatcgcagcagccggggcgcctcacagcgcaacgccggcccaagaagtcacactgaggagcataggctcgcctggacaaggcctcgggggtgctgcaggcctggcggtaagccgcgtggggggagtggaccaccgcagcggccctacgtcgatgtgcaggctcgggctcgtggaccggcgcagcatgctcgccatgcagtgtaggagaacacaaactcattgacggtgttgagggtggccgcggggccatcggaccagtgcatgcgaactcgcggctgtccgacaaacgccgcgccgctgacccttgtgcaaagaaagtgccaaccttcgctctatgcgtgcaaaaagctctacagagcggccaaaatttcgcgctatgaactcctcctgaaccccagtcctgcacccgacaggcccctgtcctgccatctccctcccctcccgtccccacgcccacagcccctcaactgtacaagcaagaccgctcgctgagccaccaccgcgctgtcaggcgccttcccccagcccacaccaggtgcgcattgaggcgacgaccgaggaccgactcgctcacgcacgcccactgcacgcacggcacagcaagccagcagcagcacgcccgactcacatcctgcccctgcacaccgggcaggtcaggggttggccgtcgttggaccgcttgatgagccacggccggacgcacttggggtggtacacgtgtccttgctcgcacggcgcgtccaccgccgcatcgtccgccagcgcctctgtgcagatggcgcaggtcccgtccgaacgcaccgtgacgctgccggacgccaccatgtcctgcactgtcctgtgcttgcggctgactctgcactcccgctgcgccatgatggccaattggtcctcgtcgtaggaaccgggcaccggctgcgagcgccgcggccgggaggcagcgatggtggtgatgggcgggaggcgagcacggcgccgcatcgtgtccatcacgtccacggcgtgctgcgtgtcccggtaggtggcggggaggggtggggcccaagccgcaacggccgccatggtggcggtcatggcggcggccagggccgggggtgaggcgggggcggaggcggggccggggccggggccgggggtggaggcggaggcaggcgcaagggcaagggcagggagggtcgcgaggatgttggcgatggcgtcgcagtcagttgccgcctgcacctgcagcaccatgtattccgcgtgacccgcgtcaatgaaggtggggtcgtcttggtccatgggtaggtagttcacctcgtgcgccttagccttacggggcttctttggggtgtgcctcatggcgcaggcaggcaccctgcgggcatcggcatcatcacagccgccaggaccttgcgctttacggatggggtagggtttttatgtaccgtgggagcaacattggggggtggggtggggtccgggacgcggccatgacatgacctgtatgcgaacggcggcagcagggcgggggcgtcgtgtggcattcgcccctgcgtggcctcgctcaggccccggcatcttgtgcgcagtgtgctgcttccctcctcccccctgtgcaccccgccaaccccgtcgcacctggctgcttggctgccttggactgcaatgcaggtggaggcggcgggtacgcggcacggcgtggtgggacgagggccttgggctcgggcttgggcttgggctcgggcttgggctcgggcttcagctgggagctggcgcagcggccggggcgctgagcatggggcgagaaggcgtcgccaaggtgagcgacagagtgacgcctaaaatgcgtgaaagccacccaaaatgcagtcgcagtatgcaagttagtgagcgcgttggcgccatggcgcgacatgtctgacgcgca

SEQ ID NO: 22 - DNA, 14348 bp, unidentified; identical to SEQ ID NO: 21
  misc_feature 1..14348: note = Fanzor polypeptide
  source 1..14348: mol_type = other DNA

SEQ ID NO: 23 - DNA, 21536 bp, unidentified
  misc_feature 1..21536: note = Fanzor polypeptide
  source 1..21536: mol_type = other DNA
gcgctagtcgccacatctggaagcggcttttgtgggcttgctctcgttggggcaccccacgctcccgaaaaccagacaaacgaatgcgaacgacgatccccatgtggtcgacgcctgtgtccataccaagccgccgctatacgcacttgcactacgcagactgacggccccaccgtcaaagtcactcttcaattgtcctcctcccacaacaacctccgcctccataatgacaatcacacaaacttcgctcgctctcctggtcattgccgctgccgcttccaatggcctctccgacgccgcaaacctgcgccaggcgcagcgcaacctcgccgccacctacagacagccaagcgactacctccccgccatggtggcccgagtcaacaaggagcgagctgctgtcggtcttcctccggtctgcgcgaacctgaagctgcagtcttcctcccagcgtcactcggacgacatggccgaccacgactacatggcccacggcggaacggacggctccacgatggagaagcgcgtgacggacactggttatgcttgggacagggtcggagagaacgttgctgctggccaggaagacgtcgatgcggtcatggacgcctggatgaggtcgccggagcaccgtgccaacatcttgggcgactacaacatgctcggcgcctcgtacgctttcaacgaacgcggcacgtaccagcactattggacgcaggacttcggcaagagcaaccgcgagtcgtgcagcaatccaggcagcatggccccgaactcgagtcctaacactcctggccgtgtccctccaagcaacagcgtacctcaaaacaacggcgtacctcaaaacaacggtggcgcccccaacaaccagacccccaagcagcaggaccaagagcagggcgaagctgaccccgcagtgcaggagaacattatgcattatcctgaagcccggagcgctctgagtgcgaaggagctggaggccgacctgggcgttgccgtctcgccggtgccaaagactgacgtgcacgttgtgaacgcgaagactccgtgccccgcgggtgagcggtcaatcgaggagccggtcgtccaatccgacgcggagaaggactgcgatcccaagttctaagacgataggaaagaagtgctctgtgttcctcaacgtataatatagctgttgttcaacatactctaccttggcaatagtacttgcacctctaatcactaccatgatggctgtcgtagcctacgaatctaccggtagttcgactcgcaggcaacgcaagtcaaactgcttgccggacgatcgcaatttggctgcaactcaaaaagttatctgacgcacttattaatataataatacatactgtaaaacctctaattgtgcccctggggtactaagttagtaccccacccacgcaaggggggtggggcactatttgagggtagtgcccagctaaatgcccccacaaagaccgaacacgctgctactacataaactacacagtaggcaaatactactttctgtgctatttggtgcagttttggggatagtcaatatatccagagtaaacaaatcagcggctgctatcgcgcagctgcgtaagataaacttaccttcggactggctggtaagataaattcgtttttagaaaaaaaatcagtggcctcctgtcgccagtccaaaaccctccctcctcccccgcaggccgcaagcgatcaggtcctgaccccgtggcatggtgcgtacgcgtgagttagttcatgtattccctgcttaaggctaacctgtacgtatccataccctatgtcaggccccggacgacgacatagctgccgatggagctcgcgatgtgaatccagaagctcctctcgagatggtcactgtgaatgcaacacccagccaagcaagctcagcccaagctcctcccaccaccgatccacccccactcacgccactagaagaagcagaagcagagcggatacggcttcgggcgaagaagcgacagcagcaagaaaacacagtgccgaagtctagacgctcccccacgctgccaaactgacgaggatcggccccgaaacgctgaagcggacccggcagacagtcaatcccgtgccgaccaagctgagcgttgggagtcccgcctggcccgtcatctggcagctgacaacgaggacgaaagtgaaggtgaagcagcgctagcggaagtattggcgcagcttgaggaagaggatgaagatgagtctccggacaacagtggcgattcggactacaacgacgatcgacgaacacctgagggcgatgacgatggagactcctgtgacggtattggacgcgctactgacatcgattccgctgcgaatagtgtgccgacaccgcaccaaacaccgaagaagcaccaaaacccgaaggcgaaccaaaagtctgtccagtgcgaggacgaagaatcggaaagtcaaggtggtgtggaagatgtaccagtcgtcggtgactacttggaaggatttcctatgtactggtcgtcgtggaaagtttctacgaagctttcgacgagctccaagaggctacgtaccagcgcttctcatcccgcacaagtacctcaattaagtccaggaacaagcaaattgctgccgcgcagaaagaggtcaaaaagaaacaaagtaagccgaagacgagaaaggttcgcgcccaccgacagagcacaggtggcacactattgccagagtcatgggagaaatacggcagggacgttcgtgtgcactcatgctattccgtacgagagtcgtggagaaggcttgcggcagcatgacgccgtccgttttgtggcgtgtactgctcgtgtcaacgcacgggtttgtagtcgaccgagtggtgttggatttcatatcgttgtgaatgcaacgggaatgcacagccattctctcaccgaacatcagtggtataactacgctgagaacagacgcgtcttgggtccgtcctacgccgcgatgtggcagtcatgagcaaggcgggggccaagccacgagggatattagcgtatcttcgagccaaaacaggttggtggttttggtgtgtattctgtatattgcacgaaacactaataaaatttggtttggtgttctataaaggcaagcgaacgattctacgagacgtgcacaacatgatccaggacgctaagaagtgctttaatggaggtcgaccggatgcggagcgcgctgtctccgtgctggacgaattctgcgagatgaacactggaaatgtggcggagttcgtcattgacaaggagaccaacgtggtgcaagtgataacgttccagtcagcgcggcagaagcgtctctttgcagccttccccgaggttgttctggtcgactcgactcataacagcaacgcgaaccgttataagctgtttagcttcgcagtccacaacgtcttcggccgggtgggtaaatgctttcaggctctaacaaaaatgtactgaacatttgtataattttctgtgtggtttattttcttagggtcaattcgtgcaacacgcattggtgcggacggaagagaaaccgaacttggctcttgttgtcgcagcattcaaaaggcacaaccctgagtggtccaagatccgtgttgtgatgtcggataaggcactgcatgagaaggaggtgctgttggaaggatggccgaatgcgcgccagctactatgtcgttggcacgtcgaaacgtggttgaagaaacagtgctccagactgggagacgtcgggcctacagaaacgaaggaactcaagtcaattatgaaaggattggtgaatgcggcatctcaggagcactatgacgacctgaagaaggctctgctcgagacagtcgggaataacgacgaaaacctgctctacaaaagttttatgaagcactgggatacgactgctgacgagtgggtgatgttcaagcgtggtgacgtcccacacctgatgaacaacacgaacaaccgtctggaatcggaatgggccgcctcaaataggttattgacggtagtttcactgttgatgagctcctctccatgctgataacaatgcaagattacactgaagaacgctacctggctgatttccatcgtgtcagcagtcgccctcccattgctgaagatccagagttaactgcagtggccatgcatctcagcaactacgccttcgagatggtggcccatcagtacacattggctgtcggacctcaggcctgttacgacatggagacgacaccagatggcaaggcgagagtgacaaacctagcgacaggcaattcgcacgttgtagatgctcgggtgatattttggttcaattttggtggtttggtaaattttcgggtgctgtgactaacgctgggttttgttctaccaacagcttgctgcatgcgactgtatattcaggcagacctgtttgctcccgtgccgccatgtcatgtacgtccgtgccaagtctaactacgagacggtagttccgccaatggttcgtttcgctacccgttggatcgtccaaagtccagctaacaacatcgatgaggggcctgtactgacggggggattaaaccgcatcaactgcccaccccgccgtgccccacgagcactatccagcgacgcgaagtacagccaaggcaaacatattacagagaagatcatcgatgtcctctcgatccagccgtctaccacacacaaactggcaatgcagtggcttacgggtttctacgacgcgctacatactggcaaactggaggagttcactggccaagatctgtgtgcaacaagcggcttcaactcgctgtctctagtctcttcggttgctggtgtgacagcatcgcagctttcttttgctgagatgagcagcgcgcccgaagacgagtcgaagtgcgatgtgacggcagggacggaccttgaagaaaaagcgcccgtcccagtagccgcaccaccggaatcgactaatcaccagacgactatcacaccgtctcagcatgagaatactgtaggtcgaagtccagcggatcctatcaccttagcatcgccaccgaagcgtaagggattgacgcggcgtgcggagaagcacgaagcgtcgaccggagagctgcaagttgcaaacaagattcggttgcgcatctcagaagggagaaaggcgcgtgccgttaagctctcggacatggcgattcttaaaggcccgtacagcagacgcaccaccatgtcgttcatcgaaaggttgagcttgccatccgtggaagtggctgggaagctcgacgttcgtagcttcaacattgggcagcccgtcccagtgattaaggcgattcctcaactggaaaagatcgaggaggccatagaagcaatcgaaaacaagagcaacaaggcgctgcttgctcggtgggaggactatgggtttgccacgtacgggtaattgacgctcatggctcgagtgatcaaggcacgaaacaacttcaagttagtcgaagatacgatgaagtggattgactccttggcgtttcgagttgccagtattgtgtgccgttcaaagacatggaggacgtgactaaggtaagatttccttgcaccgaaagtataccaaaagtatactaaatcaccaaacttactgatgtgctttgtgtttaggtggaccataagcaagcagtagacgagctgaacctggggcggtggtacgttggccgacatgaacaaaatggctgtgaattcctggcttttcgagagaagctctggctgcactcggggtctatcatcggtggtcttttggcactccaatccgagtatttggatgttgccattgtcaaccctcgctttcacgactttgatgatgctgatcagaagatgtgcacagcaaaaggatatggcgctgcgaatgccagggccaagttcgtgtaatgggcctaccttagctcactactacggcttacacgtatgccacgtgtatgaggaagcgtaggtttcttttacttgagtaagtatactcgagatccacgagtatactttaaacaagataaagactccaagtagcgagttttggtaaaagatgagaactgctatttgtgttttatgtttctgacttcctctaaatgtaatattctaaactaggaatctgccaacggctggttggcaggattctgctaacatgcaagtcactcattggctaaaagatgctgctttcagccaataggaatcctaaatgtgtatggaccacccgtcgtggtggttgtaaatgtatgtagtcattggtgtaccttacaccaaggtcgaggaagtgttcaaacctctaacagacatcgcatctgttagagtaacaagtgactgtagccacttgtgcgtgtaaccccgttacagttcgtcatcagcgtgattaacttggggcaccacgggggtgcatttttcgtggagacggagacgaagatctgctacctgtttgaccccatgcagctgactagcaatttgtccgcgctgaaggaagcagttctcactgtggttgagaagatgctggacatgaccgaccaactggactaccacgtcattgcccactaccaacagagggatggtacgtcgtgtggcatttggtgcttggtggtgttggaactactactgtttggtgcaactcctgaaacctggtctgactactggaaggactctctgtacgaagtggtgggctacttgaggttgcgctacctacggaaggtgattagcttgcagcttcagcagccccagcaggtttagtaggcaccctaacttcaatacatatctttggtagatgatttttgtgccagatcaaaacaccaaagtcataccgaaactaagggactttgttagcgtttgtggtagttgaaagtagacgccactccaaatttttgaatattaatgtaccttgtattttccaatactataattaagtgctcctataggtactcatcctcatctgtcacagatgttgctgtgaaagagagcattggctaggatgaatgaccactataacctatgctgatacaacgcacaggaatacgtaaattactggctccccgtaatatattcttgtagacgacaagcctcgcacccattatttgaagctatcatttaataacactttctgtagcagcaacacgatcccacctaaaattgtcgatcaacaactgggtgcatcctgaaatcacattttagatttgtgacgcacatttgtccaggttatgatacatttactacgtgattatactcgacgttgctgcctctacggagaaaaatagtactgaaagtaccattattttgaggctacttgagggtatccaatgggtttttgtataggatggtcacccctcttggcaaccccttttgacaacctcattttattgtgccttttgtttaatttgccgacagcaaaatcggacttcaagtccgattttcatttactaaaacaagggagatagtaattcgttatagtatagcttccccgaatatcggagttcggttttccgtgctttgctccttcggttttgctctcgttttcattcgaggtcccgaatggcggtgatttgttcgccatctgggacttcggctcgaaaagcgctatcgctttccctcgctttcgattggaaagcggagtcggatcaccatccctccgatttttcaaatcgggggtaggtcccctttattttaactcgtaaccctacctcaatagtaaaagtgatagtttttgaggtccgtttagccaaaaagatgaaaggcacaatacgtcacaaatttactccactgcttgttttctttcacttttgatacgagaccaatttgtgatttctggattttttttagctgtaagtgggtgcatccttttaacattccttccaaaatcagttttcatccctgttttacatcctaatcactcattactttaatttaatttaagttacatgtagctgtgcggtatgagtgagagcaacgatggtagctgtaagaatagaaaagtgtggcatcccaacagacaacgcatacatcacccttctcatgttagacaagtatttgaatttgaatttgttgcggtttaatcggctacctactcccggagacgcatctccgcgtacggtgatcgtgtcgctagatctctaggatatgagcccgcggtaggcgcccaatatgttagacaagcaacaagaaacttcacgctgccaataattccaatactaaggttgggaggggtactgtactaaattttcagtggagagtggggtactttaagagggtggggtactattagagggtggagtattacttgtaagtccccacccaaagtaatcaaaaatgagaggtggggtactaattgagggtggggcacaattagaggttttacagtatttagtccaacataccaaaaatggtccaggatggacaaattttcctgtagccatctgttacttttgctcagaccattcgtccaacgccggtgatggaggtagggcgccgccgggattgaactcacaacatacctgtagaacatagctcgttagaccgttacaccatacaggcgccccggtcatcgtctcttcgggctgggacttgacactgtctgattgcatattccaacactccccctcaatcgagagtgtcaggacctcctgattgcgacctatcctgcagcttgttggtccgactccaacgccgttgctgcaatgacctccctgggtttaaggccacccgtgtctccccctggaaacacattccgttcacagacacctcgtgttgtgacacgaaccacacaaccatcactacgatccacattccagcaaccattgaccatctgcgttctacgcgcttgggaaacgtattccttctccatgttgtaggtcggctagccgtgcacgttttgcagagtgtggaagacactccgcttggtcgaaatgtgccgcaggaccatttttctggcatctactgcacccattcgcactcctcgtccagcacaacgttcgttttgcgtacgctgcggttcattaccgtcctcgcgaacccgatttacgccgagtcctctacgatgcgcttagtcaacatttgccacacggccttcttcgttacgaggatcgacgatagcgatctccgctaggatgacgatgacgcacaagtggcgccaagtttgaaagtgcaacttgaagttgcgcctcgtcacagggtcttgatttgtgagtgaccatcactctgtggatcttcgatgtttggtgttatagcgaaacggcgcagtgcaaaatggcgccaagtttgaaagtgcaacttgaagttacgtctcgtcacagggtattgattggtttgagtcgcgggagaccatcactcagaacacgcattagccccggtgctccatgttgcacttcacttaaagcgacaggggaatgggcgataccgcgtttggaggcgtttggtaccgaagccgcctagcacaggtgggtctcattccgcaatttgcaagataccgggtaagcgcaagaagcccccccccccccgccgactcaacccccgtctacacgtatcaaagcgtcaagatgaagttcaatcagctctgcgacctcgacttcctgaccgccgagatccgcacgatggcatcggagctcaagctggtcggcttgctgggatggaagattgctggcaagcacgtcctgcggtgtctacaagagggcgcttccctgccggccctcgactccaacttcttctaccaggatgaaacggagaagaggacgaggaacagcccagagtatccggacctccacccgaccttcgtgagatactgggagctgtgcgaacgacttcccgaatacctccccccaagcagcgtcaattcgggtcccatgaggcgcgcgatggccgatacgatggagacgaacaccatcaacatgctgggtcttcactttcgaaggaggcttcaccagtacatccggttccgctacgcgacgacgggcaagctccaactcggctataaggcgacgcggaagctcgttgctggctgatatcgtgtcaaggaagtcccccacctcgatgtcgacggcgtggacaccggcaacgtggtctatgtatgggacgaaccaagatccactgcggagcgtgagctccacgactggcttggcttcgtgccctgggagtggcgcattcgccaaaacccgacccactttttcgtgaagctatacgacatgctccagtggatggaggcatttgtcgagaagcacccaaagacaaagggcgcgcgtctctactccctgcctccttactccagctcattcatccccgcacacgtgacgctaaacattacgtcgctgcatcaagtgttctgccgacttttcacggaccctgagcgtcaggcagaagtcaagacgtatgtgaaggacgagcttggcgtggaatgcggatctacagagcaagttcgccgccagtttagcgaaaacaaggatgctgtttttcggaagatgtttcggctaaatggacttgagaccagcacacgagagttcgcgtaccaaatcacaacggatggctatgcagcttccgttttgctgcgccgccagacgctttgccgcgaggatgacgacaacgcggaccagcctcgcaagcgccaaaagaataataaaggtgaagtagtcaaggctccggaagcggtcgaggaagacgccctcgaagcggcgatgaagaagttgccgcccggatatgctcctgacgtcatgatcggcatcgaccccggcgtgaggactgtgtgcaccgcggcatgtgaaggtagccttccaactcggcagtcgcgacgccgacggaatcgacaagggaagcgaaagcacaagatccgacgggcgaagcacaagcgcaagaaccgacacaggcagcggaccgtcgccatcaacacccgcgagtactaccacatgtccaaggctggcaagcatcgcttctggaacaacggtctgcgggagaaggaggcttcctacgccaagatccttgacggtatgccgacgttcaagacagcaagatatcaagtctacttggatgaactgcggtattttgtgaagcacgcaaagtacctggtgctgttctcggcacggcacttcttccggaagtggcgctttttactgtactgcatgaaaatgaaggcaatcgacactctggccaagcggcttgtgccgacaccaagtccacaggtgtgcgtcgcattcgggggctggagctgccaagacggactccggggcaaccctcgcgatccggtgaaggcgttcaggaaggcgctggagcggcgcgctactgtgctgccgatggacgagtttcggaacagtaagctgtgctcctgctgccaccagagtcttcgcagagcccgactgctgaccaaggtcaaggacaaagacaccaaggaggacaagatcgttttgaagggcaacagaaacgtcctgcactgtaagaacagtcgctgcagggcccacttctggaaccgagacgtcaacgctgccatcaacattttggagctgctcaagtgcaggctgcttgacctggcgaggctggcagcattccagcggtaatgacgaccaaggtttttgaaatatgtgaggataggctgttgtgtgggcatgcgctctgcgcattgtcagcgcaatggggttccgtacccgagcagacggtgtggaggagggaaactccgatgacacagaagccggtacatttttttagtttaaagaagggatttttttttccttttttggataaataaaaaggaggtggagacatagaaaaaaagcaagcaatggtgtacgacgtaaccgtagacgagtccagcgcgcagcagaacatggctggaatgaagtttagaaaaaggaacttgataaaccggtttatcaacttcgtcggcgcggggtttcaaagtttgaaggcggtatatcggtatttgctgttcaaaccaatactcttgcaaaaccaggaagtgtaacggatcgcaaacggctcagcttcgcttcctggagctcctatttgctcctcgcgcagatataattggcttcggataaagccgcaccctttcagtaaggtcgtggagaaaaggcaaaggcacgtacatgtagtttcctcactcttggcaccttttcccggcagcgtatccaagccgcactatcgttccaacgcaagaaaggcaaatggcgacagctgcgtacgccacctgcagcttctaggacgccgtggcgcgtagcaacctcaccatctttgctggagacgtcacatttcaattgtccctgtttcgagcacccctatcgtctaccacttctcgtcttcaacacttctcccggcccccaagctccacaacttcgttgtccctgaatcacatcaactctttgagagttcgccttcgctcctcgtgcttttatcggtaagtgctaaatgaatgccggaatcagcttttcgctatctagattgctctctctctctactaatatatgtagcgggccgcgccacaacgcgtgactacggcaaacgggcggtcaaataacccacttcactgtcgtcgccagaagcggtcgggttgcaagtgacgatggaccaactctcttccagtcgtgatttcaatgctgaaggaccagcctccactcgaggtgctcgaggtgttgatacagcaccatcgtctcctgtcgagtatgattctgaagattactgtgatgacactactgaagtgacggctacacgaggctacgcaaatggccagcagtcccaagtggaatctgctgttgctggagcaagaggagggcctgcccaaaacgtcactcacaactcagcatttgcgcgacttccgttatcagaacaagcaaggacgtcagcatcccaacagatacccttcacgcaatcagcacccccaataacttcgagtctaccctgcggtgatttccgtcggacgacttcgaactccgtaggacccggtgctggagctacgacaccaacgccgcaccagccacccgacgttactggccgtgacttttgtgagtggcctcccgagccgacggcgctgtatgatgcagacgatattgctcggatcccagcatgaatccgtgaggcggtactccagtttaggccaaattaaacgtgtacgccgatgcctctgccccgaagccatcggtctattacgttcaaatatggagtccgcgtgaagtgctggttccgcgaatcccttgttgtcgggtggttgtgcatggcaagcgatgcgtgccgtcgggatatcacgttcctgcccttccatggagaaaaaccactaatgctacaaagcacttgtgggagacgcaccaaatccagtctgaaaagacgaccctacagaatacgcgtaagcgggaccgcgctgaaggggtcaaccgcattctagcgtccgcgttatgccgtgacgatgcgaagcgtttgtgtttgttgctggagacgattcgaattgtctacaacaacttgccattccggtttggtgagtacgaagagtcagtcattctgaaggaagtcgtcacaaaagatgagttcaagacaacagtgaactcaagaacggtgacaaattcacttgtcgagttgtacgcatccggtcgccaagagctgatagggttcatcagagacaatcgtttgggacttatcaagtgtttgacgatggttgttgacttctggaccccaaagcatggtggcgaaaagtatctcggtttgcgcatctacttcgtcgactcccacttccgactgcgtactgtactcgtcatttcttgcccatgtatggagaacgcgaccaagggattcgcggcccttttgagcggtggatttgcggtattctgtttgactttggcctgtccccgagcgacttcttcggctccaccactgacagcggccccgacgttaaatggacgatgaacgaagggcttcgattgaagtgggaatggtgcatccctcacaaggtgaacgctgccaccaagatggcctgcggcttgacgcgaaaatcgcacaatcccgagatgtcggcgttgctaaacaagctatctcaaacggtgtacgacacctccaccaactcgacgcttggcgatctgcttcccatgctgatgataatgttgggggaaggcaatggtacccaactagtaggctacaagccgcatcgcttcatggggatggcagccacgatggagcgggttctggagaagtggccagctctggaggcatggtacgaggcgcgttcagctcagcatgcacggaaaaagaagcgagcgccaccagggtttcaccttgccggttgtcaacagcatttggtgcagctattatcaatccttacaccgattcttctcgtgacgaagcgatcacaggcgcaggatacgaatcaagtgcaagtcctgctgtccttgtatacgatgtgcatgacttctctcgcacttgacagccccatcaggcgctacgacacggctccgtcgaacgccgtcaatattcacccttttcaactaacatcgctggtggcgaggacaaggatgctgctacagaaggcgttttaccacaacttcttccgccgatatgtagacattgtatccggttcctacatttttgagatgcaactggtgatgtatccttcggttaagcacgtggggagtccgatggacgaagtgattgccgccgttgcacgtactgaagggagaatgcgggatgatcttgttgctggtcatgttgtcgccgtttgagctgcaattatgaagcgcttgaagtcgctaatgcgcttagtagccaacagtcaagacccagcacccgttgatccgattgctgctccagctgtgcaggccaatgttttcgatgacgacattttggcaacctttgcagttcaacccttccgaagcaccgaacgacctgctcaacaacgtaacaagcacgatactctcatcgccggtgagctgaaaaggtggctagaagattcggatgggctgcagatgataacagttcctgatccagccaagacgagcgtccgcagaccggagagtatcctggaattttggcatcggcagcagcagtccaagcgctatgtcttgctacccatggttgctcgcatcctgtttgcagtcccatcttcgtctgctcagattgaaagggacttcggcaacagtgggcaaatggtgactgccctgcgagcttctacaagcacggctaatatcgacatggcttgcttccttcatcaaaaccggtcatttgtcgatgtgtgccagtgcccaaagctgaaagcatccgaagtcgacgaacacattccaagcaatgtcaagattaacctggaacccgaggtagtggagcgaatggaatggaatcagctggcacaagcgtgcttttcgacatcaagcgcaagcgcatttgcttcttacaacgaggaggagacgaaagactcaagctgttagtttaaacgagtaggaggcgaaagactccagctggtagtttaactgcttcatatattcaaatatattcacctagcatattcgaagtggctttagtagtcaattccatgagtttgtcaagtccagcatgggataaacattacgaatactgcagcgcttttaccttcgcttggtgtgatttctccagcgcacttgcacgttcggcagcgcgtaatgctgtttcgagtgtcagttccgcgcggatttggtccagtctcgatagattggccacggcttgcggcttcgaggtttgagctgcggttggtttacgcctcactttacctgctccagctctaagaacgcctttggggtgcaatgctggctgatcgttgctgtaggaagtcttgcgaccttgtcgaccttgtcgacctggggaactagctgcttcatgatccgactttgcctcgtgcagcgatttcattgttgcttcgatcgagttcctgaatgaagtcatcgcttgattcacctctgcctttattcgggaatccataatattctccttgtcttgaagaatactctggttcgagacaacatcttgctgattgtggccctgtgtagccatctccgcacgaagtttcacaaatttacgctcctgcttgcgctgcagcttgtttagttttgcgtcaaaacgcagctccactatcagcaacaagtttttgagatccgctgtctagattctgtctttcagcgcgcaactgggcagaaatcaaatcagccacgctggagtcacgctgttgaagacgttcatcgacataggctttcattaccgctgtcgctttattattcaccgctgtactgcacgactccatcgctatctgaaagaagtgctgcgtccacgacttcgtgtcctccactttgcagtccaggtcactcatatgcgcctgcatctcggttcgtatcctctcttctgaagccccttactacactgtctcgcctgcacagctaattggcgctcgacttctgcaacgtgatgttctcgctctgcacgaaggtgagcttgaatatcgttctgcaggctgcgtgtctgaacttgaagctcttcattaagtcggtgtgatgcttgaataccttctaccatctgctcgttcattcggcgctcactttcttggcgggtctggcgcaccagagtttgttcttccgtcctgcgtctggcctcctgcagctgaagctccatggcttgacgctcgatgcttccgtccaccagcaccagatcttcttgtacggataggtgtttctgctgatccttgatggaaatgcttcggttgcgcctcgcgtgtggcgggtttccgctttgcagagcttgatcatcgtcgtggagctcacttgtgtacgatacaagaggcgcgtatgagtgctgcatactgcctcgactggtgagcaagatgcaatggcgttcacggtgcagggaaagataccgtatttcgcatgtagaaagctgcaccggcatatgagatgcactttgataactaccattcttttttttacttgctcaaaaggatttatctcattttctttttattattattgtttttctttttaggctggtggaacagtgatctttcgctaaggttcctacattttcactttggtcaccgcacgtcgcatgcagagcccgggatgacttcagcggccactggaccgctgaagtgctggtctacgctgcatctattagggtggtgctgctgaaggtgcctccccatgctacgtctatttgccagcctgcagacgtagcatggaatcatccgttcaagacttggctgcgcaggttttggctcgaggacatccagcggcaactgatgcagccgcgcgacgcggaagccaagtttaagctgactccaccaggccgcgccgggatgtgccattggattcgcgctagttgggagagcctgagctccgacaccatcgcgaatggatacaagaaatgcgacttacacctcaacgaggagtgcctcgccgccgcgtcgctggtggcagagctgcagaacctatcgctagtagggccagtggccaaggcggtcgaccaaactcaagacttcgaccgcaatgtcattcttgacgaagctgtggtgtagctttcttctacaatacatattttgatgcacatcgttttttaaaggtatgttttctgttgtgaacatcatgtgcagctttctacatgcgaaatacggtatgtgctctggtaaggccgcgcacttaaccgagaagtgcccgacgtctcacatcaaggctatccagccaatgggagaagctaggcatgaactcgtcgtttcgttctctcgaataagttaaaccttcgttcgcttcctcccgcttaagttttcatgcgtttgaaccttaaaacctcaggaactgcggttcctgaggttaatggattcgtcagttccgtggccagccatgcagcagaagctgctgcgcgacgcgcagtcgacggacgagatggcgcgcctgctcagccaggagatctctctgtttcagcgcaacatgtacaaaaaccacagccagcaccggcgcgccttcttcttccagaacctgcagcaggtcaagcgccgtctgcgcgatttcaaggtggagaccctcaccggctgctttgcggaggctgcgggcgtcttgaagcaactggagctcgacgcaggagcgcaccacatttcctggaagctgctggcctccgacctcaaggtcggcacggacgccgtgctgcgcaagctcgtgacgctcacaagggcggccgccgaggtgatccgagcagctcagaaggcctacaaaggtgcggaactgtagcgtttatactggtgtgctgtgtgtactgagctgatttggtggtggtgtgcttctgtgtgcagctttaatggtgcagttcgccatgacgtacttcatgccgttcgcgctcatgatgaacagcgtcctggcgcggttgacggtgctgttcaagacagtgatcgtgcgggcgatcgagctgcacggaggcatcacgctgctgtatctgaacgaggtgaccaagtcgaacccgctgcgagccaaggtcactgccgtgcagctccgcgggtaccagattcccagtgacattctccagctcgccaatgcgtagattggacaataagcattaggtacaggcagaagcgaggagtaacacacgtcgtaaaatacatgatatagacagcaagccagcatgaatccaacatactacaggtatgcggtcgcctcgtgaggtatcgggaacggggactgcagacaaaatggagcagctttgttgcgcggaagacactggcgactactgcgcagtctctaatcacgagctgttcgggggagtggtgtagccaacgatcgtcttgtggaactccacgacaccctgtgagagcagtcaactcctccaagtcaatagccgattccgtcgagactattttcaataaaaccacgcacctgcacgctgaggtccagtactcgtgtcgtcatgtcctcatccatttccacctgcacaccaatagtacgcatcgtgggcgctgcgcaacacaactccagtcagcagcatacgcacccccaaatcccagtacgctccaattcaaagctcctcaccgctacaggtacacgacttcttggagagaccacagcgattacacttgtagttggatggcacgagtggacacacgtggcccttcttgggctctccacactgcagccagccagccatacgcacagcaaattagctcccagctccaccctaccagcacccgatatcttcctccttcgcaccttgctgcagcggtagtttcctcggttccggttctgctgcgtcttggtgctcaggtccaggtcgaagctggcggcgtccagccccgccatggccttgttgccgtcctgcagctggtccatgaagccgcccgtcgggtccgccatcatgggcatggcccctatgccgtagtccatcatccccactacatgggaccgagcccaaaccgtcagttctgcacccaaatcttacatcaagccacggtcattatagtacgcactgccattcacgtccatgggcatgttcccgttcatcttgcacgcgctcggctgaccgaagcaaatgtgcgtcttgcgtgcgggataaggttgacgagctgagaaaaatttcggccgcgtcacaccacgtttacaccatctacctattcagccacatactacacgccgcatgccgtagcatgggaattgagccatccgccccaagtcagcgactccatccaaagactcgagccatgtccttcagcttcggccagaccagcggcggcggcagctccggcggcttctcgttcggcgccagcagcgccgcggcgccggcctcgacgtccactgcggctccgagtggcggcttcagcttcggctccacggcgtccacgacggcgtccactgccgcagccccgagcggcggcggcttttccttcggcgccgcccccgcgacgtccacggcgccgtcctcgggcttcagcttcggcgccggcgccaaggccacgagcgcggcgcccagcaccagcagcagcggaggattcagcttcggagcgacgtcggcagcccccgcggaggccaagagcagcgcagcgccggctcctgcggcgcccacgggcttctccttcggctccaagcccgctgcgacgtccgccgcaccttctagcactagttcgggcttcagtttcggtgctaaggcaccggcagcgcccgcagcggaggccaagccggcggccagctcgggcttcagcttcggggccacgtctgcggcggcggaggccaagccgacggctgcgcctgccacttcgggcttcagctttggagcatcgtcgactggcgcggaggcgaagacggcgaccacgacgtctacggcgccggcgacgggcggcttcagctttggagcgaccagtggagcgtcgacgacgacgatggacgcggccaagccggcggaggccaagcctgctacttctggcttttcgttcggagctactggagctagcgctgctacggggtccagtgctgctgccacgagctcgtcgacgaccgcgtcgacgggcggattcagctttggaggcgccaagcccgcgacttctacggctgcggagagcaagacagacacgacaactgcaccggcgttcgggttcggaacgtctagagcggcgtcgactgctggtgcgtcgactacggcagccacttcgactgcgaccaccacggctatcacagcagcggcgccgaccgagacggacaagcccccggctgagtacatgggccgaacgatcgaggtgagactggttggccatgtggtggacttatcaagcatattactgatggtttcttttcgtatgtgtcgaattgcaggatattattaatgcgtggagcgagcagctcgagcgtaatgccgacacttttactacagaagccgttaaaggtacgacaccctctccagccatcggatgctattacgcttgtttcatgtagtgatgcgttttgctgataaattggcagtaagcaagtgggacagcgacctcatggacagccaacggcagctgggcgacatcgccggcgatgtccggcgcatccaggtggctcagaacgagctggacacgaacctggacacgatttttgcgtatcaaatggagctgaagtcaacgcttgaggtgcgaatgtggatagtagtgattaactgcttgggtacttcgatctaactgttgtggtggtaattgcgtgcatttagcaattggagaagagcgtggacaagatgtacgagtctcaagatcagatgcctgtcgctgctgatattgagcgcgagcagactctgcagctatccgtggatatcgacgatcagttgaactcgatgacgacgacgctgaaggagacggtagagaaactgaacaaggcccaggtcgacgtggcagacgacaacaatccgatggtgcagatcatgaaggtgctgaacgtgcaccacaactccctccagtggatcgagggcagcgccggcaagatcaacagtgaaattgcgcagctgtcgcgtaaactgcaggactcgtccatttaaatggctccgcacgaagcacgccgtgagttgcaagttgcaagaagagctgctttgtgccccgcaagctgaagacgcacttgagatctc

SEQ ID NO: 24 - DNA, 21536 bp, Phytophthora sp.
  source 1..21536: mol_type = other DNA
gaggcgctagtcgccacatctggaagcggcttttgtgggcttgctctcgttggggcaccccacgctcccgaaaaccagacaaacgaatgcgaacgacgatccccatgtggtcgacgcctgtgtccataccaagccgccgctatacgcacttgcactacgcagactgacggccccaccgtcaaagtcactcttcaattgtcctcctcccacaacaacctccgcctccataatgacaatcacacaaacttcgctcgctctcctggtcattgccgctgccgcttccaatggcctctccgacgccgcaaacctgcgccaggcgcagcgcaacctcgccgccacctacagacagccaagcgactacctccccgccatggtggcccgagtcaacaaggagcgagctgctgtcggtcttcctccggtctgcgcgaacctgaagctgcagtcttcctcccagcgtcactcggacgacatggccgaccacgactacatggcccacggcggaacggacggctccacgatggagaagcgcgtgacggacactggttatgcttgggacagggtcggagagaacgttgctgctggccaggaagacgtcgatgcggtcatggacgcctggatgaggtcgccggagcaccgtgccaacatcttgggcgactacaacatgctcggcgcctcgtacgctttcaacgaacgcggcacgtaccagcactattggacgcaggacttcggcaagagcaaccgcgagtcgtgcagcaatccaggcagcatggccccgaactcgagtcctaacactcctggccgtgtccctccaagcaacagcgtacctcaaaacaacggcgtacctcaaaacaacggtggcgcccccaacaaccagacccccaagcagcaggaccaagagcagggcgaagctgaccccgcagtgcaggagaacattatgcattatcctgaagcccggagcgctctgagtgcgaaggagctggaggccgacctgggcgttgccgtctcgccggtgccaaagactgacgtgcacgttgtgaacgcgaagactccgtgccccgcgggtgagcggtcaatcgaggagccggtcgtccaatccgacgcggagaaggactgcgatcccaagttctaagacgataggaaagaagtgctctgtgttcctcaacgtataatatagctgttgttcaacatactctaccttggcaatagtacttgcacctctaatcactaccatgatggctgtcgtagcctacgaatctaccggtagttcgactcgcaggcaacgcaagtcaaactgcttgccggacgatcgcaatttggctgcaactcaaaaagttatctgacgcacttattaatataataatacatactgtaaaacctctaattgtgcccctggggtactaagttagtaccccacccacgcaaggggggtggggcactatttgagggtagtgcccagctaaatgcccccacaaagaccgaacacgctgctactacataaactacacagtaggcaaatactactttctgtgctatttggtgcagttttggggatagtcaatatatccagagtaaacaaatcagcggctgctatcgcgcagctgcgtaagataaacttaccttcggactggctggtaagataaattcgtttttagaaaaaaaatcagtggcctcctgtcgccagtccaaaaccctccctcctcccccgcaggccgcaagcgatcaggtcctgaccccgtggcatggtgcgtacgcgtgagttagttcatgtattccctgcttaaggctaacctgtacgtatccataccctatgtcaggccccggacgacgacatagctgccgatggagctcgcgatgtgaatccagaagctcctctcgagatggtcactgtgaatgcaacacccagccaagcaagctcagcccaagctcctcccaccaccgatccacccccactcacgccactagaagaagcagaagcagagcggatacggcttcgggcgaagaagcgacagcagcaagaaaacacagtgccgaagtctagacgctcccccacgctgccaaactgacgaggatcggccccgaaacgctgaagcggacccggcagacagtcaatcccgtgccgaccaagctgagcgttgggagtcccgcctggcccgtcatctggcagctgacaacgaggacgaaagtgaaggtgaagcagcgctagcggaagtattggcgcagcttgaggaagaggatgaagatgagtctccggacaacagtggcgattcggactacaacgacgatcgacgaacacctgagggcgatgacgatggagactcctgtgacggtattggacgcgctactgacatcgattccgctgcgaatagtgtgccgacaccgcaccaaacaccgaagaagcaccaaaacccgaaggcgaaccaaaagtctgtccagtgcgaggacgaagaatcggaaagtcaaggtggtgtggaagatgtaccagtcgtcggtgactacttggaaggatttcctatgtactggtcgtcgtggaaagtttctacgaagctttcgacgagctccaagaggctacgtaccagcgcttctcatcccgcacaagtacctcaattaagtccaggaacaagcaaattgctgccgcgcagaaagaggtcaaaaagaaacaaagtaagccgaagacgagaaaggttcgcgcccaccgacagagcacaggtggcacactattgccagagtcatgggagaaatacggcagggacgttcgtgtgcactcatgctattccgtacgagagtcgtggagaaggcttgcggcagcatgacgccgtccgttttgtggcgtgtactgctcgtgtcaacgcacgggtttgtagtcgaccgagtggtgttggatttcatatcgttgtgaatgcaacgggaatgcacagccattctctcaccgaacatcagtggtataactacgctgagaacagacgcgtcttgggtccgtcctacgccgcgatgtggcagtcatgagcaaggcgggggccaagccacgagggatattagcgtatcttcgagccaaaacaggttggtggttttggtgtgtattctgtatattgcacgaaacactaataaaatttggtttggtgttctataaaggcaagcgaacgattctacgagacgtgcacaacatgatccaggacgctaagaagtgctttaatggaggtcgaccggatgcggagcgcgctgtctccgtgctggacgaattctgcgagatgaacactggaaatgtggcggagttcgtcattgacaaggagaccaacgtggtgcaagtgataacgttccagtcagcgcggcagaagcgtctctttgcagccttccccgaggttgttctggtcgactcgactcataacagcaacgcgaaccgttataagctgtttagcttcgcagtccacaacgtcttcggccgggtgggtaaatgctttcaggctctaacaaaaatgtactgaacatttgtataattttctgtgtggtttattttcttagggtcaattcgtgcaacacgcattggtgcggacggaagagaaaccgaacttggctcttgttgtcgcagcattcaaaaggcacaaccctgagtggtccaagatccgtgttgtgatgtcggataaggcactgcatgagaaggaggtgctgttggaaggatggccgaatgcgcgccagctactatgtcgttggcacgtcgaaacgtggttgaagaaacagtgctccagactgggagacgtcgggcctacagaaacgaaggaactcaagtcaattatgaaaggattggtgaatgcggcatctcaggagcactatgacgacctgaagaaggctctgctcgagacagtcgggaataacgacgaaaacctgctctacaaaagttttatgaagcactgggatacgactgctgacgagtgggtgatgttcaagcgtggtgacgtcccacacctgatgaacaacacgaacaaccgtctggaatcggaatgggccgcctcaaataggttattgacggtagtttcactgttgatgagctcctctccatgctgataacaatgcaagattacactgaagaacgctacctggctgatttccatcgtgtcagcagtcgccctcccattgctgaagatccagagttaactgcagtggccatgcatctcagcaactacgccttcgagatggtggcccatcagtacacattggctgtcggacctcaggcctgttacgacatggagacgacaccagatggcaaggcgagagtgacaaacctagcgacaggcaattcgcacgttgtagatgctcgggtgatattttggttcaattttggtggtttggtaaattttcgggtgctgtgactaacgctgggttttgttctaccaacagcttgctgcatgcgactgtatattcaggcagacctgtttgctcccgtgccgccatgtcatgtacgtccgtgccaagtctaactacgagacggtagttccgccaatggttcgtttcgctacccgttggatcgtccaaagtccagctaacaacatcgatgaggggcctgtactgacggggggattaaaccgcatcaactgcccaccccgccgtgccccacgagcactatccagcgacgcgaagtacagccaaggcaaacatattacagagaagatcatcgatgtcctctcgatccagccgtctaccacacacaaactggcaatgcagtggcttacgggtttctacgacgcgctacatactggcaaactggaggagttcactggccaagatctgtgtgcaacaagcggcttcaactcgctgtctctagtctcttcggttgctggtgtgacagcatcgcagctttcttttgctgagatgagcagcgcgcccgaagacgagtcgaagtgcgatgtgacggcagggacggaccttgaagaaaaagcgcccgtcccagtagccgcaccaccggaatcgactaatcaccagacgactatcacaccgtctcagcatgagaatactgtaggtcgaagtccagcggatcctatcaccttagcatcgccaccgaagcgtaagggattgacgcggcgtgcggagaagcacgaagcgtcgaccggagagctgcaagttgcaaacaagattcggttgcgcatctcagaagggagaaaggcgcgtgccgttaagctctcggacatggcgattcttaaaggcccgtacagcagacgcaccaccatgtcgttcatcgaaaggttgagcttgccatccgtggaagtggctgggaagctcgacgttcgtagcttcaacattgggcagcccgtcccagtgattaaggcgattcctcaactggaaaagatcgaggaggccatagaagcaatcgaaaacaagagcaacaaggcgctgcttgctcggtgggaggactatgggtttgccacgtacgggtaattgacgctcatggctcgagtgatcaaggcacgaaacaacttcaagttagtcgaagatacgatgaagtggattgactccttggcgtttcgagttgccagtattgtgtgccgttcaaagacatggaggacgtgactaaggtaagatttccttgcaccgaaagtataccaaaagtatactaaatcaccaaacttactgatgtgctttgtgtttaggtggaccataagcaagcagtagacgagctgaacctggggcggtggtacgttggccgacatgaacaaaatggctgtgaattcctggcttttcgagagaagctctggctgcactcggggtctatcatcggtggtcttttggcactccaatccgagtatttggatgttgccattgtcaaccctcgctttcacgactttgatgatgctgatcagaagatgtgcacagcaaaaggatatggcgctgcgaatgccagggccaagttcgtgtaatgggcctaccttagctcactactacggcttacacgtatgccacgtgtatgaggaagcgtaggtttcttttacttgagtaagtatactcgagatccacgagtatactttaaacaagataaagactccaagtagcgagttttggtaaaagatgagaactgctatttgtgttttatgtttctgacttcctctaaatgtaatattctaaactaggaatctgccaacggctggttggcaggattctgctaacatgcaagtcactcattggctaaaagatgctgctttcagccaataggaatcctaaatgtgtatggaccacccgtcgtggtggttgtaaatgtatgtagtcattggtgtaccttacaccaaggtcgaggaagtgttcaaacctctaacagacatcgcatctgttagagtaacaagtgactgtagccacttgtgcgtgtaaccccgttacagttcgtcatcagcgtgattaacttggggcaccacgggggtgcatttttcgtggagacggagacgaagatctgctacctgtttgaccccatgcagctgactagcaatttgtccgcgctgaaggaagcagttctcactgtggttgagaagatgctggacatgaccgaccaactggactaccacgtcattgcccactaccaacagagggatggtacgtcgtgtggcatttggtgcttggtggtgttggaactactactgtttggtgcaactcctgaaacctggtctgactactggaaggactctctgtacgaagtggtgggctacttgaggttgcgctacctacggaaggtgattagcttgcagcttcagcagccccagcaggtttagtaggcaccctaacttcaatacatatctttggtagatgatttttgtgccagatcaaaacaccaaagtcataccgaaactaagggactttgttagcgtttgtggtagttgaaagtagacgccactccaaatttttgaatattaatgtaccttgtattttccaatactataattaagtgctcctataggtactcatcctcatctgtcacagatgttgctgtgaaagagagcattggctaggatgaatgaccactataacctatgctgatacaacgcacaggaatacgtaaattactggctccccgtaatatattcttgtagacgacaagcctcgcacccattatttgaagctatcatttaataacactttctgtagcagcaacacgatcccacctaaaattgtcgatcaacaactgggtgcatcctgaaatcacattttagatttgtgacgcacatttgtccaggttatgatacatttactacgtgattatactcgacgttgctgcctctacggagaaaaatagtactgaaagtaccattattttgaggctacttgagggtatccaatgggtttttgtataggatggtcacccctcttggcaaccccttttgacaacctcattttattgtgccttttgtttaatttgccgacagcaaaatcggacttcaagtccgattttcatttactaaaacaagggagatagtaattcgttatagtatagcttccccgaatatcggagttcggttttccgtgctttgctccttcggttttgctctcgttttcattcgaggtcccgaatggcggtgatttgttcgccatctgggacttcggctcgaaaagcgctatcgctttccctcgctttcgattggaaagcggagtcggatcaccatccctccgatttttcaaatcgggggtaggtcccctttattttaactcgtaaccctacctcaatagtaaaagtgatagtttttgaggtccgtttagccaaaaagatgaaaggcacaatacgtcacaaatttactccactgcttgttttctttcacttttgatacgagaccaatttgtgatttctggattttttttagctgtaagtgggtgcatccttttaacattccttccaaaatcagttttcatccctgttttacatcctaatcactcattactttaatttaatttaagttacatgtagctgtgcggtatgagtgagagcaacgatggtagctgtaagaatagaaaagtgtggcatcccaacagacaacgcatacatcacccttctcatgttagacaagtatttgaatttgaatttgttgcggtttaatcggctacctactcccggagacgcatctccgcgtacggtgatcgtgtcgctagatctctaggatatgagcccgcggtaggcgcccaatatgttagacaagcaacaagaaacttcacgctgccaataattccaatactaaggttgggaggggtactgtactaaattttcagtggagagtggggtactttaagagggtggggtactattagagggtggagtattacttgtaagtccccacccaaagtaatcaaaaatgagaggtggggtactaattgagggtggggcacaattagaggttttacagtatttagtccaacataccaaaaatggtccaggatggacaaattttcctgtagccatctgttacttttgctcagaccattcgtccaacgccggtgatggaggtagggcgccgccgggattgaactcacaacatacctgtagaacatagctcgttagaccgttacaccatacaggcgccccggtcatcgtctcttcgggctgggacttgacactgtctgattgcatattccaacactccccctcaatcgagagtgtcaggacctcctgattgcgacctatcctgcagcttgttggtccgactccaacgccgttgctgcaatgacctccctgggtttaaggccacccgtgtctccccctggaaacacattccgttcacagacacctcgtgttgtgacacgaaccacacaaccatcactacgatccacattccagcaaccattgaccatctgcgttctacgcgcttgggaaacgtattccttctccatgttgtaggtcggctagccgtgcacgttttgcagagtgtggaagacactccgcttggtcgaaatgtgccgcaggaccatttttctggcatctactgcacccattcgcactcctcgtccagcacaacgttcgttttgcgtacgctgcggttcattaccgtcctcgcgaacccgatttacgccgagtcctctacgatgcgcttagtcaacatttgccacacggccttcttcgttacgaggatcgacgatagcgatctccgctaggatgacgatgacgcacaagtggcgccaagtttgaaagtgcaacttgaagttgcgcctcgtcacagggtcttgatttgtgagtgaccatcactctgtggatcttcgatgtttggtgttatagcgaaacggcgcagtgcaaaatggcgccaagtttgaaagtgcaacttgaagttacgtctcgtcacagggtattgattggtttgagtcgcgggagaccatcactcagaacacgcattagccccggtgctccatgttgcacttcacttaaagcgacaggggaatgggcgataccgcgtttggaggcgtttggtaccgaagccgcctagcacaggtgggtctcattccgcaatttgcaagataccgggtaagcgcaagaagcccccccccccccgccgactcaacccccgtctacacgtatcaaagcgtcaagatgaagttcaatcagctctgcgacctcgacttcctgaccgccgagatccgcacgatggcatcggagctcaagctggtcggcttgctgggatggaagattgctggcaagcacgtcctgcggtgtctacaagagggcgcttccctgccggccctcgactccaacttcttctaccaggatgaaacggagaagaggacgaggaacagcccagagtatccggacctccacccgaccttcgtgagatactgggagctgtgcgaacgacttcccgaatacctccccccaagcagcgtcaattcgggtcccatgaggcgcgcgatggccgatacgatggagacgaacaccatcaacatgctgggtcttcactttcgaaggaggcttcaccagtacatccggttccgctacgcgacgacgggcaagctccaactcggctataaggcgacgcggaagctcgttgctggctgatatcgtgtcaaggaagtcccccacctcgatgtcgacggcgtggacaccggcaacgtggtctatgtatgggacgaaccaagatccactgcggagcgtgagctccacgactggcttggcttcgtgccctgggagtggcgcattcgccaaaacccgacccactttttcgtgaagctatacgacatgctccagtggatggaggcatttgtcgagaagcacccaaagacaaagggcgcgcgtctctactccctgcctccttactccagctcattcatccccgcacacgtgacgctaaacattacgtcgctgcatcaagtgttctgccgacttttcacggaccctgagcgtcaggcagaagtcaagacgtatgtgaaggacgagcttggcgtggaatgcggatctacagagcaagttcgccgccagtttagcgaaaacaaggatgctgtttttcggaagatgtttcggctaaatggacttgagaccagcacacgagagttcgcgtaccaaatcacaacggatggctatgcagcttccgttttgctgcgccgccagacgctttgccgcgaggatgacgacaacgcggaccagcctcgcaagcgccaaaagaataataaaggtgaagtagtcaaggctccggaagcggtcgaggaagacgccctcgaagcggcgatgaagaagttgccgcccggatatgctcctgacgtcatgatcggcatcgaccccggcgtgaggactgtgtgcaccgcggcatgtgaaggtagccttccaactcggcagtcgcgacgccgacggaatcgacaagggaagcgaaagcacaagatccgacgggcgaagcacaagcgcaagaaccgacacaggcagcggaccgtcgccatcaacacccgcgagtactaccacatgtccaaggctggcaagcatcgcttctggaacaacggtctgcgggagaaggaggcttcctacgccaagatccttgacggtatgccgacgttcaagacagcaagatatcaagtctacttggatgaactgcggtattttgtgaagcacgcaaagtacctggtgctgttctcggcacggcacttcttccggaagtggcgctttttactgtactgcatgaaaatgaaggcaatcgacactctggccaagcggcttgtgccgacaccaagtccacaggtgtgcgtcgcattcgggggctggagctgccaagacggactccggggcaaccctcgcgatccggtgaaggcgttcaggaaggcgctggagcggcgcgctactgtgctgccgatggacgagtttcggaacagtaagctgtgctcctgctgccaccagagtcttcgcagagcccgactgctgaccaaggtcaaggacaaagacaccaaggaggacaagatcgttttgaagggcaacagaaacgtcctgcactgtaagaacagtcgctgcagggcccacttctggaaccgagacgtcaacgctgccatcaacattttggagctgctcaagtgcaggctgcttgacctggcgaggctggcagcattccagcggtaatgacgaccaaggtttttgaaatatgtgaggataggctgttgtgtgggcatgcgctctgcgcattgtcagcgcaatggggttccgtacccgagcagacggtgtggaggagggaaactccgatgacacagaagccggtacatttttttagtttaaagaagggatttttttttccttttttggataaataaaaaggaggtggagacatagaaaaaaagcaagcaatggtgtacgacgtaaccgtagacgagtccagcgcgcagcagaacatggctggaatgaagtttagaaaaaggaacttgataaaccggtttatcaacttcgtcggcgcggggtttcaaagtttgaaggcggtatatcggtatttgctgttcaaaccaatactcttgcaaaaccaggaagtgtaacggatcgcaaacggctcagcttcgcttcctggagctcctatttgctcctcgcgcagatataattggcttcggataaagccgcaccctttcagtaaggtcgtggagaaaaggcaaaggcacgtacatgtagtttcctcactcttggcaccttttcccggcagcgtatccaagccgcactatcgttccaacgcaagaaaggcaaatggcgacagctgcgtacgccacctgcagcttctaggacgccgtggcgcgtagcaacctcaccatctttgctggagacgtcacatttcaattgtccctgtttcgagcacccctatcgtctaccacttctcgtcttcaacacttctcccggcccccaagctccacaacttcgttgtccctgaatcacatcaactctttgagagttcgccttcgctcctcgtgcttttatcggtaagtgctaaatgaatgccggaatcagcttttcgctatctagattgctctctctctctactaatatatgtagcgggccgcgccacaacgcgtgactacggcaaacgggcggtcaaataacccacttcactgtcgtcgccagaagcggtcgggttgcaagtgacgatggaccaactctcttccagtcgtgatttcaatgctgaaggaccagcctccactcgaggtgctcgaggtgttgatacagcaccatcgtctcctgtcgagtatgattctgaagattactgtgatgacactactgaagtgacggctacacgaggctacgcaaatggccagcagtcccaagtggaatctgctgttgctggagcaagaggagggcctgcccaaaacgtcactcacaactcagcatttgcgcgacttccgttatcagaacaagcaaggacgtcagcatcccaacagatacccttcacgcaatcagcacccccaataacttcgagtctaccctgcggtgatttccgtcggacgacttcgaactccgtaggacccggtgctggagctacgacaccaacgccgcaccagccacccgacgttactggccgtgacttttgtgagtggcctcccgagccgacggcgctgtatgatgcagacgatattgctcggatcccagcatgaatccgtgaggcggtactccagtttaggccaaattaaacgtgtacgccgatgcctctgccccgaagccatcggtctattacgttcaaatatggagtccgcgtgaagtgctggttccgcgaatcccttgttgtcgggtggttgtgcatggcaagcgatgcgtgccgtcgggatatcacgttcctgcccttccatggagaaaaaccactaatgctacaaagcacttgtgggagacgcaccaaatccagtctgaaaagacgaccctacagaatacgcgtaagcgggaccgcgctgaaggggtcaaccgcattctagcgtccgcgttatgccgtgacgatgcgaagcgtttgtgtttgttgctggagacgattcgaattgtctacaacaacttgccattccggtttggtgagtacgaagagtcagtcattctgaaggaagtcgtcacaaaagatgagttcaagacaacagtgaactcaagaacggtgacaaattcacttgtcgagttgtacgcatccggtcgccaagagctgatagggttcatcagagacaatcgtttgggacttatcaagtgtttgacgatggttgttgacttctggaccccaaagcatggtggcgaaaagtatctcggtttgcgcatctacttcgtcgactcccacttccgactgcgtactgtactcgtcatttcttgcccatgtatggagaacgcgaccaagggattcgcggcccttttgagcggtggatttgcggtattctgtttgactttggcctgtccccgagcgacttcttcggctccaccactgacagcggccccgacgttaaatggacgatgaacgaagggcttcgattgaagtgggaatggtgcatccctcacaaggtgaacgctgccaccaagatggcctgcggcttgacgcgaaaatcgcacaatcccgagatgtcggcgttgctaaacaagctatctcaaacggtgtacgacacctccaccaactcgacgcttggcgatctgcttcccatgctgatgataatgttgggggaaggcaatggtacccaactagtaggctacaagccgcatcgcttcatggggatggcagccacgatggagcgggttctggagaagtggccagctctggaggcatggtacgaggcgcgttcagctcagcatgcacggaaaaagaagcgagcgccaccagggtttcaccttgccggttgtcaacagcatttggtgcagctattatcaatccttacaccgattcttctcgtgacgaagcgatcacaggcgcaggatacgaatcaagtgcaagtcctgctgtccttgtatacgatgtgcatgacttctctcgcacttgacagccccatcaggcgctacgacacggctccgtcgaacgccgtcaatattcacccttttcaactaacatcgctggtggcgaggacaaggatgctgctacagaaggcgttttaccacaacttcttccgccgatatgtagacattgtatccggttcctacatttttgagatgcaactggtgatgtatccttcggttaagcacgtggggagtccgatggacgaagtgattgccgccgttgcacgtactgaagggagaatgcgggatgatcttgttgctggtcatgttgtcgccgtttgagctgcaattatgaagcgcttgaagtcgctaatgcgcttagtagccaacagtcaagacccagcacccgttgatccgattgctgctccagctgtgcaggccaatgttttcgatgacgacattttggcaacctttgcagttcaacccttccgaagcaccgaacgacctgctcaacaacgtaacaagcacgatactctcatcgccggtgagctgaaaaggtggctagaagattcggatgggctgcagatgataacagttcctgatccagccaagacgagcgtccgcagaccggagagtatcctggaattttggcatcggcagcagcagtccaagcgctatgtcttgctacccatggttgctcgcatcctgtttgcagtcccatcttcgtctgctcagattgaaagggacttcggcaacagtgggcaaatggtgactgccctgcgagcttctacaagcacggctaatatcgacatggcttgcttccttcatcaaaaccggtcatttgtcgatgtgtgccagtgcccaaagctgaaagcatccgaagtcgacgaacacattccaagcaatgtcaagattaacctggaacccgaggtagtggagcgaatggaatggaatcagctggcacaagcgtgcttttcgacatcaagcgcaagcgcatttgcttcttacaacgaggaggagacgaaagactcaagctgttagtttaaacgagtaggaggcgaaagactccagctggtagtttaactgcttcatatattcaaatatattcacctagcatattcgaagtggctttagtagtcaattccatgagtttgtcaagtccagcatgggataaacattacgaatactgcagcgcttttaccttcgcttggtgtgatttctccagcgcacttgcacgttcggcagcgcgtaatgctgtttcgagtgtcagttccgcgcggatttggtccagtctcgatagattggccacggcttgcggcttcgaggtttgagctgcggttggtttacgcctcactttacctgctccagctctaagaacgcctttggggtgcaatgctggctgatcgttgctgtaggaagtcttgcgaccttgtcgaccttgtcgacctggggaactagctgcttcatgatccgactttgcctcgtgcagcgatttcattgttgcttcgatcgagttcctgaatgaagtcatcgcttgattcacctctgcctttattcgggaatccataatattctccttgtcttgaagaatactctggttcgagacaacatcttgctgattgtggccctgtgtagccatctccgcacgaagtttcacaaatttacgctcctgcttgcgctgcagcttgtttagttttgcgtcaaaacgcagctccactatcagcaacaagtttttgagatccgctgtctagattctgtctttcagcgcgcaactgggcagaaatcaaatcagccacgctggagtcacgctgttgaagacgttcatcgacataggctttcattaccgctgtcgctttattattcaccgctgtactgcacgactccatcgctatctgaaagaagtgctgcgtccacgacttcgtgtcctccactttgcagtccaggtcactcatatgcgcctgcatctcggttcgtatcctctcttctgaagccccttactacactgtctcgcctgcacagctaattggcgctcgacttctgcaacgtgatgttctcgctctgcacgaaggtgagcttgaatatcgttctgcaggctgcgtgtctgaacttgaagctcttcattaagtcggtgtgatgcttgaataccttctaccatctgctcgttcattcggcgctcactttcttggcgggtctggcgcaccagagtttgttcttccgtcctgcgtctggcctcctgcagctgaagctccatggcttgacgctcgatgcttccgtccaccagcaccagatcttcttgtacggataggtgtttctgctgatccttgatggaaatgcttcggttgcgcctcgcgtgtggcgggtttccgctttgcagagcttgatcatcgtcgtggagctcacttgtgtacgatacaagaggcgcgtatgagtgctgcatactgcctcgactggtgagcaagatgcaatggcgttcacggtgcagggaaagataccgtatttcgcatgtagaaagctgcaccggcatatgagatgcactttgataactaccattcttttttttacttgctcaaaaggatttatctcattttctttttattattattgtttttctttttaggctggtggaacagtgatctttcgctaaggttcctacattttcactttggtcaccgcacgtcgcatgcagagcccgggatgacttcagcggccactggaccgctgaagtgctggtctacgctgcatctattagggtggtgctgctgaaggtgcctccccatgctacgtctatttgccagcctgcagacgtagcatggaatcatccgttcaagacttggctgcgcaggttttggctcgaggacatccagcggcaactgatgcagccgcgcgacgcggaagccaagtttaagctgactccaccaggccgcgccgggatgtgccattggattcgcgctagttgggagagcctgagctccgacaccatcgcgaatggatacaagaaatgcgacttacacctcaacgaggagtgcctcgccgccgcgtcgctggtggcagagctgcagaacctatcgctagtagggccagtggccaaggcggtcgaccaaactcaagacttcgaccgcaatgtcattcttgacgaagctgtggtgtagctttcttctacaatacatattttgatgcacatcgttttttaaaggtatgttttctgttgtgaacatcatgtgcagctttctacatgcgaaatacggtatgtgctctggtaaggccgcgcacttaaccgagaagtgcccgacgtctcacatcaaggctatccagccaatgggagaagctaggcatgaactcgtcgtttcgttctctcgaataagttaaaccttcgttcgcttcctcccgcttaagttttcatgcgtttgaaccttaaaacctcaggaactgcggttcctgaggttaatggattcgtcagttccgtggccagccatgcagcagaagctgctgcgcgacgcgcagtcgacggacgagatggcgcgcctgctcagccaggagatctctctgtttcagcgcaacatgtacaaaaaccacagccagcaccggcgcgccttcttcttccagaacctgcagcaggtcaagcgccgtctgcgcgatttcaaggtggagaccctcaccggctgctttgcggaggctgcgggcgtcttgaagcaactggagctcgacgcaggagcgcaccacatttcctggaagctgctggcctccgacctcaaggtcggcacggacgccgtgctgcgcaagctcgtgacgctcacaagggcggccgccgaggtgatccgagcagctcagaaggcctacaaaggtgcggaactgtagcgtttatactggtgtgctgtgtgtactgagctgatttggtggtggtgtgcttctgtgtgcagctttaatggtgcagttcgccatgacgtacttcatgccgttcgcgctcatgatgaacagcgtcctggcgcggttgacggtgctgttcaagacagtgatcgtgcgggcgatcgagctgcacggaggcatcacgctgctgtatctgaacgaggtgaccaagtcgaacccgctgcgagccaaggtcactgccgtgcagctccgcgggtaccagattcccagtgacattctccagctcgccaatgcgtagattggacaataagcattaggtacaggcagaagcgaggagtaacacacgtcgtaaaatacatgatatagacagcaagccagcatgaatccaacatactacaggtatgcggtcgcctcgtgaggtatcgggaacggggactgcagacaaaatggagcagctttgttgcgcggaagacactggcgactactgcgcagtctctaatcacgagctgttcgggggagtggtgtagccaacgatcgtcttgtggaactccacgacaccctgtgagagcagtcaactcctccaagtcaatagccgattccgtcgagactattttcaataaaaccacgcacctgcacgctgaggtccagtactcgtgtcgtcatgtcctcatccatttccacctgcacaccaatagtacgcatcgtgggcgctgcgcaacacaactccagtcagcagcatacgcacccccaaatcccagtacgctccaattcaaagctcctcaccgctacaggtacacgacttcttggagagaccacagcgattacacttgtagttggatggcacgagtggacacacgtggcccttcttgggctctccacactgcagccagccagccatacgcacagcaaattagctcccagctccaccctaccagcacccgatatcttcctccttcgcaccttgctgcagcggtagtttcctcggttccggttctgctgcgtcttggtgctcaggtccaggtcgaagctggcggcgtccagccccgccatggccttgttgccgtcctgcagctggtccatgaagccgcccgtcgggtccgccatcatgggcatggcccctatgccgtagtccatcatccccactacatgggaccgagcccaaaccgtcagttctgcacccaaatcttacatcaagccacggtcattatagtacgcactgccattcacgtccatgggcatgttcccgttcatcttgcacgcgctcggctgaccgaagcaaatgtgcgtcttgcgtgcgggataaggttgacgagctgagaaaaatttcggccgcgtcacaccacgtttacaccatctacctattcagccacatactacacgccgcatgccgtagcatgggaattgagccatccgccccaagtcagcgactccatccaaagactcgagccatgtccttcagcttcggccagaccagcggcggcggcagctccggcggcttctcgttcggcgccagcagcgccgcggcgccggcctcgacgtccactgcggctccgagtggcggcttcagcttcggctccacggcgtccacgacggcgtccactgccgcagccccgagcggcggcggcttttccttcggcgccgcccccgcgacgtccacggcgccgtcctcgggcttcagcttcggcgccggcgccaaggccacgagcgcggcgcccagcaccagcagcagcggaggattcagcttcggagcgacgtcggcagcccccgcggaggccaagagcagcgcagcgccggctcctgcggcgcccacgggcttctccttcggctccaagcccgctgcgacgtccgccgcaccttctagcactagttcgggcttcagtttcggtgctaaggcaccggcagcgcccgcagcggaggccaagccggcggccagctcgggcttcagcttcggggccacgtctgcggcggcggaggccaagccgacggctgcgcctgccacttcgggcttcagctttggagcatcgtcgactggcgcggaggcgaagacggcgaccacgacgtctacggcgccggcgacgggcggcttcagctttggagcgaccagtggagcgtcgacgacgacgatggacgcggccaagccggcggaggccaagcctgctacttctggcttttcgttcggagctactggagctagcgctgctacggggtccagtgctgctgccacgagctcgtcgacgaccgcgtcgacgggcggattcagctttggaggcgccaagcccgcgacttctacggctgcggagagcaagacagacacgacaactgcaccggcgttcgggttcggaacgtctagagcggcgtcgactgctggtgcgtcgactacggcagccacttcgactgcgaccaccacggctatcacagcagcggcgccgaccgagacggacaagcccccggctgagtacatgggccgaacgatcgaggtgagactggttggccatgtggtggacttatcaagcatattactgatggtttcttttcgtatgtgtcgaattgcaggatattattaatgcgtggagcgagcagctcgagcgtaatgccgacacttttactacagaagccgttaaaggtacgacaccctctccagccatcggatgctattacgcttgtttcatgtagtgatgcgttttgctgataaattggcagtaagcaagtgggacagcgacctcatggacagccaacggcagctgggcgacatcgccggcgatgtccggcgcatccaggtggctcagaacgagctggacacgaacctggacacgatttttgcgtatcaaatggagctgaagtcaacgcttgaggtgcgaatgtggatagtagtgattaactgcttgggtacttcgatctaactgttgtggtggtaattgcgtgcatttagcaattggagaagagcgtggacaagatgtacgagtctcaagatcagatgcctgtcgctgctgatattgagcgcgagcagactctgcagctatccgtggatatcgacgatcagttgaactcgatgacgacgacgctgaaggagacggtagagaaactgaacaaggcccaggtcgacgtggcagacgacaacaatccgatggtgcagatcatgaaggtgctgaacgtgcaccacaactccctccagtggatcgagggcagcgccggcaagatcaacagtgaaattgcgcagctgtcgcgtaaactgcaggactcgtccatttaaatggctccgcacgaagcacgccgtgagttgcaagttgcaagaagagctgctttgtgccccgcaagctgaagacgcacttgagat

SEQ ID NO: 25 - DNA, 14416 bp, Chlamydomonas sp.
  variation 996: note = n is a, c, g, or t
  source 1..14416: mol_type = other DNA
aaacactccgccctagatgataccgaccgtaaggaccgttgtgagattgcaagccagaggtcaaaaaggctatccttttcaggcgcacgacttgcattgtacagggcaaaccccacacgcggccagtccccgtaattagttgcacgaatgggggacatgacctgcatgacaagggatgtgatgatgtcttgctcagacattgacgtggactctgtagagcacgcactgattgagggagcattgatagatgcggtctcggacaccgttgacggcaaatccgtgtagcggcggtgcaggtcatcgtcgcaaagctcttcatgtacaggatcgctgttatgaacatcagtaccttggtatctgcggttgtccattaggaagcgcaacagcgtctctggcatctcagccatttttcgctcatacggcgcttgtgcagtacgccaaaccttgccaggtgtagggcacacgctaataagtcctccagttcctgtactgcatacagtctttatgtcaatggaaagcacttcttcgtcgtaatctttgttgacaagactcatcagaagccgggcttccctggttcttggtacaaacttccttgcgccatcgtacgtgtgcatgtcatcgcaggccggtgtgcgcttaaagaagaagtggcgccctttcgttgtttcttggatgactgtgtctgccacctcgggatatgagttctccaggccgtcagccacgcgtttattgtcaacgtcgaccacaagaagttgggaccgtagcagaatgaggaccccttgggcgcagttgggcctgccttgttcgtcccactgcctccacaggtcatcggagggcacgttttcatgacgccacgccggttgcttcccgctacccccatccatgttgtagttattcctggtggggagcagaacacagtctggatgctcgtggcgcaggaaggcttccaactggatcagcgtttgtgacatgtggctggtggtgaggtggtggtgnacgcacacgcacggggttgctgtgtgactcaccccccaccctacacacttcggtgtgctagccataaagctggacataaagcgatgaagcgcacattgtgtgtcgtcccaccgtgtcacgatggacgttgccgaacttatatgtaccaagcttcaggcggacatctgcccagtgtacacgcagaacgatgcagacgctgacgcgcgggccctatgagcggcgctgggcctgcccgcattaccaaagacttccttctccaaatctccttctccaaagtcctacttctttgacgaagcagcgaaagcactgcatgtgcagaaaggccaatgggatgcgctgtgtcggtgcgtcaaggaggtgggccgcactcgaggcggctcggtgaggctggacgctgagggcgtccgtcgcaagctcctcgctatgttcaacggtgacgccgtgcagtggctcgcacacgtgcttggacacggatgccccgtctggttcgcacgcgtactcctgccgctgcctgccgaccagccggcactggtgtcacaactccaggaagtatggcgtgtcctcacgacacagccgggcacttcggacacaccggagttccggcaagggcttacacaatactggaagtcgcacgtcgaagaggagtgcttacgcggcagacacttgccgttgggctacatcatctcgctggtcaaaaacccatccacaagcaagatgtacggcatgctcctgatgttcatggaaatcggttcggcctcgccagtcgcgaggatactccacctccagctccagctcgagtcaacatcgtggaccttaccgcactggctggccgcggcaaagagggcaagttctctgaaagagcgcgtgagctttgtgcgaacggaggatgtcgccaaacgctgcgtcatgtatgtcgtggccggctctgactcagcgacggactatcaccagctcaccacggatcttgtttcagagatgcacttgggcctggtcacgcgtgcggctgcacttgcggagcaaggcgtgacgctggactttgaagagccgctggacttccgggacttcacgagcctcagagagctccgttacgcagtcgagcgccaggaagcaatcttggacattcaccgtgagtacaatgcatgcgggctgcgcgccatcatcgactttgaggaggtgctcgatgcagatgggtttcccgtcctgacccgcgtcgtgcacaacgcgtctggcctggacaccagagtgctggaggttatttacaagctcctgggtctcgaggtcgaaaagaagaggggttatgactggccgaatccatggcttgaggacaacccgcagaaactgcgcaatcggtttgagcgccacgtgcagctgcgtgacgcactcgagcaggcggggtgccaggtaagggaggactcgcgcatatgcgcggagtacgtcgtccacggaacatacagcggggcgcgcatcgagggtggtgagatgatacctggcgagtcaaagaagcgtcagaagggtctcaatgcgctgcagagtgcagtggccatgatgcgggagatgcagttcctgtttgacaggacggcgtactccaacttcatggcaaacgtccgtgacacagagaaggccaagatcctcgccgtgcgcgactttgtcaatagctcgccgaagactcgagatgagcgagtcaaagagcttccaccacggctggcggcactcgtgagccgccacgggacagaaccgctcacgcaggaggaggagaccctaggcgagagccgactctactacgatgattacgacacggaatcctcgtggtccaacagcgagtcaagcaatgacgactactggtgaatctctcttggaggaggattatacaaacgcccactcaagcgacgatgcaaaatggccacgcgttcaacactgacgttggctggtcgatcccggcgagggtccgtcaagcgcgagggcggttcctacagtgagggttgataatgaatcgaaacagagagtatggtggtgcaatgtactccatcgagtttcggaggctcgccgtggcgtacctgcggaggattggcagttttcggaaggccgcaaggttctgtaaaattagcacgagcaccctgcattgctgggctactcgaggtgttgcccatgggttgaccaaaccaaaagggcggcccgttcgcaagtgcgagcgagccctgcaggtcctccggtcgtttctgtgtgcaaaccctgtgaccaccctttgggagatgcggcaacaccttcaggactccttgtcactgcaggttggcatggattatgtccgcaccatgctgaagcagctcggggtctccaggaagcgcatgtcaaagcgcctggccaggccggttgacccacccgtacagcatgcgcgcgagaccgctttcctgcaaagccttcagcaagcgttcaccgctggatcacctcttgtttccattgatgagtgttacttttcggagaaaacgctgcccatctacggttactccatgcgcggtagacactgtgtcgttcactccccctgctcctcctggaaacaccgctctctcctcatggctgtgggagctgacggcacaagcacatcggagctcgttcgtggtcctgtcatccgccaggtgttctgcaattttgtcttggcattgccgtacccgcctggggccacgcttcttctggacaacgctagcatccaccgtggaggcgcttgtcaatcagctttccacgagaaggggtacatccccctattcacacctccatacagccccgagttcaacctcatcgaaaatgtgtttgcttgggtcaagcacgccttccgcgcgtcttggccgtggccagggggggctggacgcatgcgtccaggccgcggtaaggcagcttcctgcaggccatgtgtggggcagcttccgccaccttctcgacaggcttctgtagtcttctggggtcttctgaagaagtcaggaggcgcactggaatatcccacataaaagccgccaaagctactgcttgagtaccacataggatggcatgcctccaaagcttggagtactctccaaggagatcctggtcaaacggctccaggcgagcaacacgcccgaggcctgtctagaggatggccgaaattacacttgccaggagttgctggagcaagcccaccgcgccaacctcgtcaccgacctggagtacgaccggacggatgagaaggagaacatcgtccgcaagcgctacctacggaccatggtcaaggacccagtcttcctggacgccatcgagcgctacgtcaccgcagcgtcgctggtgcgcgccgcgggctccaaggtggccaacctcttcgtgcagcacgccttccaggccggcctcttcgaccagtccagcttcctggaccagacgttcaaggacaccacgttcctcaagtactgcatgatgcccttcaaggcgtcgttgccgatgccgggcgtgtccatccgcgaggccgcgagcccgccccaccccgagctggcgcacgtgtggcaggcgaatctgccgctgctggagccgctctacccaactctggacgacctgcgcttcatgagctgggaccaggcgctcaccgacatggcccgggagtacgagggcgcgctgaccgcgcacgtgacgacgcacttgaccgctcgagtgacgcggctattccagcgtcgcatcgccgacatgggagggtacacgcgcaaggacgcgcggatgggccgtaacgttatgacgtttcctggcgacgcagcctgcttcgccagcgacgcatacaccgccctcaacgccggggccgggcccagcatgaggctcccacccgccttggcagcgctggtggccgagctgcgcaggcgctgcgggctgacaggcagtgcgcgtatggaccgcttgaacctgacgccgagagtgttcaagctgcacatggagttgtcccttgaggccgaggcgcgcggcgaccacgcctggagcgcctgccccatcatcaagacgtcgcgcacgtttgcgtacatcgacgagcgggtcctcaaggagctgctggcgctgtgcggcaaccgcatcggtggctccttgtatgaggagcgccccgcggcagctgcgggtgtcccgttgctggcctgggcattcggagcacaccgcagcgcatggctcgccgcgaacaaggccgctcgctcgcaacacagacaggcggccgtgacgggcagcggcggccggaagcagaagagtcgctgcggtgcaggcagctggccggacgacgcccaggagccgcggtgccgctcggtgatgatggatggcgtggcgctgtgcatcgtcctcgaggtgaagccgctgatgtcgcgagccaaactccgggagctgcaggccatcagccaggttgagcagttgcgccgcttcctggcgtcgctgtcaccggagaaacaccgctcgctggtcaaaatggcggaggacccagggcgcgtcaacctgtcgcaggcgctggtcaagtgcccgccgctggacttgccacacgcacccgcggaggagcaccaggagcgcctgacgcgtgcgtcctacctgcggcggtcgctccagacacgacacggagtggaggtgaagcttcgccgccggcaagaccagctgctgcgcttgggcattagccacctgggcggcggcggcgagtcctggcgcacttgcaaccctcgcgacttccaggcgatgctgcggcggctggcggtggtccaggacatcctggcggaagagcacgtgtacgatccttggtacgcgcgctggaagatgctgctgtggcggcggcgacagggggtgatggcgcactactacgccgacctcatccgcaagtacgcgcccaagggcgcggcagtggtcttgggccgtggtgacgccggcttcgccgcgactggccgcggtgaagtgtccgtgccaaccaaggctatgggcaaggcggcgtgcaaggcgctcggctcgctgaagacgcggcaccccaagagccgcgtgcagccgctggatgagacgcgcaccaccgccacgtgtcaccggtgcggcaacgtgctgcaggacatcaaggacgaccacggccgagctctgctggggctgaaggagtgccgtggctgccacgagcatctgggtggcaagggcgtggacacgtggtgtaagctcttgcgcacgaggccgagcgaggtggttcaccacccccaggaagagggggtggagctcttgggcgtaaggggcaacaagggaagggagttggagacgctgaagttgtgcgtggtgcgtggtcgacgcacccaggagcacacatccagggtcttcaaccgcgacatcaatgccaccaagaacctgctcctggtgctggaggcgctcctgcgaggcgaggaagagaggcctacgcacctgcggaagcagacgcgcagggctcgagcggttccgcaggagcgcggggaggaggaggatggcgttggggagctcgcacattgatgtgattacgcctgatggtagcgagtagaccggggtttaggatagttagaccccagcaacttggtacctgacggaaacgctggacggtgatgagcggtctgggggtacccgttcgattcattacccgacggcactgtagggtattacactaaagcccatgtcgcggcatagtggtcccagacctacggggatgcacaccagagtgaatgtagtaggacaaacgggccgtaatgtagataattgacgttcggcagggaagatttagtagacgcaccagaacacgcggatcacaccagatgtcttacctactcaatcttgcgtccgcggaggactttgagcacatcatggagtacggcggcggcaaggcacgcatcatcggctacatccctgcgcgatacaccatggtccgtatccgcaacagtggtcccgtgcaggaccccaaagacacgttccgagtggtgaacgagctaggcttcgtgcccgtcggtagcttcacgtgctccggttgcgccgcggtgcacgagctctccttgaagagcatcgcgcgggtcaccaaacacgcgctgtactgcaatgcttgcgcaaaggtgagcccaacggacgagttcgacgacgaggacttctgggtcggcaagcccttcgtgcggaggagtggttgcgcgtgggccggtggcaacctgacgccggacgggcccctgagggccaagacatcccggtccatgcctgattggaactcatcgtggaaggacgagagactcctccgcgtatgggaggacgtccggcctgacgcggagatccacaaggactgctgcttgtggcagggactggcggcgctcaggatccccgacctggcggtcgaccagatcatgatcaagatcatgacgcgccgcatcttcgcgcgcgtgtacgagcgccaggaggcaccgtacgtcggacagctgtcctatgccaaggcggcgctcctctgcgcattcccggcggtgcctacggaggtctggatgcgcatcatggaaatggcgctcgccctcgaccggatggtcaccgttgacgaggtcccgcagctgacgctcgggcggcgctgaggggttcaccccaccgggggtgggacgaagaaaggtggtgtcaccactgacctcgttgggacagactattttcgagggcaaagaagacacggaagacgagttacacggaaagcgcaatgcaacgagtgcactggtcggcgaccacccgcatccctgctctactgtagtgtcgaggggatgcaggacaatttttcggacttttacatgactttcgcaacatttcagcgcgtgtcacccctcccatggagcccgtcccgctccttcgcgaccgtctttggagccgatcgcgacatctcggcttcttctaatctttacgttgacctcaatggacggagccgaccagagactgaggctgacctgtcgtacttcagggccgaacatggcgttatgttatgcactcgtgattctttcctcttttctcgaacggtattgccggctacccagtgccatggccgctccaggccattgccttacaccttagtgcgatgccgtcgcgtacgtgtcagcgggctcccttgccgtgtgagcagggtctactgccgcacgagcaagctccagtaggcgcgcgggagaagctcgcgaagttcgcgggcctgggagagctcgcggagcgactcctcctgtccaggaatcttcctgagctcgacacgctagacaagctagaggagctgagggtcttcctgcagggtgaaaatgcccgttgtgaggtcctcaaggatttggctgctcgcgatgggctcctgaagctcgtggccgtggcgctgtggctgcccgtgaagccggcatacgccgcagacacggacaaggtcgagcaccaacggcgtgctgtgcgggtctacgcgtgcgaatacgcggagttactgctgacaatggagccacccgcgccgctggctgtggcagggcagctggagctagcccagcgcctgctcctcgacgagaaggtcaaggccctgcacgctgctggggcgcagctcgcggcgtcggcgaagctcctgcgggaggcgggcccgccgccgctggtcctgaaaccggggcgtctccatgcgtcgtccgtcttcttcacgcccatactgctcctgaccagactcaccaaggttgcggagggcgcccacggcgcagctctgcgcggcccgctggtggcggccctgtcgacatcgcacgtcctggaccacgccgcgctcttcctcaacacctcgctgcgcacgtgcgggcccctgttgacggagggcgagttggccaagatgtaccaagagtacgcaagggcctacgggcagttcctcgaccacctgatcaaagtggaggcggggaccaaggagcagctgcggcgggccctcgccagccactgggccagccacatggtctgcgccctggggtgggcagcgctgcgcggactcgacgccggactcgacgccggactcgacgccggactccggcagctagcgagcacgcacaacgagcagagcagagtcctaacgctaacgaccctggcgagcaggctgcacccaaacatgccggcgcccgcgtggggtcccttcgcgacggtcaaggtgctcctccgcgcgtggaccgctgcggcggcggcggcaacggcgcgcgggcccacctgcctgcgggggtctgaggagaacgccatggtcgccgacgttgtgatgcgctcactggtggactgcatcctgtcccgccatccctggcccgggcgctggacggatctggcggccgacgtctggcgtcaggcgtctctcttctgggaggtcgccgcaactgctgtcgtggggcttgcgcagatgctggacatcgacgcccacgtcggtacgtagtgcagtagccatttccaattactcagactcagatgttcctactctaatgttgcacattggtccttcccagtgcaggcagtagtggaggcggagggggtggcccaccaggcgtcgtggcggcgctggccggcggcgcgctgcccttcctggagcggctgctgcggcgcactgtatcggaggtcgtcgacgtccccaaggtcggccatgctgccgtggcggagcggctgctgcgggacctggagcagctgctgcaacgcgcagggccggagatagccaaggcccccaaggtcggccatgctgccgtggcggagcggctgctgcgggacctgaccagggacggcgaggccctcggacccgcgcgcactctcatgtccctcctggcctacggggacggcctccaggcagcagccttcgtggcctcggtgaccaagcacctgaggcgagcgctgcgcctgggagcacgcactttcggcggaatcgccttgaggctggccaccagcatcctggacgcggccgtcaaccccgcggtcttcaacggcgccggcgttccggtgcagagggcggagaccttgggcctcgtgctgtccgtcgccgtcggcgagtggctgccgatgctctcgagcctgctatggcaaaatgtcgtcatgtttgccgccctggcctctctccacattcaggttgggtggttcagttgcttccgcaaggtcatggactcggccgcgtgtgccggcgtcctctcgtcgtcctgctccaatgacgggtggcgccgcgacgcgatcacacaggcgggcctcgtgccgctggtgggcgcggcgatgcaagtgctctgagtcctcgagaggccccccagtcgcggagaggacgagcgcttcgtcgctgacagcgcggcacgcctggtgtgcgctgccccagacgaggtcctgcgggcgcacggcgactgcgcatggcggccggaggcggtgcaagtcctcgcgcaaacgagcgagagctttggcccgcgtgcggggcccatcatcctctgtctcctggcggcacacctggaggcagggtcaccagcgttcgaaagcaccctgccgcaactgcagccgagcaccaaacctgcgagcctgctgcaaacgctgtcgccgctgctcgtgccaccggccgaggcccggcggcgcctgggcctgccgcccgcctgcgccagtcccgcctgcgtcaacctggcgggcgacagcgaggtagcgctgaagcggcagaagtgcggggggtgccggcgggtggagtactgttgcaaggagtgccagtgggaggactggaaggcggggcacaaggcggcgtgcggagggccctgaaaggggcgctgagaggggcgcggggggtgaagtctcttgtagagtagactctttttgagcgccgcaaggtgttccgggagttggcagaggtggcgcttggccccctgattcagaagtcgaacggcatttccaacatttggcgcgggtggacggacgctggcggtggacgagttccagtcgacaagggtgtaccacgcagatgatggtatcatcctggagaaggtggcgaggaagatcgtcaagaggggaggcaaggtggagatggttgcggttcgaggcttgctgtggtgtagttccaccaagcagtcaggaggcaagttcatcaaccgcgacttgaacggagccctcaacatccgacgctgcctgctgctacccgagcggcccgcaagcatggacagagccgcctgcaaagggcagccgctgatgggtcggattgggaagttcatttcgaggtgatcttgacgtcaagagaaagaataccgggggagtagcggtgtcttgtgtagagcgctacagactgcggagtaggcagccgccgatgacgcatgaaacaggccctggtgttggagtcaggtagcgcgtctgcttagggtgcggagagacgtgcggtaggcctgctctagacacgaagaagacgggaaacaaatggatgctgaggtgtctcagaattcatttgattgagtgttgagacaggtaccagccttgtactgcccaccccgaatgtcctccacgaccaggtatccaagctcggcagccaatgatgcgatctcggcaggtacaaccagcgccccaacagccacggacagctgggcgccctgcagcacgctgagagagcggcacagctttgtgtacttgtagtcaccacaggcatccatgcccatcgcaatggcgcccttcaggtgtcagatgttgatgtggactttgtcgaactcttttggtgtcatgttgctcttggcctccaccgccatggccaccatgcgcgtcttgtcgtcggcttgacccgtcgtcacagcgtacaccaacagcccaccaatctcgccgaggtgagtgccacactgatcgtacaattagatgtgctgcatccggtcctccaggtggaacccaagctccgcttgcaccatggcggtgggggttaatagtgaccgccgtgggctcgagggctgagtcgtgcatcccggcagcggctgcagccggctcccccccgccgccagcagctcctgccttgtggccggctgcatggctcccggtcgcaaggccggcagaagcggcaccctcgcttctagccaacgccccggcataaggcagcaaatggcaccgcgattaaacggccggttcagagcgcatggtcgacatgcttgggagacgtcgcagggtgctcgcagcgggttggggcattttgatgctgagatggggcactgagcgcgacgcactcgcggttgtgcaacgagttgcgccaaacacatgtgtattccatgaatgctttgcgcgatgtgagtccctgcgcatggcctaaagtttcctcgtgcatgcgccaaggtcggcccacccgcgtgctccattcggcccagcccggccttttagtctgcgaggaacccgctgcacgaactttggcggcctctggggccccacagagtataaggacatgccccggtgacccagggtcacccccagctcgacttcgtgattcgacaggcggcatcgcgtcgtgagtttgttgccaggccttgcttatactgcaaggcgcttatgttgccagtactgggtcagcaggtggggctctttcggcgcttttcgggcacgcgttcggggcatcaatgctcgccgacgtcgctcgcgcacaagtgctgtgactcgcttgctggctgcgtgagcctcttgcagaaagtgcacttttgactgtgctcgcgacgcttgcgggctgggtcgcgtcgcgctcgcggcgcgtcgcccggcgctgcttggtcctcacgtcggggcctatcgattgcgctgggtccggtggccgcttgcggcctgctgaatatggcgccccgcgcggcgacccggggtcggtcgagtgggcggatcgctagtcattgagccgcttaactagcgtgtttgtgcgttgttgaagcggtctttgcaccagtgaggaaacgggagcgcgggggcagcgcggaggctggtttccagtgctggaaacgcgctcggggctgggagggcgtgccgcgttttggacgcgtcggcgttgaccacatttgaccgcattcacgcgcgatgtttggcttgttcagcagccgctgtgttgtctgcatgcagcgaaatgttcgttgagcacctgggagggaggtcggcgcgacgtttggcgcgcgagcatcgacgtttgcagtcggcctcgctttggcctttggagggctgcagtacgcagctcctagtccacaggctcgtttgatgtgattgtcgacgggattcgctgcttatcgcgtgcgccgatggtgcaatgttgtgtggcggcgcggcggtcctttcgccttgcgatcaggcgcgctgtgattgaatacgttgtgagagctgcgagatagtcagagaagttgaagtcgctgcgtttcggcgacgcgcgcgtcgcgcctctatgtgcaagcggtcgcctgcgctcgcgcgcacggtctttgggccagctgcgcgcgcctcatcgcggctttgcctatgcgttgcgcctgggctcactggcaaaagccgttccgagtttctccggctgacccggggtcggcgagctggcgggattgggggtcacagagccgcttaaatagcgggtttagcgtgaagcagtctgcgggggggggggggagggggggggggggcgggggggggagggggccggggtgggggggggtcgaagctggcctgggatctgggccgcaggctatgcgggaggctggacgtggggcatgctgctatgatgtgcacctcaggcgcaagggctgtgggcccacgggtggtgaggacttgtttggctggagctgccttgaagatgcagacagatgctatgcaagccagctgcccacaccgcacgcgggctgggatgtgggagcttgacaatgttgcttgtgccgtgagctgggttgaagaggttgccggaggtagggtcaaggactgcgcggggccaagggtgctgagcccgaggatggatggatgggcttgaggagggctcttggtacaggacgagttatgagctgtatggctactgacctacatgtatggtacatcgagtttgtgtgctcatcgggcgcgggagttgtgagtatggtgcagcgcgatacattttgctcgagggccatcgccagtcgccgggttgcggcccattggccctcacgtcagcttcttggcgcctctgcaggtcacagttgggcctgtcaagtaaaaacggttggtcgcgacgcgcgagagcctcccgctgctcggggagcgccgtttcagtggggatttggcaccacgagtgcttcttagacatgaaagcatcgattggtcaaggtcatgtggcgttccgacgcgataagagggagttcggtgctcaatttcgagtcgatttccgcgaccccgcatcggcgcggccccgcgccgctctctcgcgcgctgtaatgcatctacgtatcctcgcgagccaagtccgccgggttcgggcgcggagtgagaacggcgacctggggtcgttacttttgccatcatg

SEQ ID NO: 26 - DNA, 14416 bp, Chlamydomonas sp.; identical to SEQ ID NO: 25
  source 1..14416: mol_type = other DNA
  variation 996: note = n is a, c, g, or t

SEQ ID NO: 27 - DNA, 22001 bp, Mucor sp.
  source 1..22001: mol_type = other DNA
agaagcccatcgtctttatccacggtattggcgctggcctcatgtgctacatttcctttgtgcacaagctcttgaccttggatgctcccattttttgcattgaactcccttttgtctctatgcattgcgtcgaagatgtacctacgatgcaggagaccattcgcgatctgcagaatatgctgcatcgtcatgatttcgacgatgccgtgtttgtagctcattctctgggcacggctgtcacttcctgggtggtgaaatacatgccgcagagtgtcgctggcgtggtgtttctggaccccatctgtttcatgctgcattacaaggacgtgtgctccaattttgtctatagaacacccaaaactgctgctcaggtaagatactttagtgtgtatgtgtatgcgcatatcgctcatcatcagtatgacactacagggccttgtcaagtactttgcgtccactgaactgtacatttcttactacatctctcgccactttcactggttccaaactgccttgtatgtcgcccccactgtcacccatcataaccactcttatacctcctccatcaagatgcccgacaacaccaaggtattcttgtctgaaaaggacaacatcatcgattcgaatcgtgtggacacctatctgagccatcacggcgtcgatgccactgtcatgaaaggattggatcatgcttctttcttgttctatccttcttggcaaaacgaaatgttggcttccatcaacaactttatatgccaaaaggcctaatttctgtttaaaattactgtacatatctactactgttactatctatagaccttcttcattgtatccccccccccctcttttttacaagctaatttaatgttaccccattcatttcgttattaaaaataaaatgaaatcatccagaattcatgcaggcttcgttaagtcaatctaaaacggttgattcatttcgtcatggtcgaattgacaaatcgagtgtatattaaaagtacaattggagtaggaggaggtatctctatacatatcttggccctgtcgcacactatacaactgtaactccaatgcgctgtgctaatcgttggtattgttctctggcaatctttcgctgtctccacatgaacactgctactgagatgactacaactgctgcattgatgccctgttgtatacggataaagactgcattagtatgcgaattcgttaaatggtggcgattctaaactactcacctcaaatttaataaatctggctctttccacactcctcactcgaggacatgctcggaaagacggtaaggatatcgcgtcatcttcataaaaggctgtttggttcttcttgtctgctagttcgggatcgtcccattcgcagcgcactggctctttattaccaaactcgacgcagtagggttgtgttttctacagattgtcaatacggatttctctctacatggaatgcgacatgtttaccttttctaacggcgagcacacttgacactctccaatcgaatagcaagtgtaggtcgatttgtccactgtttcatgtgaatgagtatagtctcccagattgcgagaagcagcgtttgtatcttgagcaacaccaaaaggaggtgttcgtcggtattgagtttcggctagtgtgattgtaaaaatacaactatacaagatacatattaataccatggacaatgctgccgagagtcccctactacttgcctgaatatgactagagcaaggtatcgcatttgcttgatatgatggtaaatgaagaaacccacacacacattcgatgctattcagcatttaactgagttcttaatgtgacgctttcgcaaaggccatcaaccccccttctaaacggtttctggatggtttttgtttagatttcaactgtcaaaaatgcaaagaaagtccttgtggggttcctataaagcattatcaccgaaaactagaattacattgggtctcggtaaggcgccatgtctttttgaaatcaagctagcacactcacatgttggcatgatttgcaggtggaatgttgtttgctacagcaggcatgtatttggctgacctgattgaagagcaaaaaccagcatctgaactggagaagcaagagcttgaaatgatgtcccctattgtcgttgtggatcatcaacccaagaaataagtctacaccacaaaataccatcttcaaaactgaaatatcaataaatcaaggtctctttttaaacctggccatgtgtatatatacagttttcgtcagcaatgtgtgagagccatatataaacaacgagagttttatgcaataagtattgattcacccatatacacaacaaaaatgaaatttctgtccatctacaatgcaatcacgatcactgctttctggttatcggctactctcactcaagctgctgtgatcccattacctgcagcaaaccctaatcctgtactcaactcgtttactcaattcaactggtctaccgatgctcaattgctggatcagacgttcgctatcgacctggatgcgccttcaagagtgcatgttactgatttggatccccatggcgctggttttgctgtctatgataatggcaattttgttggcgagacggctactgtcattaccaaggacaatccatatggcgcagaagagtaccattatcgtcaaggcttctttaacttggataccggacatcatgtcattactgtcaagttgaagggagatgccaagactggaagcggggctatcagaatggtgcctggtgtggataacgaaatgactgtattgtatgacagtgctgaggttgtcgatcaaggcgaagcggctgctgaggaggctgtcgctgaggaggttgttgttgaggaagctgatcagattgaggacgtctttgaagcggacgaaagccatgataacgaagatgaagacgatgaagacgatgaagatgatgaagacgatgaagatgatgaagacgatgaagatgatgaagacgatgaagatgatgaagacgatgaagatgatgaagacgatgaagatgatgaagacgacgaggacaacgaggatgatgaggacgacgaggacgatgaggacgatgaagatgatgaggacgatgaagatgatgaagatgatgaagatgatgaggatgatgaggatgatgaagacgatgaggatgatgaggatgatgaggatgatgaagatcaagaggagggcggtgaagacgagtatattaccattggagactctacccaggattttgattacttgaccaatatttacggtgttcctcaagacacatcacacaccatcacactcactactacattcatagtggatgtatacgccacagaaacatctgatgaaacagagacagaaactactacgtcgacaatagtcattgagccctcctttttagaagactctccagaagaatctgctgttgcagaagctgttgaagaggacaatagtgctcaagagcagagtttgtccatttaaacaaatagaattgacattatatatatataaagtgccatgtaatttactcaataaagcgaaattaagcatcttcctgatactctgaatgttgttcctggaactttaggattttcatccgaaagagatccattgatccgattggactaactagcaataaaccctgcagaatgaccaagatgaggctattgaattcgctcatctatcaattgacgcatctagcttgcacatttgatacaaaattcaataaggcccctacacagacttgggtggggttcctctgaaatagcacgctattgacatttgaaagttgaaaaatccttgtagtacgagcgaaataaaggtctcgcatgatatttcccatgctatttgttttcaagcatgcattttattttctcttacgacaaatttgaatacaagtgtataccatttttgctttgtagagatacttattgaagtgaatgccactgaataccaatcaaataaaccctgccattataatacatgagtgagtcagcagccttatgtaatccaccctgagcatagaagatggacgctccggctttagcattgtttacacgttcgaaagcctgcaagagccatcagatgatgatgactccatggcaaccagagtcacaattgaaaagcatttacatctcctccttcatggccaaacatctctatcacatctctttttctccattactcaataccgaaactaattgagagcatacagaatgactacagaatatcgtattgaaagtgacacctttggtgatttaaaggtacccgccaacgtatattggggtgcccaaacacagaggtacattggtgttcaagtcgacatacgcgtttcattcaggtactaactgccaatatacagatctcttgagaacttcaagattggtggtcccagtgagcgtatgcctcctgccttgatcaaggcgttcggtatcctcaagaaggctgctgccaaggtcaaccttgagtataagctggatcccaagatttctgaggctatccagcaagctgccgatgaggtacgacattgaatctaagtttttgtaaacaggttgcacaagcaaagaaggttttaacaaggttttttcttcattaggtgattgcaggtaagcataacgaccagttccctctcgttgtctggcaaactggctcaggaacacagacccagtaagttgcttccgtgtgcttccatatcaatgttgcttatacttttgtattttgcataatcttctagtatgaacgtcaatgaggtaaggtttggcatgaaaattcggcttcccaaatcggcttacatcagtttgcctctccataggtcctgtccaacagagcaattgaaattttgggtggtaagctcggtagcaagactcctgtccaccccaatgaccatgtcaacatgagtcaatcatctaatgatacgtacgtatattgccatgtcatccaaaaagatccatagctaacggcatttacagcttcccaactgccatgcacattgcagctgttgttgagatcaacactgatctcatccctgcattgactcaactgcgcgatgctctgcaagccaaatcagatgaatttcaagacatcatcaaaattggacgtactcacctccaggatgccactccattgacattgggacaagagttctcgggctacgtgcagcagttgacatatggtattgaacgcattcaagccactttacctagactatctcgtttggcacaaggcggtactgctgttggcactggtttgaacacccacaaaggatttgatgtcaatattgcaaaggctgtctctgaatcaacaggctttgcctttgaaacagcacccaacaaggtaatctggattatataaagtgttgtctagagagagatattgacacggctacacagttcgaagcacttgccagcaatgatgccatggtagaatgctcaggagcactcaatacgattgctgtttcattgatgaaaattgctaatgatattcgctatttgggatccggtaataagtcgatttcaaggatgaacaatgacatggtaattgacgaaaggatcgttttacataggacctcgttgtggtttaggtgaattgagtttacctgagaatgagcctggatcttccatcatgccaggtaaagtaaatcctactcaatgtgaggccatgaccatggtctgtgctcaagtgatgggtaaccatacaactgttactgtctctggaagctatggtcaatttgaggtaatgcaataccgtagtagatgagacgtgtgtgtgagttggtatattaactcgccgtttgtatagctgaatgtgttcaagccagttattatcaagaatgtacttcaatcaatcaaactgttgagcgatgtatgccattccttcaaggataactgcgtcgttggtattgtcgctaatcgtgaacatattcagtccatcatgaacagagtaagttgtcttttgtgcgtatcagtgggttcgtgaagtctgataattttgttatgtagtctctcatgttggtcacatcgttgaatcccgtcattggttatgataaagctgccaaatgtgctaagaaggcacataaagaaggtagtaccttgaaggaggctgtgctctctcttaattatctctcttcggaagagtatgatcattgggtcaagcctgagctcatgattaatcctcagtaaaataaaaatcagaaacccaaaatatatttccgccaatcaaaggctttaaacattgcgaaatattaccaaaaatggaaggctttgagtgtactttactgaggccgagttgactttattcatgtcttgtagcgaggggactttaagataaagctactcgggaatagcttaagctatggcaaaaacaccacatgaaaatatacgatatctaacggatatgaaactgacgaaatcgtagcaaatcatagctaaatcatacgtgtaagctgactccagagcatactggcatccactactatgtgatccggagttgtacttgactaattacacatctcatattgattgcctagacaattaagaaagcctgttagataagatgttgcgtggtgggcttgcctgctgacttttttcttgttcttgtcttgctgcttcatgcaaattcaattgcctgtcaataaatagatgccgccagttagtgtcagtacagaataaatttgtaggaaatagcaccctataaccagacaacaatagcatgtgggcaccatattcatctcatcaacgtgcacttacttgagccaccaccaacagtatttcatgtatctcgcatctctaatgagaattagggcacaatgtgagtagaatactcgtccatcagccccacaccctcaccttatccgtcaccaagagcatctcttgcgtgctgtagtgaccatgagcataatgtatcatctacatatcctcaagcaacgatgcactgtaagcgctacaaccatccatcaccaacaaaaacttaccaaactcacagacaaccaaaaaccttgtaccttgtgcgcctcatctacgctgtatgcatctgtgcctggaagcagcaacgcacaatgagtggtgtatccatccattactcatagaaacttactaagtctacaggcaatcacaaacactgtaacaagtgcgccttacctgcgatgtatccatttgagcctggaaacagtaacccacagtgagtgatgtatccaagcatcagctccatccacctaccaaatgcagcatcagctacacctcacgtaacaagcgtacatcatgagccatgcataactgagcctctcaccaaagcaaaatagaccaaccattgcgagaggtttaaccaacagccagctgcaccatgtcattcactgcaaagcactaaaacaagcacgttagtagacatctatcattaatgttgatgctacctgcttgtaattctgtgcgtggcaaaaggactttgtagacagttgatagtaaccacaaaagcactcgtttcattccaaacaacggcgagttcatcgtctagacatgttttagaaagcggcaatctgctgaataagataaaagcgaaagggggaagctgaaattgacaagtgaggacagcaaagcagcacgagactggtatcgatagctaaattgaagaaagctgctgcttctgatgcgtagaacagacgttctgtacacgcagagcacatacacatgctacattaccaaagactaccaggtggaagagtggaggaagtaaacgaaacaagggaaaaaaagggaaatatgggggaacgcttcgtttgacaggtacgcgcgttgttacaaagcatcaaaatactggctctgatacgcagaatgtgccctgcgtacacccggagcacatacagacgctgctttatcaaacgcaagcaagtgaaaaagtggggggggggagtaaaagaatgttatatacatgaatgatgtcatgctgcatatcagatcaaggtacacctataaatcacatcaatttatacctttgacaggcgcttgttgagcgactcttcgaccaagtcgagagcatagtcagagtcaattatcagagtctttcattcaatggggcttgatgtttggggccaattagcctggagcaatcccttgattaaggtcatcaataaagagaatatcaggtcaggacagagtcctgcgctcaattaattcgaatgtcgattatttgaatggctgggcatatattagactaaagactaagcgtaggccattactgcgcgtcctaagccgcttgccctatatcctcatggatctcatcaggatacaaaacactgaaccattacatagtacatgtacaaaacaaagtaaacgtggcatagacacattaattgattgatttactatcaaagaaaggatgctataaaccgctatacattgaatctggtgtagcttcgtcaaatggggtaggcacgttattccatagtataaccgtttattatgcagcgaaaacaaaaagaaattgaaaaaaccaacctgtgattttgatttttgtgaataaaaattaatacagacgtgtttcctttcttcctctttctttttataaaatccttcatcagcatgaatccacgtaaagtacagcccaaagtacagctagaagtttaccaggatggacttacgccactaaaccctcctgcaagatttccacctaaggattatgtaagaagtagagccacaaaaacgtaaacagacaccaaaaacaacattatgggcgccttatatgccacattcaaggctaaactgaaggaagcaatcagacagtgcccagacagaatgaactaccctgagttgtacataactctgtttgaacgtaccaaactaccaagatatactgttcctgacgccgccagacgcctcgacattgacctcaggcttgtggaaagctttttgagacaacaagttcaaacaacaggcaaacagaccatcgcatactggaaagaatatgtagagcaacactttgacgaatgcatcaacgaggttttgtacgttgatccgcaagaaacagaagccaacagctctgatgttgacgatcaagacgacgatgatggatacgacgagaccgaggaatttcgaacctgcacgacatctttccagaccattatcaaaaaggatttagaagaagaagtacgccaccgcattgaagaaaccatcttgaactgtattcgagacactacaaactacacctctgactttagtattcaagtactaaagatggctcttgtattcaacacacacacgttcacattgagaaacaatacagtgatacttgaagaggctcaaggcgcaaatctcggccatgtgatccccattgaatacttggacgatgccatgagagtgcctagaccatttgatgccgcttgtttcaggaaccaagcttttaagaaagacttcgacttactgttccaaactggccatttcaacatcatcaactcatctttgtatggaaccaaaggacccacggacgccaatctgaacaaacacagcgttcaccggcttatttctgatgccattgggcttgctccaacggaagcttatcaccacttaccctcccatgtcacgaaaatggcgcgcttgcagtacactaccaatgtcaaaaacatgtggtccgacaagaccatcatcaacaagctgctgaaacgcctcatcaaatgcttgctgtgtattcatctacgcccaacggacgagaaacaactgcaagagagacgcctgcagccaagacaagccgcacccagaagtagcaattccaaccaaggcatgtctttctcacacaagacgcgaaatggcaggcgccgagtcatcaacaatgaaaagaagaacctcgagagatgcaaacgcctgaacaaagtcgacaaagcagcgagatgcgaggaaagacttactatgtacgcagacgtcatggaaagagaggtacagtgagcttgctttgggtctgaacaatataccaatgacatttaccattttcttatcccataatttagagacgacaaaaagcattacgccgacaagcaagcagtagtctagaagagggcgtcagtgaagacgaagaagacgccttagttgctgatgaaccagagtctgaaaagactaacgacacttcaaagcgaaggatcacacaaatgctgaatcaaataagaagtaacttgttccagaacacgcctctgtcgagatcaacagttggtagcaagattgagaacctcagcgacagcgagtttgatgccatgtctatcatcgctggatttatcaaaccctacatcccggcccaggttgattacgccaaacttcaataccagcttcctttccttctaatggccaatgagatactacgctacatgggtcgctcaagtcaatgtctgcagatactgccgttggtgaaacccacaacacttcacactttcctgattgacgcaaagacgctgtatgctttattttgtgcaagcaccctccagcaacctatgatccttttcaacttccaaaacgagcctatccaagagggcatggttgactcctacaaagatgccgtactcagtgccttctttgacattgcccacttgaagagactatgtgaacgccatggaaatcaatttgctcgcaggctgcacatttttccagcgctcacgactgtacgaatttacgatacggtaccgcgccttgtacaacatcaacaacccatcacagcaactgacggagatcccatcgacgaagaccatcatccagatttacagcaacagaatgatgccgtggtacgatttcagcatgagttgaaagatgccactgctagattggaaaccatgttgcttatgtcgcccagtgtacgccaactaaagaatgactttagaggaggacaagcatcattcaagacagttgaggacgccaaaacaacaaaaaggagactgatgcttgatgttcgtgacgcaaagaccaacctgcaaatcgccagacgagaagtccaacgcttgaagtcaatgcataagtttccacccacattgcctccaaactatcaaagatacatgatacgccagcaaccatgtctgaaaaaggccgaggagtgtttcattgacgaggactttgatttgcaaggcgccatctttgctggcacagacaacggaattgtcaagaccacagagaccgtatactttgacatcgaacgatttctgtatcacctacgtctctttctacactttcatccttcggatcaaaatggacagcctgtgggcgctcctgcaatgttcatggatctgccagctacattgaccattggatcgaaagaaatcaagcaaggcagtggcatgtttgactacatgaggtcaatgaacaagaagaagacgcctggcgaacaagtactagcaatagagagcaccctatcagccaacagcttgttcaattgcagtacaccaaatgaattggaggagacagcccatcttcaccaacgccaccaacaagccatccgatctttctattactcaaacatccagtgcaaagaaagacgtcaatttgagtggagaaaagaaagatactatgatcgactggcatcaaacgagcgcaattcttccggcgtcaaacatccaattatgtttattggggatcgtgggcatggttatggatcctgtatcaaacgtcatttgcgattcggtggacactggagagaagagcgccactcacgatacacacctaccattattaccaacgagtataacagttcccaaacatgcctgtattgcttcaacaagctgtctcaccccacttttgcacacaacaacgccatcaagaccaccaagggtacttttgtttgtttaaatgaggattgcccaaacgcctttgtctctgtgtgtagagaccaagtgtcagcgttagctataggcttggctggtctttcacaattgttatttggggcagcctttccgtgtttcgacgaggataccaatccaatgaacaagaccagattctacgaaatggccacgctttttttgagggagcacgcctaggatccttctcatacttacgaaacctttgctaatttctcaataaaaaaaaagtatatggtgaatggctattgtccaatatacagatgtaaatgtgaaacgcacttttgatactcgccgtacagacgatgcatttccttccatttacttgatacaaaaggaagatggctcgtacaagaactaggaactaagattgcaagcataaattatctttaaaacagtcctatagtagtttagcaattccagatttggcatcaatgctttttggcagtcgtcttttcagcttgtgcagatattttcttgtttgctcttctttcctacatctcactcaatttatgggtattgctcactatacatctcatctagaatgcggccactgctctctacacgccatcatcaagactctggtattgtacactgtacacatcgtcgaatgaatggtattgctcactgtacatttcatctagaatgtggccactgctctctacacgccatcatcaagactctggtattgcacattgtacacatcgtcgaattaatggtattgctcactgtacatttcatctagaatgtggctactgctctctacacgccatcatcaagactctggtattgcacattgtacacatcgtcgaatgaacggtattgctcactgtacatttcatctagaatatggtcattgctctttacaccccatcatcaagaatctagtattgctctttacaccccatcatcaagaatctagtattgctctttgaacgccttaacaagatgacgcttattgcccactgtacatctcatctagaacatggtttttcctacatgtagtttagctccttcttttctgaatactgaaacagttgtagagctcgccttcgtttgaaggcattacattaggtaagtgacagaacaagggaaagaagccctctattaacgaatgcgttacaattccatttacaccatactattatatttctttttgtaagtttctaattcaatgctgtatcgtaattcagttgactaatcaaatctttattacttcttttggatcaacagtgaacttatcattacagtaaaataaaattaagtgagcctatcattacagtaaaactctgaatgataattaccaagcaatgtagcagattttgtaaatttacaccatacttgttttcatgtctttgagtctgctacgtcggcttaaagagggcctattgaggtggattgattgccgtttctgccctgagaacagcaccacaaaaaccaccattcactgaccgttcttagctcaacagttgcaaatataactcgtactgcaagatacataataggcagtattggcaaatatcagggcaccttcttctaaatcataatgcaatgactcaaatcaagagaaactaataatgctttttttacgttcagttgactagaatacttgtatttcttaagtgtcttccaccatgcatatagtttactacactactaaatagtttacatctcgccatttttaggcaaacaaaaataaattactaccattaaaaaccttgtaacagacatctatcaaagctttcttttagatttttcgatcctatacgcgaagatggctcataataggccagtgattatagtgatatatctttccattcttcacgttttgtaacttttatattcctgaccgataagccaccttaggacactcggaaatgcaatcatcaacagtaatccaacattaaacagattctaatgagcctaactggagcttaaaatattcggtctccgatatcggagttttctggtttttaaacctcgattttgccctgattctgaatctgcaaaccatttttttgtaggtaccatggttcctgacaaaagtgagatttgagatatttttggaattttaggctgtggtactagtaaaagtcttttaatttgatagaaatgccccaagtttatatagcccaatcgaaagaggtgcatgtttttgactaggacgtacttagtctagggtcgtaatagatgatttgtatgagtaatgatcaagagaaggtgcacctgcgtgatttttgtgctttttgaaggggtctacactcgaatttcactaagtgaatgcaagtagcgtagagcttgactattgtttgccattcaattctctatcggatggtatagatgtcatataaaaattttgacctttgtcacaaacccactgcttgagggacacgaaatttcacattttgagtagatttatgaagggaatgcatatgtggtgcccaaaactgttggatcatgatagatccaatgcgcagctatcgaatcgtttttgtttcatgtcaatccgataatttttcgttgagatattgtcaaaaaggggttcatggaaaatcaccagatttggaccaaaatctgcctgtcctagcaagggaaaaaattgtgtggtattttcaaaacacgacaaaatttttgatttctcatgctagagttatgctaaagcctcgagccaaataccatccgaaaggtaattttttgctctacatgaccaatgcaatgaaaggtatagtcaatatgatagaaacttgttaatccttgaaaaaccttcaaaacaacaccatcaaaaatcacctatataatggcaaccaagacacttgatattggtaccattgaattctgtacagaaaccatatagggctaaaggggtgtttactatcaactatcatccaattttgagatttatggattttagaatcgatgatggatcaattgtaaataccaaattttcaaataccgcctagttatattacagaccttatgaattttataggtcattttggagactagagtggtggtaaaatgtcatattaacttgcagttttcaaggtatccatggatacctgacatgttaatgcaccacctgtcgagttttgagtgctgtagcttacttttttccgttccatatcgtttccccaaattaaggtacgcattttcccccgcttaaaaatgggactttccatgtcgaataggttaggaacaaggcatttccaataccatgttccaccttaaaagttggttcatttccattcctttacaacatatttaagtatcaaaacattctggaatttctacctcatcgacccatgatgtacaaaatgaatttcgaatttggagttttgggtttcatggcattctgacatcgattttccagaaatgcacgctagagctttgggactagcatgttcctaagacggttttttgccctgattctgaatctgcaaaccatttttttgtaggtaccatggttcctgacaaaagtgatatttgatatatcaccttgtagaaaagtgctgcaacgacagccgatatctgcgatattttgcaaaatctgcatcaaaatctgcatcaaaatctgcatcaaaatctgcgaggtatgcgatttaatgcattgcatgcagaaattgatgttagtcatgaagattgttttatatttttttgggaactagacggataatctgtgaaaatatataaacccccatagtttaaagcatcaatattgtagttgtgtattttttaaaatatatacgctgccaaatgtattttgtcagtcttgtttcagttgagttcttttaagtttgaaaaatgctgcccaaaaacatagtagtattaggaggctctagtttattagctatcaaacttcattgttgtctcaaaatgcagatcacaacctctttaaattatggcctctttcataatatggcgcattgaagcaaactgactatgtcagtgctcttgttacactctataaaaacgtcaaacaaaatctattctaaaccaaccaaaaatacaacagactgtcgtgtacgctagctatgggtagtatgtaggtacacaatataaaatgtaaagagaaagatgaggtttattcaatacaatgtgaaaataatatttataccctagcaactaattactgctgacgtcagttactacagtcagcttctgcttctttctgaatggtctacgcactgggattatgggcttaaatactcgtctcttattggcgttgtgtcgtaacaccgcctcaggcactaacccatcaaacatgtcaatgacattatccccccttgaaactgatgttggtccctcaacatcctttgatgatccttcagagtctccttgctcttgtactggtccaacaatgtcttcatttttgtgcaaagagtcgtcagtgccacggaatttctgccaagatagtgcctttcttgattgcttggccacaaatgcaaagggagatattttttgcttggcgttcccacttgatcccacattgccagcttgagtcttcttgtcttcttccattttgttgccaggatcaccagcttcttctactttgttaccaggactaccagtttcttccattttgtcgtcatggctaccaattgcctctgcttgatcaccatcattttgcatttcatcaccatgactactgattgcaccatggtttccatgactaccacttgcttctccttgattgttgctgtgtgttgcatcatcttctgtcacaacaataggatcagagaattgatcttgttcaatctgctcttcttccacttcttcttctgttgctggtatactgatactgcgagatgaactttgagcgctgtgcaacgagacttcaccgtcactaccaatgcccgtttctgtcaaggtgggttcttcatgctgctgtattctgttggtattgtcgctctgtctatcagcatcccgtatatcatctaattcatcatcttgtaattcatctgctgatgatatgtcatcatatccatctatcacagttcgaatggtgtcatccacagcctcaacctcttgttcctcgcttgcaatttcagacatagcgctatcaaattcttcttcatgcggcgatatgtccccataggcttccaccacatgcttcagctcattgtcatcttcatccattgtagagttgccatcaccaccaacatccgacatgccactgcattccacatcactgttgtcattgtgcggctgattcatttgcagatcctcctcaatcgcctcctcttgctgttgctgatcttgatctactggcacactctctgacatattcacaaatggggacacaccctcttgactgccatacatgttgttggatagctctggctcttcttgttcaccaacaacaacacttgcacttgtcgttgacgaggtattaggctcaacagtagtagcatcttgaccttgatccacattggcatgaacaccagtcgttgagacagcggttgtagcagcaccgctactaccccctccctttccagctaaaggtaatgatgctcggggaactctaccactgcgcgttgtcgtggcctccttgacaagtctacggctggctgtgggatcgtaccatgtttgctctggcttatcgcccttggcacgcttgagtctgtcgcgatgtactagtgaatccaacttctggccagccatagtctctaattggtaagtaccatactcatcaaatgcttgcgttataatatagggacccttgaatcgtggctccaacccaaatttgccctcatgtgtcaacaacaccaagtcgccaacctcgtagtccacgatacgcatagccttgtcccagcgctccttgtctcggtcggacacagtcttcattcttgcttgagccgctgctctgtgttgacccaatgcagcgagttctcttgctgtaatgtctgccaccgttcttggatcttgcatagactcatttgagacaaacgggatgatggcatccccaggcaaccgaggctcacgaccatataccaaaaagaatgggctgtaacccgtagtggcattcttccagacacgcgaagaccacacagcaacatccacaaactcgtcccaacgatgtagagcaccttgaacgtattttctcagcatgtccttgacagttgcattgtacctctcgaccttgccatttgtacgtgggtggaacgcacttgtgagtttgtgatggctaccaagtagtttgacatactcttgcactagctcactacagaaattggcacctctgtccgtgacaaattccacagggcaaccaaaacgagtgacgatctccttgtagataaactgtgcaacagactccttggtggcatctggtagggcacacgcaatcggccagttggtagtggcatccacagcagtaatcagccaacgatttccattctttgtttgtggcagctctccaacaaagtccaaatgccagcgttcgaaagcacccacaggtataggcagaggatgcatctcgtcttgatgtttggataccttcttgctgttgagttgacatgctggacacggcgcaatccactctgcaatatccactttcatgcgtggccaccagtatcgcttacccatgagatgcatcaagtttctgacggaggcatgcccaaaactctcgtggtatttggacaccagatcagcacgttgggagaaggggacaaaaggcacttccagcgagggcttgtcttgctctttttgcttgatgacacggaacaaacgaccattcttgatgataaagttgggcttctcccgcttcaacatggcccttagctgcttggatttcactttttcatccgtaccagcaacaaacaacaatggccaatccgactgcaactccttgggtagttcactccatgacgcatacagatacagaggttccaaagactccttggccggttgggaggcatcaccaacacgagacaacgcatctgctacaacattttttttaccaggcttgtagacaatcttgggtgcaaacatctccaaatcagcgatccatcggatcagacgaggtgtaggcttctgttgcgtgcggaagtaggtcaaggggttgtgatcacagcacaccacataacctccaggacagccatcaatatagcagcgccaggtacgtaatgcatgcacaataccaatcagttctctctcttgtgcaggtagtttttgctctgccgaggacagctttcttgactcaaacgccacaggatgccattgcttgctttcatcatcaccaggttgtaacaacacaccgcccacaccaaaatcactgctatcagtctcgattctaaaaggctttgacatgtcaggcactctcaatacaggtgctgttgtaagcagttgcttcagttgcttgaagctggcctcgcaatcatccgtccactggatagctcttttcttgggtccagatccttgagtcaaatttgtcaatggagctgcaatatgagcaaaagacttgatgaaccggcgatagtgctgcgcgagacccatgaattggcgaacttcttgtacattggagggtgttggccaatcttgcaccgcttttaccttctgagcagaaggctgaataccatgttcacagatctcaaatcccaagaagaccaactttcgttgcgcaaatcgacacttctccatgttgacaaccaaaccagcagccttgagcttgtccaacacaatcttgagatgcttcttgtggagatccaaggtggggctaaacaataacacatcatctaaatagcacaaggcgaacttgtcaatgcactcgtagccaagaaccttattcatccaagcttgaaaggtcggtgggctgttgcacaaacccattccaagtacggtccattcaaatttgccatatcgagtattcatcgctgtcttggggatgtctgtgtcttgtatacggatttggtggtagccgctcttgagatccaggcacgaaaaataagacgcacccttcaaacgatccaagcattcgtcgattcgaggcagtggaaaggtgttacgcacggtcaccttgttgagagcgcggtaatcgatacacatgcgcatggaaccatcctttttcttgacaaacaaaataggtgaaccccatggtgacgagctaggacgaatcataccagcggcaagcaaccccttcagctgtctcttgagttcatccaactccaaaggactcatcttgtatgcaggcttgttaatgggcgctgcgtctccagtgtcaatcacatgctgcacctcctgtgcagaagggataccagtcaacttgcttttaaacacatcaggatactcgagaccaagctgctttttccactcagcgtccatgctcatggtgatttgaacctccttgttgtggtcctcacagacatgcaacagatacacatcggcttgcttgtgcttcaacaatcggtcgacttgcttgggagtgatgagatacttggacaccatattctcaacagacgtatcataaaaggtaagagtgtcattgtcccagttaaactgaggcttgtgctgtttcaaccaggatctacccagtataatgtcaaattttgaatcgtatacaaaggacgatacagataccttgtaaccctgaaggttaagtgcatattcaattttgtcggtaatcttgtgcacgctgccaccagctgtctccacttctctgttaaccttagaccagataccttggagctgatgagcaacgcttggcttgatgtagcactcactcgcaccactatcaaccaacactttgacgggcacatgacgatcaccatcgcgagagtacgcgaatccaccatacaggggtaagtcagacgacgaggagcttgtagccgagttgagctgatccaggtgagggacatcaatagccagccttgctgacaaaggctccaccatcttggcagtggctgttgatgatgtgcctttactgtccttcttattaggcgctgaagaaccattcaaatagtgctcacaggtgttcaatttattgtcatcatcatgtgcaacagaaggtgagctatcactattattgtccatggcattcagatttcctcttggcttcttgtagttaaactgcttccttttgcctttgtatgcaccaccagaaccttgattgttgtagcgatgactattgtccagcttgcgaatggcctcaatgcgatccctacagttcctcttgacatgacccggcttttggcaaaagaagcaaaccacagatgaactaccaccacgactagtcattgcatcgagatccataggttcaggaccaccaccttgggaagagccaacgccgcccgaaccagaaggagagtagccttgaccttgctgttgagcccatcttgaagtcatactactacgattgctactagaggaagcaccacgcaaatgaggtcttgtagctgcatagttcaatgcatgggtaaagtatgtttggatcttcctttgggctggttggtaatcacgcagttgggcttggagttccatgtcttggatgcctttcctgaattgatggcactgttcctcctgagtcataccagggatgagcatgacaatgtccatgaatgagtcacagtactcttgcatcgaaccagtttggaacagggaatccagggcatcacgagcatcatccacacttctggcaggcctaaagttgtcaatcaactctgctttcaacgcggtccaagtacttggcacagtagttggatggaactccttgtatacacgcaaccattcggccgcacgaccagctaacagagtacttgcaaagatgaatgtcttttcgtcactccaaccgtaaaagtccttgtgcgtgtcaacagcagagcaccaattgtcaatgatacgaacatcacgttcaccagagtacgcagagggttgcttcaacttgacggattggctgctttcgcccgtgatttgcttgacggcctgaaccaccatatcacatatatcttgaggtgtggccatttcagtgttcagatttaccagtgctttgtattacagtgcttgagagaataccagtgctttgagagataaccagtgcttttagagagaataccagtgctttttttgagagaataccagtgctgtaagcttcaccagttcttgatttcagtactttaacggatgacaaatccttttatcacggttcttttgagatatagcacgttcagcaattagataattagatcta

SEQ ID NO: 28 - DNA, 22001 bp, unidentified
  source 1..22001: mol_type = other DNA
  misc_feature 1..22001: note = Fanzor polypeptide
aagcccatcgtctttatccacggtattggcgctggcctcatgtgctacatttcctttgtgcacaagctcttgaccttggatgctcccattttttgcattgaactcccttttgtctctatgcattgcgtcgaagatgtacctacgatgcaggagaccattcgcgatctgcagaatatgctgcatcgtcatgatttcgacgatgccgtgtttgtagctcattctctgggcacggctgtcacttcctgggtggtgaaatacatgccgcagagtgtcgctggcgtggtgtttctggaccccatctgtttcatgctgcattacaaggacgtgtgctccaattttgtctatagaacacccaaaactgctgctcaggtaagatactttagtgtgtatgtgtatgcgcatatcgctcatcatcagtatgacactacagggccttgtcaagtactttgcgtccactgaactgtacatttcttactacatctctcgccactttcactggttccaaactgccttgtatgtcgcccccactgtcacccatcataaccactcttatacctcctccatcaagatgcccgacaacaccaaggtattcttgtctgaaaaggacaacatcatcgattcgaatcgtgtggacacctatctgagccatcacggcgtcgatgccactgtcatgaaaggattggatcatgcttctttcttgttctatccttcttggcaaaacgaaatgttggcttccatcaacaactttatatgccaaaaggcctaatttctgtttaaaattactgtacatatctactactgttactatctatagaccttcttcattgtatcccccccccctcttttttacaagctaatttaatgttaccccattcatttcgttattaaaaataaaatgaaatcatccagaattcatgcaggcttcgttaagtcaatctaaaacggttgattcatttcgtcatggtcgaattgacaaatcgagtgtatattaaaagtacaattggagtaggaggaggtatctctatacatatcttggccctgtcgcacactatacaactgtaactccaatgcgctgtgctaatcgttggtattgttctctggcaatctttcgctgtctccacatgaacactgctactgagatgactacaactgctgcattgatgccctgttgtatacggataaagactgcattagtatgcgaattcgttaaatggtggcgattctaaactactcacctcaaatttaataaatctggctctttccacactcctcactcgaggacatgctcggaaagacggtaaggatatcgcgtcatcttcataaaaggctgtttggttcttcttgtctgctagttcgggatcgtcccattcgcagcgcactggctctttattaccaaactcgacgcagtagggttgtgttttctacagattgtcaatacggatttctctctacatggaatgcgacatgtttaccttttctaacggcgagcacacttgacactctccaatcgaatagcaagtgtaggtcgatttgtccactgtttcatgtgaatgagtatagtctcccagattgcgagaagcagcgtttgtatcttgagcaacaccaaaaggaggtgttcgtcggtattgagtttcggctagtgtgattgtaaaaatacaactatacaagatacatattaataccatggacaatgctgccgagagtcccctactacttgcctgaatatgactagagcaaggtatcgcatttgcttgatatgatggtaaatgaagaaacccacacacacattcgatgctattcagcatttaactgagttcttaatgtgacgctttcgcaaaggccatcaaccccccttctaaacggtttctggatggtttttgtttagatttcaactgtcaaaaatgcaaagaaagtccttgtggggttcctataaagcattatcaccgaaaactagaattacattgggtctcggtaaggcgccatgtctttttgaaatcaagctagcacactcacatgttggcatgatttgcaggtggaatgttgtttgctacagcaggcatgtatttggctgacctgattgaagagcaaaaaccagcatctgaactggagaagcaagagcttgaaatgatgtcccctattgtcgttgtggatcatcaacccaagaaataagtctacaccacaaaataccatcttcaaaactgaaatatcaataaatcaaggtctctttttaaacctggccatgtgtatatatacagttttcgtcagcaatgtgtgagagccatatataaacaacgagagttttatgcaataagtattgattcacccatatacacaacaaaaatgaaatttctgtccatctacaatgcaatcacgatcactgctttctggttatcggctactctcactcaagctgctgtgatcccattacctgcagcaaaccctaatcctgtactcaactcgtttactcaattcaactggtctaccgatgctcaattgctggatcagacgttcgctatcgacctggatgcgccttcaagagtgcatgttactgatttggatccccatggcgctggttttgctgtctatgataatggcaattttgttggcgagacggctactgtcattaccaaggacaatccatatggcgcagaagagtaccattatcgtcaaggcttctttaacttggataccggacatcatgtcattactgtcaagttgaagggagatgccaagactggaagcggggctatcagaatggtgcctggtgtggataacgaaatgactgtattgtatgacagtgctgaggttgtcgatcaaggcgaagcggctgctgaggaggctgtcgctgaggaggttgttgttgaggaagctgatcagattgaggacgtctttgaagcggacgaaagccatgataacgaagatgaagacgatgaagacgatgaagatgatgaagacgatgaagatgatgaagacgatgaagatgatgaagacgatgaagatgatgaagacgatgaagatgatgaagacgatgaagatgatgaagacgacgaggacaacgaggatgatgaggacgacgaggacgatgaggacgatgaagatgatgaggacgatgaagatgatgaagatgatgaagatgatgaggatgatgaggatgatgaagacgatgaggatgatgaggatgatgaggatgatgaagatcaagaggagggcggtgaagacgagtatattaccattggagactctacccaggattttgattacttgaccaatatttacggtgttcctcaagacacatcacacaccatcacactcactactacattcatagtggatgtatacgccacagaaacatctgatgaaacagagacagaaactactacgtcgacaatagtcattgagccctcctttttagaagactctccagaagaatctgctgttgcagaagctgttgaagaggacaatagtgctcaagagcagagtttgtccatttaaacaaatagaattgacattatatatatataaagtgccatgtaatttactcaataaagcgaaattaagcatcttcctgatactctgaatgttgttcctggaactttaggattttcatccgaaagagatccattgatccgattggactaactagcaataaaccctgcagaatgaccaagatgaggctattgaattcgctcatctatcaattgacgcatctagcttgcacatttgatacaaaattcaataaggcccctacacagacttgggtggggttcctctgaaatagcacgctattgacatttgaaagttgaaaaatccttgtagtacgagcgaaataaaggtctcgcatgatatttcccatgctatttgttttcaagcatgcattttattttctcttacgacaaatttgaatacaagtgtataccatttttgctttgtagagatacttattgaagtgaatgccactgaataccaatcaaataaaccctgccattataatacatgagtgagtcagcagccttatgtaatccaccctgagcatagaagatggacgctccggctttagcattgtttacacgttcgaaagcctgcaagagccatcagatgatgatgactccatggcaaccagagtcacaattgaaaagcatttacatctcctccttcatggccaaacatctctatcacatctctttttctccattactcaataccgaaactaattgagagcatacagaatgactacagaatatcgtattgaaagtgacacctttggtgatttaaaggtacccgccaacgtatattggggtgcccaaacacagaggtacattggtgttcaagtcgacatacgcgtttcattcaggtactaactgccaatatacagatctcttgagaacttcaagattggtggtcccagtgagcgtatgcctcctgccttgatcaaggcgttcggtatcctcaagaaggctgctgccaaggtcaaccttgagtataagctggatcccaagatttctgaggctatccagcaagctgccgatgaggtacgacattgaatctaagtttttgtaaacaggttgcacaagcaaagaaggttttaacaaggttttttcttcattaggtgattgcaggtaagcataacgaccagttccctctcgttgtctggcaaactggctcaggaacacagacccagtaagttgcttccgtgtgcttccatatcaatgttgcttatacttttgtattttgcataatcttctagtatgaacgtcaatgaggtaaggtttggcatgaaaattcggcttcccaaatcggcttacatcagtttgcctctccataggtcctgtccaacagagcaattgaaattttgggtggtaagctcggtagcaagactcctgtccaccccaatgaccatgtcaacatgagtcaatcatctaatgatacgtacgtatattgccatgtcatccaaaaagatccatagctaacggcatttacagcttcccaactgccatgcacattgcagctgttgttgagatcaacactgatctcatccctgcattgactcaactgcgcgatgctctgcaagccaaatcagatgaatttcaagacatcatcaaaattggacgtactcacctccaggatgccactccattgacattgggacaagagttctcgggctacgtgcagcagttgacatatggtattgaacgcattcaagccactttacctagactatctcgtttggcacaaggcggtactgctgttggcactggtttgaacacccacaaaggatttgatgtcaatattgcaaaggctgtctctgaatcaacaggctttgcctttgaaacagcacccaacaaggtaatctggattatataaagtgttgtctagagagagatattgacacggctacacagttcgaagcacttgccagcaatgatgccatggtagaatgctcaggagcactcaatacgattgctgtttcattgatgaaaattgctaatgatattcgctatttgggatccggtaataagtcgatttcaaggatgaacaatgacatggtaattgacgaaaggatcgttttacataggacctcgttgtggtttaggtgaattgagtttacctgagaatgagcctggatcttccatcatgccaggtaaagtaaatcctactcaatgtgaggccatgaccatggtctgtgctcaagtgatgggtaaccatacaactgttactgtctctggaagctatggtcaatttgaggtaatgcaataccgtagtagatgagacgtgtgtgtgagttggtatattaactcgccgtttgtatagctgaatgtgttcaagccagttattatcaagaatgtacttcaatcaatcaaactgttgagcgatgtatgccattccttcaaggataactgcgtcgttggtattgtcgctaatcgtgaacatattcagtccatcatgaacagagtaagttgtcttttgtgcgtatcagtgggttcgtgaagtctgataattttgttatgtagtctctcatgttggtcacatcgttgaatcccgtcattggttatgataaagctgccaaatgtgctaagaaggcacataaagaaggtagtaccttgaaggaggctgtgctctctcttaattatctctcttcggaagagtatgatcattgggtcaagcctgagctcatgattaatcctcagtaaaataaaaatcagaaacccaaaatatatttccgccaatcaaaggctttaaacattgcgaaatattaccaaaaatggaaggctttgagtgtactttactgaggccgagttgactttattcatgtcttgtagcgaggggactttaagataaagctactcgggaatagcttaagctatggcaaaaacaccacatgaaaatatacgatatctaacggatatgaaactgacgaaatcgtagcaaatcatagctaaatcatacgtgtaagctgactccagagcatactggcatccactactatgtgatccggagttgtacttgactaattacacatctcatattgattgcctagacaattaagaaagcctgttagataagatgttgcgtggtgggcttgcctgctgacttttttcttgttcttgtcttgctgcttcatgcaaattcaattgcctgtcaataaatagatgccgccagttagtgtcagtacagaataaatttgtaggaaatagcaccctataaccagacaacaatagcatgtgggcaccatattcatctcatcaacgtgcacttacttgagccaccaccaacagtatttcatgtatctcgcatctctaatgagaattagggcacaatgtgagtagaatactcgtccatcagccccacaccctcaccttatccgtcaccaagagcatctcttgcgtgctgtagtgaccatgagcataatgtatcatctacatatcctcaagcaacgatgcactgtaagcgctacaaccatccatcaccaacaaaaacttaccaaactcacagacaaccaaaaaccttgtaccttgtgcgcctcatctacgctgtatgcatctgtgcctggaagcagcaacgcacaatgagtggtgtatccatccattactcatagaaacttactaagtctacaggcaatcacaaacactgtaacaagtgcgccttacctgcgatgtatccatttgagcctggaaacagtaacccacagtgagtgatgtatccaagcatcagctccatccacctaccaaatgcagcatcagctacacctcacgtaacaagcgtacatcatgagccatgcataactgagcctctcaccaaagcaaaatagaccaaccattgcgagaggtttaaccaacagccagctgcaccatgtcattcactgcaaagcactaaaacaagcacgttagtagacatctatcattaatgttgatgctacctgcttgtaattctgtgcgtggcaaaaggactttgtagacagttgatagtaaccacaaaagcactcgtttcattccaaacaacggcgagttcatcgtctagacatgttttagaaagcggcaatctgctgaataagataaaagcgaaagggggaagctgaaattgacaagtgaggacagcaaagcagcacgagactggtatcgatagctaaattgaagaaagctgctgcttctgatgcgtagaacagacgttctgtacacgcagagcacatacacatgctacattaccaaagactaccaggtggaagagtggaggaagtaaacgaaacaagggaaaaaaagggaaatatgggggaacgcttcgtttgacaggtacgcgcgttgttacaaagcatcaaaatactggctctgatacgcagaatgtgccctgcgtacacccggagcacatacagacgctgctttatcaaacgcaagcaagtgaaaaagtggggggggggagtaaaagaatgttatatacatgaatgatgtcatgctgcatatcagatcaaggtacacctataaatcacatcaatttatacctttgacaggcgcttgttgagcgactcttcgaccaagtcgagagcatagtcagagtcaattatcagagtctttcattcaatggggcttgatgtttggggccaattagcctggagcaatcccttgattaaggtcatcaataaagagaatatcaggtcaggacagagtcctgcgctcaattaattcgaatgtcgattatttgaatggctgggcatatattagactaaagactaagcgtaggccattactgcgcgtcctaagccgcttgccctatatcctcatggatctcatcaggatacaaaacactgaaccattacatagtacatgtacaaaacaaagtaaacgtggcatagacacattaattgattgatttactatcaaagaaaggatgctataaaccgctatacattgaatctggtgtagcttcgtcaaatggggtaggcacgttattccatagtataaccgtttattatgcagcgaaaacaaaaagaaattgaaaaaaccaacctgtgattttgatttttgtgaataaaaattaatacagacgtgtttcctttcttcctctttctttttataaaatccttcatcagcatgaatccacgtaaagtacagcccaaagtacagctagaagtttaccaggatggacttacgccactaaaccctcctgcaagatttccacctaaggattatgtaagaagtagagccacaaaaacgtaaacagacaccaaaaacaacattatgggcgccttatatgccacattcaaggctaaactgaaggaagcaatcagacagtgcccagacagaatgaactaccctgagttgtacataactctgtttgaacgtaccaaactaccaagatatactgttcctgacgccgccagacgcctcgacattgacctcaggcttgtggaaagctttttgagacaacaagttcaaacaacaggcaaacagaccatcgcatactggaaagaatatgtagagcaacactttgacgaatgcatcaacgaggttttgtacgttgatccgcaagaaacagaagccaacagctctgatgttgacgatcaagacgacgatgatggatacgacgagaccgaggaatttcgaacctgcacgacatctttccagaccattatcaaaaaggatttagaagaagaagtacgccaccgcattgaagaaaccatcttgaactgtattcgagacactacaaactacacctctgactttagtattcaagtactaaagatggctcttgtattcaacacacacacgttcacattgagaaacaatacagtgatacttgaagaggctcaaggcgcaaatctcggccatgtgatccccattgaatacttggacgatgccatgagagtgcctagaccatttgatgccgcttgtttcaggaaccaagcttttaagaaagacttcgacttactgttccaaactggccatttcaacatcatcaactcatctttgtatggaaccaaaggacccacggacgccaatctgaacaaacacagcgttcaccggcttatttctgatgccattgggcttgctccaacggaagcttatcaccacttaccctcccatgtcacgaaaatggcgcgcttgcagtacactaccaatgtcaaaaacatgtggtccgacaagaccatcatcaacaagctgctgaaacgcctcatcaaatgcttgctgtgtattcatctacgcccaacggacgagaaacaactgcaagagagacgcctgcagccaagacaagccgcacccagaagtagcaattccaaccaaggcatgtctttctcacacaagacgcgaaatggcaggcgccgagtcatcaacaatgaaaagaagaacctcgagagatgcaaacgcctgaacaaagtcgacaaagcagcgagatgcgaggaaagacttactatgtacgcagacgtcatggaaagagaggtacagtgagcttgctttgggtctgaacaatataccaatgacatttaccattttcttatcccataatttagagacgacaaaaagcattacgccgacaagcaagcagtagtctagaagagggcgtcagtgaagacgaagaagacgccttagttgctgatgaaccagagtctgaaaagactaacgacacttcaaagcgaaggatcacacaaatgctgaatcaaataagaagtaacttgttccagaacacgcctctgtcgagatcaacagttggtagcaagattgagaacctcagcgacagcgagtttgatgccatgtctatcatcgctggatttatcaaaccctacatcccggcccaggttgattacgccaaacttcaataccagcttcctttccttctaatggccaatgagatactacgctacatgggtcgctcaagtcaatgtctgcagatactgccgttggtgaaacccacaacacttcacactttcctgattgacgcaaagacgctgtatgctttattttgtgcaagcaccctccagcaacctatgatccttttcaacttccaaaacgagcctatccaagagggcatggttgactcctacaaagatgccgtactcagtgccttctttgacattgcccacttgaagagactatgtgaacgccatggaaatcaatttgctcgcaggctgcacatttttccagcgctcacgactgtacgaatttacgatacggtaccgcgccttgtacaacatcaacaacccatcacagcaactgacggagatcccatcgacgaagaccatcatccagatttacagcaacagaatgatgccgtggtacgatttcagcatgagttgaaagatgccactgctagattggaaaccatgttgcttatgtcgcccagtgtacgccaactaaagaatgactttagaggaggacaagcatcattcaagacagttgaggacgccaaaacaacaaaaaggagactgatgcttgatgttcgtgacgcaaagaccaacctgcaaatcgccagacgagaagtccaacgcttgaagtcaatgcataagtttccacccacattgcctccaaactatcaaagatacatgatacgccagcaaccatgtctgaaaaaggccgaggagtgtttcattgacgaggactttgatttgcaaggcgccatctttgctggcacagacaacggaattgtcaagaccacagagaccgtatactttgacatcgaacgatttctgtatcacctacgtctctttctacactttcatccttcggatcaaaatggacagcctgtgggcgctcctgcaatgttcatggatctgccagctacattgaccattggatcgaaagaaatcaagcaaggcagtggcatgtttgactacatgaggtcaatgaacaagaagaagacgcctggcgaacaagtactagcaatagagagcaccctatcagccaacagcttgttcaattgcagtacaccaaatgaattggaggagacagcccatcttcaccaacgccaccaacaagccatccgatctttctattactcaaacatccagtgcaaagaaagacgtcaatttgagtggagaaaagaaagatactatgatcgactggcatcaaacgagcgcaattcttccggcgtcaaacatccaattatgtttattggggatcgtgggcatggttatggatcctgtatcaaacgtcatttgcgattcggtggacactggagagaagagcgccactcacgatacacacctaccattattaccaacgagtataacagttcccaaacatgcctgtattgcttcaacaagctgtctcaccccacttttgcacacaacaacgccatcaagaccaccaagggtacttttgtttgtttaaatgaggattgcccaaacgcctttgtctctgtgtgtagagaccaagtgtcagcgttagctataggcttggctggtctttcacaattgttatttggggcagcctttccgtgtttcgacgaggataccaatccaatgaacaagaccagattctacgaaatggccacgctttttttgagggagcacgcctaggatccttctcatacttacgaaacctttgctaatttctcaataaaaaaaaagtatatggtgaatggctattgtccaatatacagatgtaaatgtgaaacgcacttttgatactcgccgtacagacgatgcatttccttccatttacttgatacaaaaggaagatggctcgtacaagaactaggaactaagattgcaagcataaattatctttaaaacagtcctatagtagtttagcaattccagatttggcatcaatgctttttggcagtcgtcttttcagcttgtgcagatattttcttgtttgctcttctttcctacatctcactcaatttatgggtattgctcactatacatctcatctagaatgcggccactgctctctacacgccatcatcaagactctggtattgtacactgtacacatcgtcgaatgaatggtattgctcactgtacatttcatctagaatgtggccactgctctctacacgccatcatcaagactctggtattgcacattgtacacatcgtcgaattaatggtattgctcactgtacatttcatctagaatgtggctactgctctctacacgccatcatcaagactctggtattgcacattgtacacatcgtcgaatgaacggtattgctcactgtacatttcatctagaatatggtcattgctctttacaccccatcatcaagaatctagtattgctctttacaccccatcatcaagaatctagtattgctctttgaacgccttaacaagatgacgcttattgcccactgtacatctcatctagaacatggtttttcctacatgtagtttagctccttcttttctgaatactgaaacagttgtagagctcgccttcgtttgaaggcattacattaggtaagtgacagaacaagggaaagaagccctctattaacgaatgcgttacaattccatttacaccatactattatatttctttttgtaagtttctaattcaatgctgtatcgtaattcagttgactaatcaaatctttattacttcttttggatcaacagtgaacttatcattacagtaaaataaaattaagtgagcctatcattacagtaaaactctgaatgataattaccaagcaatgtagcagattttgtaaatttacaccatacttgttttcatgtctttgagtctgctacgtcggcttaaagagggcctattgaggtggattgattgccgtttctgccctgagaacagcaccacaaaaaccaccattcactgaccgttcttagctcaacagttgcaaatataactcgtactgcaagatacataataggcagtattggcaaatatcagggcaccttcttctaaatcataatgcaatgactcaaatcaagagaaactaataatgctttttttacgttcagttgactagaatacttgtatttcttaagtgtcttccaccatgcatatagtttactacactactaaatagtttacatctcgccatttttaggcaaacaaaaataaattactaccattaaaaaccttgtaacagacatctatcaaagctttcttttagatttttcgatcctatacgcgaagatggctcataataggccagtgattatagtgatatatctttccattcttcacgttttgtaacttttatattcctgaccgataagccaccttaggacactcggaaatgcaatcatcaacagtaatccaacattaaacagattctaatgagcctaactggagcttaaaatattcggtctccgatatcggagttttctggtttttaaacctcgattttgccctgattctgaatctgcaaaccatttttttgtaggtaccatggttcctgacaaaagtgagatttgagatatttttggaattttaggctgtggtactagtaaaagtcttttaatttgatagaaatgccccaagtttatatagcccaatcgaaagaggtgcatgtttttgactaggacgtacttagtctagggtcgtaatagatgatttgtatgagtaatgatcaagagaaggtgcacctgcgtgatttttgtgctttttgaaggggtctacactcgaatttcactaagtgaatgcaagtagcgtagagcttgactattgtttgccattcaattctctatcggatggtatagatgtcatataaaaattttgacctttgtcacaaacccactgcttgagggacacgaaatttcacattttgagtagatttatgaagggaatgcatatgtggtgcccaaaactgttggatcatgatagatccaatgcgcagctatcgaatcgtttttgtttcatgtcaatccgataatttttcgttgagatattgtcaaaaaggggttcatggaaaatcaccagatttggaccaaaatctgcctgtcctagcaagggaaaaaattgtgtggtattttcaaaacacgacaaaatttttgatttctcatgctagagttatgctaaagcctcgagccaaataccatccgaaaggtaattttttgctctacatgaccaatgcaatgaaaggtatagtcaatatgatagaaacttgttaatccttgaaaaaccttcaaaacaacaccatcaaaaatcacctatataatggcaaccaagacacttgatattggtaccattgaattctgtacagaaaccatatagggctaaaggggtgtttactatcaactatcatccaattttgagatttatggattttagaatcgatgatggatcaattgtaaataccaaattttcaaataccgcctagttatattacagaccttatgaattttataggtcattttggagactagagtggtggtaaaatgtcatattaacttgcagttttcaaggtatccatggatacctgacatgttaatgcaccacctgtcgagttttgagtgctgtagcttacttttttccgttccatatcgtttccccaaattaaggtacgcattttcccccgcttaaaaatgggactttccatgtcgaataggttaggaacaaggcatttccaataccatgttccaccttaaaagttggttcatttccattcctttacaacatatttaagtatcaaaacattctggaatttctacctcatcgacccatgatgtacaaaatgaatttcgaatttggagttttgggtttcatggcattctgacatcgattttccagaaatgcacgctagagctttgggactagcatgttcctaagacggttttttgccctgattctgaatctgcaaaccatttttttgtaggtaccatggttcctgacaaaagtgatatttgatatatcaccttgtagaaaagtgctgcaacgacagccgatatctgcgatattttgcaaaatctgcatcaaaatctgcatcaaaatctgcatcaaaatctgcgaggtatgcgatttaatgcattgcatgcagaaattgatgttagtcatgaagattgttttatatttttttgggaactagacggataatctgtgaaaatatataaacccccatagtttaaagcatcaatattgtagttgtgtattttttaaaatatatacgctgccaaatgtattttgtcagtcttgtttcagttgagttcttttaagtttgaaaaatgctgcccaaaaacatagtagtattaggaggctctagtttattagctatcaaacttcattgttgtctcaaaatgcagatcacaacctctttaaattatggcctctttcataatatggcgcattgaagcaaactgactatgtcagtgctcttgttacactctataaaaacgtcaaacaaaatctattctaaaccaaccaaaaatacaacagactgtcgtgtacgctagctatgggtagtatgtaggtacacaatataaaatgtaaagagaaagatgaggtttattcaatacaatgtgaaaataatatttataccctagcaactaattactgctgacgtcagttactacagtcagcttctgcttctttctgaatggtctacgcactgggattatgggcttaaatactcgtctcttattggcgttgtgtcgtaacaccgcctcaggcactaacccatcaaacatgtcaatgacattatccccccttgaaactgatgttggtccctcaacatcctttgatgatccttcagagtctccttgctcttgtactggtccaacaatgtcttcatttttgtgcaaagagtcgtcagtgccacggaatttctgccaagatagtgcctttcttgattgcttggccacaaatgcaaagggagatattttttgcttggcgttcccacttgatcccacattgccagcttgagtcttcttgtcttcttccattttgttgccaggatcaccagcttcttctactttgttaccaggactaccagtttcttccattttgtcgtcatggctaccaattgcctctgcttgatcaccatcattttgcatttcatcaccatgactactgattgcaccatggtttccatgactaccacttgcttctccttgattgttgctgtgtgttgcatcatcttctgtcacaacaataggatcagagaattgatcttgttcaatctgctcttcttccacttcttcttctgttgctggtatactgatactgcgagatgaactttgagcgctgtgcaacgagacttcaccgtcactaccaatgcccgtttctgtcaaggtgggttcttcatgctgctgtattctgttggtattgtcgctctgtctatcagcatcccgtatatcatctaattcatcatcttgtaattcatctgctgatgatatgtcatcatatccatctatcacagttcgaatggtgtcatccacagcctcaacctcttgttcctcgcttgcaatttcagacatagcgctatcaaattcttcttcatgcggcgatatgtccccataggcttccaccacatgcttcagctcattgtcatcttcatccattgtagagttgccatcaccaccaacatccgacatgccactgcattccacatcactgttgtcattgtgcggctgattcatttgcagatcctcctcaatcgcctcctcttgctgttgctgatcttgatctactggcacactctctgacatattcacaaatggggacacaccctcttgactgccatacatgttgttggatagctctggctcttcttgttcaccaacaacaacacttgcacttgtcgttgacgaggtattaggctcaacagtagtagcatcttgaccttgatccacattggcatgaacaccagtcgttgagacagcggttgtagcagcaccgctactaccccctccctttccagctaaaggtaatgatgctcggggaactctaccactgcgcgttgtcgtggcctccttgacaagtctacggctggctgtgggatcgtaccatgtttgctctggcttatcgcccttggcacgcttgagtctgtcgcgatgtactagtgaatccaacttctggccagccatagtctctaattggtaagtaccatactcatcaaatgcttgcgttataatatagggacccttgaatcgtggctccaacccaaatttgccctcatgtgtcaacaacaccaagtcgccaacctcgtagtccacgatacgcatagccttgtcccagcgctccttgtctcggtcggacacagtcttcattcttgcttgagccgctgctctgtgttgacccaatgcagcgagttctcttgctgtaatgtctgccaccgttcttggatcttgcatagactcatttgagacaaacgggatgatggcatccccaggcaaccgaggctcacgaccatataccaaaaagaatgggctgtaacccgtagtggcattcttccagacacgcgaagaccacacagcaacatccacaaactcgtcccaacgatgtagagcaccttgaacgtattttctcagcatgtccttgacagttgcattgtacctctcgaccttgccatttgtacgtgggtggaacgcacttgtgagtttgtgatggctaccaagtagtttgacatactcttgcactagctcactacagaaattggcacctctgtccgtgacaaattccacagggcaaccaaaacgagtgacgatctccttgtagataaactgtgcaacagactccttggtggcatctggtagggcacacgcaatcggccagttggtagtggcatccacagcagtaatcagccaacgatttccattctttgtttgtggcagctctccaacaaagtccaaatgccagcgttcgaaagcacccacaggtataggcagaggatgcatctcgtcttgatgtttggataccttcttgctgttgagttgacatgctggacacggcgcaatccactctgcaatatccactttcatgcgtggccaccagtatcgcttacccatgagatgcatcaagtttctgacggaggcatgcccaaaactctcgtggtatttggacaccagatcagcacgttgggagaaggggacaaaaggcacttccagcgagggcttgtcttgctctttttgcttgatgacacggaacaaacgaccattcttgatgataaagttgggcttctcccgcttcaacatggcccttagctgcttggatttcactttttcatccgtaccagcaacaaacaacaatggccaatccgactgcaactccttgggtagttcactccatgacgcatacagatacagaggttccaaagactccttggccggttgggaggcatcaccaacacgagacaacgcatctgctacaacattttttttaccaggcttgtagacaatcttgggtgcaaacatctccaaatcagcgatccatcggatcagacgaggtgtaggcttctgttgcgtgcggaagtaggtcaaggggttgtgatcacagcacaccacataacctccaggacagccatcaatatagcagcgccaggtacgtaatgcatgcacaataccaatcagttctctctcttgtgcaggtagtttttgctctgccgaggacagctttcttgactcaaacgccacaggatgccattgcttgctttcatcatcaccaggttgtaacaacacaccgcccacaccaaaatcactgctatcagtctcgattctaaaaggctttgacatgtcaggcactctcaatacaggtgctgttgtaagcagttgcttcagttgcttgaagctggcctcgcaatcatccgtccactggatagctcttttcttgggtccagatccttgagtcaaatttgtcaatggagctgcaatatgagcaaaagacttgatgaaccggcgatagtgctgcgcgagacccatgaattggcgaacttcttgtacattggagggtgttggccaatcttgcaccgcttttaccttctgagcagaaggctgaataccatgttcacagatctcaaatcccaagaagaccaactttcgttgcgcaaatcgacacttctccatgttgacaaccaaaccagcagccttgagcttgtccaacacaatcttgagatgcttcttgtggagatccaaggtggggctaaacaataacacatcatctaaatagcacaaggcgaacttgtcaatgcactcgtagccaagaaccttattcatccaagcttgaaaggtcggtgggctgttgcacaaacccattccaagtacggtccattcaaatttgccatatcgagtattcatcgctgtcttggggatgtctgtgtcttgtatacggatttggtggtagccgctcttgagatccaggcacgaaaaataagacgcacccttcaaacgatccaagcattcgtcgattcgaggcagtggaaaggtgttacgcacggtcaccttgttgagagcgcggtaatcgatacacatgcgcatggaaccatcctttttcttgacaaacaaaataggtgaaccccatggtgacgagctaggacgaatcataccagcggcaagcaaccccttcagctgtctcttgagttcatccaactccaaaggactcatcttgtatgcaggcttgttaatgggcgctgcgtctccagtgtcaatcacatgctgcacctcctgtgcagaagggataccagtcaacttgcttttaaacacatcaggatactcgagaccaagctgctttttccactcagcgtccatgctcatggtgatttgaacctccttgttgtggtcctcacagacatgcaacagatacacatcggcttgcttgtgcttcaacaatcggtcgacttgcttgggagtgatgagatacttggacaccatattctcaacagacgtatcataaaaggtaagagtgtcattgtcccagttaaactgaggcttgtgctgtttcaaccaggatctacccagtataatgtcaaattttgaatcgtatacaaaggacgatacagataccttgtaaccctgaaggttaagtgcatattcaattttgtcggtaatcttgtgcacgctgccaccagctgtctccacttctctgttaaccttagaccagataccttggagctgatgagcaacgcttggcttgatgtagcactcactcgcaccactatcaaccaacactttgacgggcacatgacgatcaccatcgcgagagtacgcgaatccaccatacaggggtaagtcagacgacgaggagcttgtagccgagttgagctgatccaggtgagggacatcaatagccagccttgctgacaaaggctccaccatcttggcagtggctgttgatgatgtgcctttactgtccttcttattaggcgctgaagaaccattcaaatagtgctcacaggtgttcaatttattgtcatcatcatgtgcaacagaaggtgagctatcactattattgtccatggcattcagatttcctcttggcttcttgtagttaaactgcttccttttgcctttgtatgcaccaccagaaccttgattgttgtagcgatgactattgtccagcttgcgaatggcctcaatgcgatccctacagttcctcttgacatgacccggcttttggcaaaagaagcaaaccacagatgaactaccaccacgactagtcattgcatcgagatccataggttcaggaccaccaccttgggaagagccaacgccgcccgaaccagaaggagagtagccttgaccttgctgttgagcccatcttgaagtcatactactacgattgctactagaggaagcaccacgcaaatgaggtcttgtagctgcatagttcaatgcatgggtaaagtatgtttggatcttcctttgggctggttggtaatcacgcagttgggcttggagttccatgtcttggatgcctttcctgaattgatggcactgttcctcctgagtcataccagggatgagcatgacaatgtccatgaatgagtcacagtactcttgcatcgaaccagtttggaacagggaatccagggcatcacgagcatcatccacacttctggcaggcctaaagttgtcaatcaactctgctttcaacgcggtccaagtacttggcacagtagttggatggaactccttgtatacacgcaaccattcggccgcacgaccagctaacagagtacttgcaaagatgaatgtcttttcgtcactccaaccgtaaaagtccttgtgcgtgtcaacagcagagcaccaattgtcaatgatacgaacatcacgttcaccagagtacgcagagggttgcttcaacttgacggattggctgctttcgcccgtgatttgcttgacggcctgaaccaccatatcacatatatcttgaggtgtggccatttcagtgttcagatttaccagtgctttgtattacagtgcttgagagaataccagtgctttgagagataaccagtgcttttagagagaataccagtgctttttttgagagaataccagtgctgtaagcttcaccagttcttgatttcagtactttaacggatgacaaatccttttatcacggttcttttgagatatagcacgttcagcaattagataattagatctattg

SEQ ID NO: 29 - DNA, 4415 bp, Psitteuteles sp.
  source 1..4415: mol_type = other DNA
ttaaccctcggcctaatccggacgaaataagcgtctttgggccggtagtgagggagtctaactttctgtggaaaggtctcctctttgagggcctggctcaaacggtagaagctccgaaaagtgcgatcgactactttaagagtttgttgggctatatcggtgttcaaccgtttatagttcgagtttcccttacagtagtgatagttggactcgtagcaaagatgtttcccatcttggaagtaatactgccattgagtgtaaattcctacattgtagagatttttactcagtcggcagagttcccccaaggctttcaactctcgcactggaagtcctcgtatctggttcttttgagtcaggtacatagcttctcactagaactatgtgtattttagtgagaagtgtctccaatgtaaagccgtgctggaagcacgcagcaattctcattttggaaattcaactgctatcgggtgggatgtctaactcgagaccctcaagcataaaggtcagaaggtggtcccaactgtcgaagtacagtctgggtaagcgcgcgcaaatcattaaagaaggtttggcgcttcggtaagtgcgctcgtagcaactggtacttgttatcgagcaactcctgcagggtgtggaagagcagcgagaggatgttgatggtccggagcaaggaagaaagatgctgcttgtcatggccaaaattgtgttcgagatggtagcccttggtcttgagagtgttgttgttctcattctcaactttccaacgagtccgcccggcccgaaccacctcggctacattctcatcgctgagaggataattcgtggccaaggagttgtgataggttacctggccatcagcggtggtgacagtaagttcgcaccagttaaccaacagcgcctcatcgctatctttgagggggactccgttgagatagcggtaggtataggttttctcgactttaccagtccacttcttggtcgtgagggtcgggagttcgatgccctctaggtgttcatagagggtagtatgagactcggggcgacagacgacgatgaagttaagttgctgctctaaaaactgctgacacaacggttggtggcaatagaggtcatcccctcaaaccgtgacattcaaagccctcaagcattgttcttgcctcgatagccagcgtttggcggcggcattctcacagtcttgcttatcatgaccatcttggggcacgataaattcggggactaagggaatcacatgattctgtcccggacagacgatgactggagtgacaacactatggaagtaatgggtttttcctgacttctgggtgcgcgttgaacagtggggacagtgaatttggtcggaactgaagtattcggtgccatccaacgcgactaatagactgtcccctaggcaacggaagtcttctaactgcccctgggcttccaagacttgtaggatatcctcaaacactggaaacaggtgctctggggacacggcatctaataagtcccgaatctggttatcacagggaattcgatgaactccaaacagactttgggcattgctcttgcctttactcccctccatcagacgttgataagccagaaacgacggagtttgagtaaaaaacacactaaacgcacttaaagcggcatcctccattccatagcggcgatttttaccccggcgcttgtccggtagcgatgacaagcactggcggaaagaaccgactagagtctcaaagccacctggctttttcaacggctctggcgctcctgggtttcttggatgtcattacgatacagggatgctggggacttgaacaggttttcgccaaaatgagaattgctgcccaattttgggaatcataaccccaggattgaagcggggaacggaaggcgtgaagtagaacctactaccatatgcgaccactgccaaccatccatgactaaggaaatctgaatgttccgacttgaaccaccgtcataagaaggtagcgaaacaggttgacacgctgcgctcaaaagagcaaggggaaaagtaggggtttctctttactacctacacagacctttaaaattaccccggtggacaggacaagtctaaagatggaatgcccgtataaacggaacgtttaaacccctcataggttctcagcaggatgtaactgcacagtagtgaaaagtgtaagcgtatgcctttaaggggaaaggatgtgactgaaagctaatgcctaactgtaatggttaggatatgcccactagtcacggtgtggatatagagactgcgacaaataagagtgtttatgacgagagcgagtttaaagactacgatgttgtatttagctccaaaagttgaagtcacaaagcagggagttgttgccctgttcccgatgtcaaaaggggtatctacatcaggagccgtatgaggtgaaagtctcaagtacggtttggaattggagttggggaaggtgacttccctttcgaccataacgttgaggataaacctattgccagatatgtcaaacccaaggaagcggcctaaatccttggagtccatgaaagaacactccgcagatgggacgaaaatggctcaatcgagaccatcagaacccccgctgggcaacgacgatacaacgttgagtcatattctgatgccatcacgcagtgacaaacgcaaagtcgttatctatgccagagttagtagccgcgcccagcagtccgacctcaaccgacaggtggccgcactgtccaacctctaccccgaagcagaagtcgtctcagaaatcggaggcgggctcaacttcaagggaaagaaaatgctggccttactgggacatcatttgtcaggagatgtcggcatggttgtcgttgcccacccagaccgattggcaatatggggatttgacttgtttcgatggctctgtgagcaaaacagttgctcactcatggttctcaaccagacaagtctcagtccagaaccagaaatggttgaggacatcctcgccatcctccactgcttcagttcccgattatacggacggagtaaatacaaaactcaggtcaaagaagatccggatttaccccagcccggagctaaatcaagtctggcgtaaatggctggctgcttgtcggtattgctacaaccaagcaattgcattatctaggagtggtaaacgactaagcaaactgaaattacgcaacgaagtgatgcagagcgacttgcctgcatgggtcaaagaaacacccggccatattcggcagaatgctatctttgatgcctatctcgccttttcagccagtcctggcgcaaggtttaggagctgtcgggatagttctcaagccatcaagtttaacgatgctaatttctcttcagggagttggtatccaagactcacgaaaggattaactttcatggtttcctaagctatccctaaaacttgcgggcaagggactcagttggtgtttaccaaaggtcgatggttggcgattttccctgaaccagttgccgttaccccaactgacgctactggcgtgattgcattagacccgggcgtccgaactttcataactgggtttgatggttcacgatttctggaattgggctccggagatataggacgcatcactcggttatgtcaacatttggatgatttgatgagccgaatcgccaaggaaccctgtcgttcaagaaggcgacggatgaggcaagcggctcaacgaatgagaaccaaaatccgcaatctagttgatgaagcccacaaacaaattgctcactacttgactcacaactacagcataatttttctgccgaccttcgagacttccaacatggttgccaaagccaagcggaaaatcaaatccaagactgcccgcgccatgctgacatgggcgcattatcgattcaaactaaccctgagacatcaagccgagataactggaaccacagttgtagatgtgacggaagaatacaccagcaaaacctgtactcactgtggtcatgtgcattcccagctaggtggctcaaaagtgttccgatgtcctgagtgtgggttcactctacccagggactggaacggtgcttttggaatctttctaaaagctttgcgggataccgcctctgttaccttaacgggtaatagtgctatcgtcgcattgtcaggcaatagccggataaatgtcgcgtaaatgtatcagttccctgtccccttctctcctcatgaacctatgacttctcctacttatcgccgacgccataaatttaaattttccccacaacggtggcttaaagccgttcttaacaaggggaaaaagctgattccatctgcggttgctattctgattttcctggttgtttgggaggtgttcacggctgtttccgattcgacgttgcccggtcctatccgcacagtgtc

SEQ ID NO: 30 - DNA, 20546 bp, Digenea sp.
  source 1..20546: mol_type = other DNA
agaaattttggatgcagttgcagaagttcagccagactcagttaagatttggtttactttgggtaatttacgtcaagctcagggaaagttaccagaagcagaagacgcttacaaacaagcgctctctctacgaccagatgctgtttcaatttataacaatctgggctacactttgcaacaacaaggcaaatgggaagatgctataagctgctataaaaagctttggaattacagcccaactgcgttgaggtagatgtgaatttagggaatgcactccatgctcaaggtaaactctccccagaaaaacaagatcattatgcaaaattaaatcacaatttgggtcttggtaggaaaaaagtaggggatctagaaactgccgagatttactttcaaaaagccttagaactgaatcccaactatggggaagcttacctcgacttaggcaaaatttatcaagagcagaacaacctcaaaagaggcaatttctgcttatcggcagggtttagagctaattaatccccactatgccacacagtagaagcttaccagggttgtgagactacccaagaagtgccaaacgacaccaccaattcctcaaggaaaagtaattgttgcggaacatcctttccctgggattcccccagtcgcagatgatacaggaaaacgaccttttggagtgtagttatccctgtatataatcgcaccgattatctgcttgaatgtcttaccagtgtcttggcgcaatggcaaggggtagagcatatggaaattattgttatagacgatgccagtacaacaccagtgtttcaattggtgaatagtattggtaaaggagtaataagctactaccgtaatccacaaaatctcggtcttccaggaaattggaatgttggaatcgccctgactcgcggtcagtggattcacttactgcatgatgatgattatattcttccaggcttttatacccggctgcaacaaagtttagagggatgtactgattccattggtgcagcttttacaggttatcaaaacattaatgacaaagggaagtaattttcagccaacaagtctatggaaataagcggggaattgctgaaaattggctacaaaggattggagttggtaactcattaaatatgcctgcggtagtgattcgtcgagatgctcacgaacaactaggggtatatcatcctgagttgatatataccagtgactgggaactctacaaacgcattgccgctgtttatgattggtggtacgaaccagaaattttggctcgttaccgcgaacatacaaacaacgttaccagcgaacttctgttatctggtaagcagatgacatcgattcgccatgccattgaaatatcagaaagttatctgccgtcagacctgtgcggaaattacgagcaaatccggagccatcattttaattattgtttggcatccacagcaattccctctcaaggctaagaattttcctggagcatgggggatgctagaagaagctttaaaaatagatcgaagttctgaagcggtagccaagctatttacttggttaattcaggaagaagcaactcctgtgcgggatgagattgcctccaggttgatttcattcccacttccacttaatgaagataagaaatttttgaaaccaaaacaggtacagccagaaccagtcaaacactgggaatcagtcaagcactggtttactctcggtaacttacatcaagcccaaggagaatttgccgaagctgtggatagctatcatcaggcactagaaatttccccagacatagcacctatttataataaccttggttatgccctgcaacagttgggtaagtgggaagaagcgatcgcctcctatgaaaaagccttggaactcaagcccaactccaccgaagccggttcaaatttgggcaacgcactctatgctcaaggcaaactttcccaagaacaacaggcatactatgcaggtttaaactatcagttaggtatgagtctgcaacaacaagggtatttagaagaagcgataacctcctataaaaaagccttagaactcaatccccacacctgggaaatatacaatcgcttgagtcagatttatcaggcacagaacaatctcacagaagcatctgctatttatcgccaggtcttgaccttactcaaccaacagtacgatcgagcagtaacagctaacccaagttccacccctccagtgtcagaaacagtggcgaagttagtagaaatatacaataaccttggttacaccctgcaacaacaaggcaaatgggaagaagcgatcgcctgttatgaaaaggctttagacctaaaacctgaatttactgaagccgatatcaattggggtaatgccctccatgcacaaggcaaactctcagaagaaaaacaggctcactatgcacaattaaattataagttggggttgttcggcaacaagccggggatttaaagaatgccgtaccttattatcggcaggcaattaccctaaaaccagattttgtggaagctcataatcacttggggatggcactgcaatcacaagagaatttagaagaggcgatcgcctcctataaaaaagccttagaactcaaccccacaactgggaaatatacaatcgcctgggtcagatttaccaagcacaaaacaagatcgcggaagcagtagctatctaccgtaagggtttgactttactcaatccacactacgcccaagcggtagcagctaacccaaattccattatgcagacaactccacccattccccaaggtgaagtaacagtaggagaatatcagtttcctgcaattccaccagtgaaagacccagaggaaccccgtcccttctggactgtagtaattccagtatataatcgcagcgactatttcctcgaatgtctggcaagcgtgttggtgcaatggtctggtgcagaaaacatggaaattctagtgatggataatgccagtacagtgcccttgttcgagttagtgaacagtattggaggaggagtaattcgctactaccgccatccgcaaaatctcggtgcagccggaaattacaattctgggattgccttgagtcgtggtcgatgggtgcatgtcctccacgatgatgattgtgttttccctggtttttataccagtctccagaaaagtctggaaaaatgcccagattccgttggggttgcttgtacaggatttgaatatttcaacgaaaaagggaaacaattaacactggggaagtcgtttccttgtacggagaacataggggtatcatgcagcattggttgtcccgcatcggcgtatgcggtttagttactatcccctgcaatggttgtacgtcgaactactcatgaacggctggggggatattaccctaatatttctggaattgatgactgggaactgtttaaacgttattcctcttttttatgattggtggtatgaaccaggaattttagcccgttaccggagcatacccaaaaaatgacacctgaaaattggctttctgaaagctagctaaattaatccgtcgtgcgattgagatttgatacctatcttccgattgagcagcgagcagagattacagccaaagcccgcattcagaactttaactattgtctgacaagggcagcaattcccctaaaggctggtaatctagcaggtgctttttgtgtactcaagaatctctcaaaattgattcctctccccaatccatagcaaagttattcgcatggttaactcaagaggaagcagaacccttacggcaggatatcgcctcaaggcttattttacaaaacatcgactgaactaacgtaacgttaagcagtagtgttaatgttaagctataaactacaaactacaatcaatgcttaggatttgaggacatgaaagtacttgtaactggaactgaaggatacatcggctcattactcgcccctctgttaatgcaagagggtcacgaagtaattggcgtagacactgggttttataaggtaggttggttgtacaatggtactaaattaacagccaaaaccctcaacaaagatattcgcaagattacagcagaagacctccaaggggtagaagcagtcgttcacatggcggaactttccaacgaccccttggccagttagcgcctaatattacatatgatattaaccataaaggctcaatccgtttggcggagctagctaaggctgctggagtgcgtcgctttatctacacctcttcctgtagcgtgtatggttttgccagtcaagactacgttaacgaagagtctgccatcaatcctcaaactgcttatgccaaatgtaaaggacttgtggaacaagatgttaaactgctagctgatgatggcttttctcccacttttttgcggaatgccaccgcctatggagcttctcccagaatgcgctttgatattgtcttaaataacttagcagcttgggcttggacaattaaagaaatcaagatgactagcgatggtacaccttggcgtcctttagtccacctgttggatatctgcaaagctattctctgtaccttggaagcaccaagggacatagttcataaccaaatctttaacgttggcgacactcatagtaactatcaagtcaaagaaattgcccaaatcgtagcagatgtgtttacgggttgtcaactaagctttggtaagcatgacccagataaccgcagctatcgggtttctttttgagaagattaaccagaacttaccaggatttaaatgtgattgaatgctgaaagtggtgctaggcaattcttgaatatattcaagcaaattgacatgaccaaagaaacatttgaatttagaggatttactcgtctcaaacaactagagtatctccttcgtacccagcaaattgaccaagattttttctggtatcaataatatcaatttcattaaatattgctacactggctttgtgcctaggagtcaggagtcaggagtcaggagttaggagtcaggagtcaggagtcaggagggaagaatttataatatttatttttgatgagagtaaaactgttccatgattaactaaaatgccattaaatgggtatttcgggatagtaaatcttaaaaatacccttttctctccccacccctccccatctccctatcaaaaaaggtttgaggagttcctgataagggatagcttgaaaaagggtgattatatcatgtccggataataacagatcaaaagttttgtttgtaggttttagccaaaatcatagatagggctaaagccctactacatgcttttaattataactataatataatttttcatatttaacaatgcaagaacatcaaaataacaaaatttacatcaaggcaactgtctattttgtggcacagaattacgtcacacattcgtagatttgggaatgtctccccctgcgaaagctatcgcaaaccggaacagcataatgagatggaggcattttatcctttacatgcttatgtttgtgaggaatgctttttagttcagttgcaagagtatattactcctgaaaatatctttagcgactatgcctatttttcctcctactcctgatagctggttgcaacacgccaaaaaactatgttaatctggtaacagaacgtttccaattaaatgaccaaagtcaggtagtggaaattgctagtaacgatggttatctattgcaatattttgttgccaaaggtatccctacattgggaatagaacccgcgcagcaaacattgccaaggtagcagttgaaaaaggtattcctacagttgtcaagttctttggggaggacacagctagagaacaagttgagaagggaataagcgctgatttattgttaggtaacaacgtccttgctcatactccctatcttaatgattttgtcaaaggatgaaaatcatcctcaaaccgcagggggtaattacaatggaatttccccatttgatgcggttaatggcagaaaatcagtttgacactatctaccacgaacacttctcttatttctctttcattaccgtagaaaaagtttttgccactcacggtttaactatttttgatgtggaagaattacccactcatggcggttctttagaatttatgctcgtcatacagaaaatacttctcaagcagtgagtgaaaagtattagaactgagagcgagaagaagcggctggttttacaaacttagaaacatatttttcctttggggaacaagtcaaaagaaaccaaacgtaaattgcttgatttcttaagtaaagctaaacgcgaaggaaaatcaatagttggttatggtgctcctggaaaaggaaatactctcttaaattactgtggtatccgcactgattttcttgactatacagtgaatcgtagtccttacaaacaaggtctatttttaccaggaactcatattccaatttttcatcctgacaaaatccaagaaactaaaccagactatgtgttaattttaccctggaatttgcaggaagaaatcatgaaacaaatggcttatattcgggattggggtggtcaatttgttgtcccaattccggaagtaaaagtttacccttaattcagaaataccctgaatttgagtagaggtaatcctcttccaaaagagaaaaggttgtttccttaattgaatatataaaagtggaatagcctaatcaaaatttgcttaattaatagtttaaaaaaggaaaataaaaaatgaaagtagttctattttgtggcggttttggaaccagaatgagagaatattcagacagcattcccaagccgatggtgaatattggttatcgacctatattatggcatgtaatgaaatactatgcacactatggtcataaagattttatcttatgcttgggttacaaagctgacatgattaagagctattttttaaattataatgagtggctctctaataattttactctctcaaatggcggtcaaatgcaactctttaatcgagatatccaagattggaaaataacctttgtagatacaggtttaactgccaatattggtcaaagattcaaggcaattgaaccatatctagaaggagaagaagtattcctagctaactatagtgatggcttgacagacttacatctgccaatacacatattgataattttataagcgtgataaaattgccagtttttatgtgttaaaccaagtcaaagctttcacttagtttgacatggatgaacaaggtttggtgaaagatttcaaggatgtcacccagcgcgatatttggattaatggcggatatttcatctttaagaaagagatatttaaatatattaatcaagggaagaacttgtccttaagccttttgaaagattgattgctaaagagcaactttttgcttacaagtatacaggcttttcggagttatggatacttttaaagagaagcaacaattggatgatatgtatgctcgtggtgaaagaccttgggaagtatggagagataaagaattagaggtctcccatgtatgatggaaattaaatttaacaaaacagaagaatctgagtacaaaattctctgttttggtgcccattgcgatgatattgaaatcggctgtggaggtacagttttaaaactaattgaaaaatacaataacatcaccgtatattgggtagttttagctctaatgagcaaagagcgcagggaagccactgaaagtgccaatatcttcttaaaagaagtatcggcaaagaaaattatcattaaaaatttccgagatggctttctgcctttccatggtatagagttgaaagaatgctttgaacaattaaagcaagaattttcaccagatttgattttcactcattaccgtgacgaccgtcaccaagaccatcgcttaatttctgatttaacctggaatacttttagaaatcatttaattttggaatacgaaattctaaatatgatggcgatttaggaattcccaatttttttgtgcatctggatgatatactctgtcgccgaaaaatccagtacattctcgatgcctttcaaagccagaataataagcaatggtttaccgaagaaacttttcgttcaattctcagaattaggggtattgagtctaattcaccaagtaaatatgctgaagcattttatggtataaaatagtttttaatcaattcagatgatattcgcagaaactaagctacgaggcgcatttattattgacttagataaaaaagaggatagtcgaggttttttttttgctcgtactttttgcgtcaatgaatttgaagctcatggattgaaacctacagttgttcaatgtaacctttcttttaacaagaaaaaggaactatgcgaggtatgcactatcaaaaacatccctccacagaaacaaagttagttcgctgtatccgaggggctatctatgatgtaattattgacttacgtccagaatctcctacatacttatcccatataggagtcgaattaacatctgaaaatcaccgtgctctctatgtaccggataactttgcccacggtttccaaaccctagctgatgagactgaagtactataccaaatgggtgatttctatgccccagaatatgcctccggttatcgttatgacgactcagcttttagtattaaattgcctctacctgtgagtgaaatttctgataaagatttagcttggtcatcatttacaaattctaataactctcaatagaatataacagtaactacataattattaagagcaacaatagttaactaaaaaaccttttcaaacctttttaaagctgctaatatatagttagtaaattttgataaggtatgaagaagtatgtcacgccgaaagaggcagcagcatattacggtgtcaacatcagcactctcagacgatgggataatgaaggaaagcttgacagcatcagaactccaggaaaccagcgacgattctgcattgatgaagaacatccccaaaagtaagccagttatcgcttatgcaagagtctctagtcatagccaacgagatgaccttgagcgacaaattgaattttacgcgcaaagtaccccaacgctgaacttgtttcagaaattggaagtggactcaattttaaacggcgtaaattcctcaaaatattggaacgcatatgtaaaagtgatatctcaacacttgtcgtcgcttatgccgatagagcagtccgatttggattcccacttattgaatggttgtgtcagcaaaatggggtcaagctcttggttctcaaccagagaaacttatctccagaagcagaactcgttgaagatatcttgtccattctccattgcttcagtgcaaggctttacggattgcggaaataccacgaatcagtcagcaaagcgattcaagacaaagcctcggaaccagactcgaagttgacacccaacagtgtcaggaaactcagggtgtttccatctgatgcactgcacaaagtctggaaacgttggctgagtgcctaccgttggatatataactggacgattgcccaactcagagacggtagcaaagcaagtgcttacgatttgcaaaagttagctcgcgatgccgaacgtccagactgggttaaagagttgcctgggcatcaattacaagaagcagtcgctgatgcagtagatggtcacaaacaagctatagctaataatggtatagcaaagtttaaatcttgccgtcaaccgtctcaagtaatcaagttcaaagttgataactacaagaaaaaccactggtatcctaccaaggtgaaggggttgacctatcattcaccagaaggttttcctgctgaatgtagttatggtactcaattggtttttgagcgtggaaaatggtatgggatttttccagaatataagcaaccctatcccacaaagcaatcaaaagttattgctcttgaccctggagtgcgtacttttatcactggatatgatggggaaaaaaattgtggaatttggcaatagagatatgggaaaattcaaaggttgtgttcccatttagataatttaatgagtcgcattgacttaagcgtggctaaacgtcaacgacgagcaatgcgtaaagcaagttatcgcattaggaaaaaaattcaaagtctagttaaggatttgcacaataaagttgcacagtttttagtaaaagaatacaaagttatctttttgcctactttttctacatctgaaatggtagtcaagtctggtcgcaaactaaataaacggacggctcgaaatatgctctcatggagccattacaagtttcagcagcatttaatccagatggctaatagacataatgttttattagtattgtgtaatgaatcctatacttcaaaaacttgtcctgaatgcggtcatgttcacaagcaattaggtggaaataaaaagtttcaatgtccgcagtgcggatatactgcacaccgggattggaacggcgctcgtaatattatgctacgagctttgccggcaacagccatcactttaactggtgatgctatacagattcaaggtgaatagctttgagtaggttaaatgttgcacttcaaagaaagaattttgaaagtcgctgaggaatggctaaaatgagtacaatttttcgattctactattagtgatgatgtcagaagagagcatctctacaacggacatctattcgtctttttctccttgtcctagcgcgatagctctctgcgatcttgcccgtgaaatggcagaggaagcctttgctcctttagatcccagagaagctcaacacagtttacctgtggaagattttgttgcgattttagcgaagctcaagccagcatttatccaccatcccaaatcaaaaaaactcattcaggggatcttgcaagagagtggatgtgacttaaataaaacctactttgacgtaccaagactgagaacggcaacaagtgatggctatcttagcagtggtattgcttatgctttccatccccaccgtgatacttggtaatttgctcctcagtgccaaattaattggtggcttccagtttacgagattacatcagagaatggtatggcattccatccccgatattgagtcagctgtgaaaaaaatgggtcaagggactacaattatgtccagtggaataaagaaagtcgcaaaaatgctgcgaagcacattaaaacggatacacgcaagcaaccccatccagaagaacctctagagttagatccacaactacgattagtaacaaaagttggtgggatgattctattttcaggggcacagatgcattctactgtccccaacacttcggggtatactcgcttcagtatcgactttagaacggtacactttgatgacgcgatggctcaacggggcgctcctaatattgattctgcttgcacgggaacttccttgggcgacttcttgcggggcagtgacttctgctcaattccagagtctctggtgacattctatgacaacaaatcatttacagatgtaccaacttctcaaaaaattgcgatccctcattaaaactaaatctcaatcaaaagacaattcaatgactttagctaactttaacagtttaaataaacagtcttttgaacaatcgaagattttacaacaaaaagccattctctaattcctggtggctgccatacttacgctaaaggtgatgaccaactcccagaaaactcacctggctttattgtcaaaggtaaaggttgtcatgcatgggatgtggatggcaatgaatttatcgaatacggaatggggctacgtgctataactttgggacatgcttatccaactgtcgtagaagcagcttatcggcaaatgctgcttggcaataattttactagaccagcaaccattgaagtggaatgtgctgaggaactacttagttgggttcccgatgcagaaatggtgaaatttgccaaggatggctcaacagtgactaccgcagcaattacactggcaagagcttatacgggacgagatatggttgctatttgtggcgatcatcctttcttctcttacaatgactggtttattggcagtacgcctatgtctgctggtattccacaagtgattcaagatttgacggttaaattccattttaatgatattgaaagtgtgaaaactgtttttgctaaacatcctgggaagattgcttgtgtcattctagaaccagctaaatatgaagacccgtctaacgattttctccatgaggtacaaaaactctgtcaagaaaatggggcgattttcatcttggatgagatgattactggatttcgttggtctggtggaaacgcccaagtttactacggtgttgttcctgacttatcaacatttggcaaaggtatgggaaatggttttgctgtttctgcactggttggtaaacgagaactaatggagttaggcggaatttaccacgacaaagagcgcgtatttctactttctactacccatggagcagaaaaccatgccttagctgcatgatcgctactatgaaagttttccgacaagaaggtgtaatagaacatctttaccaaaaggagaaagattgcgcaaaaggattaatcaggcgatcgcacttcatgaacttcaagattacttccaggttattggcaaaccttgtaatttagtttatgcaacccgcgaccaaaataaacaagcatcccaggcatttagaactttatttctacaagaaactatcaaacgaggcttaataatgccttctcttgtggtgagtttttcccacagtaatcaagatattgacagtaccattgaagcagttgatgaatctttggaggtttatcgaaaagccttagaaaatggaatagaacagtatttaattggtcgtccagtcaaacctgtctttagaaaatattgttaaatagtgtagaaaatttggtcatatacaattataaatatgctgcaacagactcatccaccctatttgcaaaactctagccattcagagagaattggtcaagacctttatcaattaatctctgaactatatcctatctgtcgcagtattacaggaaatgggtttagagaaactctgaaaattatccaaaaacatattccattagaaatccatgaaataccaacaggaactcaagtatttgactggactgttccgaaagaatggaatattaaagatgcttacattaaaaactctcaaggggagaaaattgtagattttgctaattcaaatctacatattatgaactacagtattccagttcataaaaaagtatcttttgcagaacttaaagaacatttatttacaattccagaacatcccgattggattccctaccggacttctttctacaaagaaaggtggggattttgcttaactcacaaccaatatttagaattagagaatgaggaatatgaagtttacattgattcctccctcgaaccaggtcatctcacctatggtgaatattttataccaggaaaaactacagacgaggtgttaatttcttgcccatggttgtcatccctccctttgtaatgataatctttcgggaatatcaattgctgtcttttagcaaaacattttagtcaaattacaccatactactcttatcggtttgtttttattcccggaaccattggttcaattacctggctatctgtaaatgaaaaaaaatgtttctaaaattcaacatggtttggtattaacttgtttgggagataatggtaatttgacttacaaaaaaagccgtcgtggtgacactgaaattgataatattgtctcttatgttcttaataatacggctgaagattataaaattatcgacttttttccccatggttatgatgagcgtcaatattgttcaccaggatttaatttagctgtagggtgttttatgcgatcacgtcatggcacttttcctgaatatcacacatcagcagataatttagactttgtacaaccccaatatctagctgattctttctctaaatgtatgtcgatattacagattctcgataataataaaatctacataaaccaaaacccaaaatgtgaaccgcaattgggaaaagaggtttatacaggacaattggtggtcaaaagatagtggattaaaagaaatgccaatcctgtgggtttgaatttatccgatggagaacatacattgttagatattgctaaaaggtcgggaatggcatttgatgagattaaaaagctgctgatgcattattggaaaaatggtttgctattagaaagtaatatcaagtaatatcatgtccggataagagcgtgataaaaaatttttgtttgtagtagggctttagcccgataatggatagatagggctaaaagcactactacgagctttaattataactattcaaccggacatgatcgggacttaagcaaaatatcaaattatacaccacttgtaggggcgattcgcgattaggggcgattcgcgaatcgcccctactagatatggtggttctgcgtaagtcctgatgatataacattaattaaccggaatgtagggacgtttcgctgcgcgacatgaaacgcatttttgttatgcaaaggtccctacgaggttggggaaagattctttattacagttattcaatgagacatgatataatatcaaattcgcttaattcggtatcaaaaaatgggtattgctgaatggtaatgatttttagattaagtatcaacgcaaaacataagtttttcaattttaccgaaaaataaaggtataaagcctctccttttaaggagaaaaaagaaataatatttcctgatattcaatcctctcggttttaaccagaggtaattatcaattatccattatcaattatccattaatgaacttcagctacttactattacatttcagcaatgccaaaaaatgttctatcttcaatcattgccaaatcttttctcaattctctcccctccttttggggtaaatggctatttgccctacaacatctaattaaaccaatgctatcggacttaatatcacatccataatgtctactttaaatgggatttcttcatcgaaatcataatcattttcccctggttgagattgacctaaatgttcctccgcagcttgaattttagcaaaaatagatgttccagaatcaggtcgttttttcatcagtatatcaattttgtatttagctttaattgcctctcgatattctttagaaatcggtttttccggccaattaaaatcagtagctttgacaattggtagtcgagaacctaatttttctattggcatttctggtaatcgcaggagaaaatattctcgcctacgtctaattttttctgctcgattttcaatttctgctaatacacctgctaactgactaggatgatgttccgaaatagccactataacttcaatatcatctaagggaatacctaaactttctgctttggctaaaaattcatcgggaatatgatttgtgactggaggatttaccgcagcagacatttctgccatagctttttttgatagtttctttagcagtttcaactgtttgattattaactttatttgtcggagcttcactgacaatatcttctaaatattgagtagcattggttaataatttaattgctttttaaatgttcataatccattttgaataatttttattcagtaaaaagttgatacaatttctagaggcatggctataaaatttagaggttaaagatagtattctgtcattgcgactggaacggagtagcaggaattcattaattgataattgataatggataattgataattacctctggttaaaaccgctacggaattgaagattgggaaatatcatttcttctcttggtctattggatatggcggacttcggagcggctctgttaagagcgggaaacccgctcctacggacccgctgcctcttacagaggagctgcgctaacgctaacgccatcccatcctaaggtcatgctgcgcaaacgaccgctctcttggtcgattggatatggcgaggtttcctcgccatcccatcctaacggactgctccgcaaacgaccgcttttttcctcttaaaagggaggctttgaaacccgaattatttaattattaataattaattaataattcggcaatctcatcaacttctaggaacattttatatgaataaagccgaaaactcatactatacgaatcctatttcagttgtaatattttggtggtagttaggagtcaggagtcataattttaaaagttttccgttaatattaagtattctaaaaaattttcacaaattatttaggattgctatataagtcatagtataattaggtattcaagttaggagattggtataaggcgaaaacctgttctacttatcctatcatttcaacttaaacaaaatggaaagaagcaatcttcttaatctcctttaggatctatttttattaggagtggaaatgtcattgcgacttaaacagagtgaaaggaaacaatctcatcaactggtatccattttattattcaagaggttctaactcttgcgttgattgccatcctggttgccaaagagagcggtcttttagttgtttagcatttagccaaaatctcacacttgagtcacaggatgctaccatttccagcaaatacccattgaccttgatttttacgatttactacttgaaaatgtcgccatccccaagtttttgagttgccgtccatttagaaccaagaagataaggaaacttttgttttttttggcattttgtaatgaggaacaaggaaatataattctaagataagtctaaccccatttcattattttcatcaaaaccaagatgagaatatagaggtttgccttgaggggaagcatgaagaataactttagtacaactaatagacttgaggtaagtaatagcttcttccatcaattttttagcaattccttgacggcgataatctgcttcaacataaactccccaaatataaccctgttttcgatattccggcttgataatatttggatataaaccagcgaatatttgacagctaactgaaccaactattgtattatttctatcggcaataaaggcttgataaaatagttgctgccgagcgttatcaatatattcttttgtaatttctaaccagttagattgaatcgattcatcaggaacaccaatatcttgccacattagataaagatgtttggcaattagataattttcttgtaggtttgctactctaatattaatattttctagcattgaaactttggataattttagttcccaaacttattattatagaaatttaactttgggcttatatcctactacatttttggttaaaagtacctacttggatactagcctcacaattaactgttagaataacttagttttgttaaccttaacaatatacattaaagatgacagatatgactcagcaatatcagattggtttagttatctatccagatatgactcaacttgatataactggaccttttcaagtgttctcatttattcccaatgctcaggtactaatactttggaaaaacttagaacctgtccgcagtcataatggtttgacaattttgcctactctcactttcgagcaatgtccaaatttagatgttctttgtattcctggaggtccaggtcaaattgaaatgatgcaggatgaggaggttttacaattttacgagagcagggaaaaacagccaagtttgttacatcagtttgtacaggttctctcatattagctgctgctgaattactacagggttaccgagctgcttgccattgggcgtttcgcgaccagttagcaatgctaggagttgaagtaggaacagaacgagttgttattgaccgaaaccggattactggggtggagtaactgctggtattgattttggactagcggttgcaagtcagctttgtggggaagaaatggcgaaaacaattcaattgttgttggagtacaaccctgcaccaccttttgatgctggttctccagaagtagcaggagcagctttagttgaacaagtgaaagatttaggaaaaccaatgttagaggcatctttggcagcaactagaaaaactgctttagcaatgggatttgatgtatgaattttaattagggtttgctgattaaatctcaaaacttatacagtaaagatttaaggcatttttttatcagagaaagtaccagtttttgctctcgtgatctgcaaaaagtgaggattttaaacagacaacagcggaaaaattaagggataattgttccaactacattgcctaagttcaccatttctactgactactacaaagagtaaaaatactttaaatagtaaaaatactttttcagcaaaccctaattagtgtgactattaggtagttggttttagagcaattccaattaatcaatcatacttaaactgtctcccttctagccaatcctctttgaagagtagcaaattggggaggtctaaattgtgtacattacttaagttgacactagacctgctgcttgcaatgcttcccacactctgtttgaacacttttccggtgtcagagtagcgatcacaaccactgaattcctaaaggtccgacttctggatcgtcactactgagattgctgggtttcggttccctctacactgataaataatatttaaagcatgaagtagcttcccttctccttcaggaaaaaattttctctgctattgtcagcagtcgttctacttgaaaatctgtaattcctgtttcttcttttatctctcgtgctagtccttccattagggtctcttgtggttgtaaacctcctcctggtaagtcccaacaattaggctctgggtttgtcatttgatgtagcaacaacacttgatcgtctgcaacaaataatcctaatactgctactcttaatcttacttctgattgcatttttttctgaattaatctcaactcaatgtatttcccatactaaagattagggagaatactcaaatctgaattaggatttacctaaaaaacccagtttctacgataaatccttgatttgaaccatagacatctataaaacataaccgagtttgcttacttcgcgtcggtaagtcttgtgaatattaatgtccaattatcagcttatactcctccaaaaataaatataatacttttttatagttaatatcagtttgtcttttatattattattttaatgtagataattatttatagacaaattctatcatcaaaaaataaatgaaaaatgatttgtgataatataactcgtgataatagtcactaattaatattggttatttaggttatgtttaattttagaggatacagatacagatgggcaattgcatccaattaacctaactgagtaatccggtttttaccctattgatataccaaattaggggatgccactatctcaaattcaagcaataataaaagtgtagggagtgaaaataaaattacagctagggggtgtccataatggttaactttgattgcttctacattttactgacagctataatttacctgggactaatttatatggttttaagctggattccaaataaaattaagaaaattggctagaattgtgggattaatagggtatgggatcgaggtaaagacttttttttctgataaatgtgagaaaatagcgttggcggagcaagtgcggcagctatatcgcctcttaacccaaccctcttctgaagaggtggtttttctgagtcttttttgagaatactaagcaaagtatctaagttaaaatactgattattagattacttaatcgagtttggttcagcaattaacaattaacaattaccttttctgtttaagaagaagattgactaaaaggaaaattttttcttttctcttggtcgaggatggcgaggaaagccactcttgcaaagctgctccgcaattcaagtcgtcgagtcgccttcccatatcttttccgttcgcctagcgtttctgaaggaaaaggaaacggagacctcaaattacacacttgatgcatgacttccgtgtagcagcactaggatagcaactcccaggttttgaagattgcttccctggtcccaatgacaactgtttaagatttcttatgtgatatattatttaagttgtttgagaataaatacttaagctaaaaagatcaggaattcgcagatccgagtctattcaatagattaagcaagtagagaattatttttctgatttgatattactcttctaaaaccttagaagagtcttttaaatcaaggtgttctagattaatagtaaatttttcttatgagcaaaatattaataactgtaacaagggttgcttttttttggataaagggtattatgatacaagtatgaataaatgaaaaagcagttaacttgttttgaacaaagaatttgcaaggctaataactatttataaatccagataaatagctatctgacatcaggggaggaaagagaggaaaatggccaatgcaactacagcacaaacaaatatc

SEQ ID NO: 31 - DNA, 13563 bp, unidentified
  misc_feature 1..13563: note = Fanzor polypeptide
  source 1..13563: mol_type = other DNA
tatcttttattctgggaattcctcactgatttgaataacgttattttacgcgttatttcaattatgtgaaagattagaaatattcctgacattggattggatttggttattttagttgatacttcttcttatcaaagaactctcatgaatacgatacatattctaaaagaacatgtttaattggaattgattgtatgatcttatttaaataaacttatattttattttattttaattatgatcttgtattaagacttatatttattaatgtcaactacaatcagttactgttctacaacagttatttctctgtatcttaggtgcatgaaaagaaatggttttagtgtggcccatttgccctagtggtgtacttcaggagcggcaccctggtaacctcactaatgccatccccctcaaagtatttcgtgttaactattacatcaaccaaatatatattcactaattgtatttctctttcctcatcttatttttctcgttttatagccaactactacgttctcgtgttaccaaatattcgtaccactcccacagtcttcctgttcgctcgctatgacagcttgagggctataaataaaactctgttcatttattttttaaatgcctatcaaagcctttgtttgataacagttatagtcaagtaaaatttgagattttcgagagtttataactgctgttaaaaaaaactataagatgtattaatagccagttgaacagtagaatgattatgtctcaaaaaaaccttctcgaaataaaaagtaattttgccataggaaaacctaatgttgctataatcctgtatgtatatcagaaacgatattttcacatcctgtggagacactattgatgaatgtccttaaacaaatacaccagaatgcgttttttgatgaaaggatgggttctccacatacttgtacatattataaaaaaccttccttggatccctgtttgattcacacttcattaaaaaaaagctatctttttatgagttagctttattggtcaattgtcaaatatatgttatgggagtattacaataaaaataatagtacctactatgtatacaatttcctactaagcttaacagtcacctacttaaaaccataaaatctattattttaacaacaattttgtaatatcttcatttctttccatataatatgtcccttacgcgtatcccaatttacccaaatgctgaagccttcataaagctaaaaaagcaatatatatacgaaaagcaacaacagcaagaagaagaagaagcggcagcagcacgcagtaattttagaggtcaagttaaagaaaaaaaggtaatgtgaactatgtgccaataatgaaacagaagaactcaagttttagaaggcgtaaaatggaaggatacagcggaagaaaagattaacaaaagatcagccaaactggcgcgtaattcccgtgttgtaacaacagacgtattgtgtaaatcttgtggtgaaagcgggcattcatctgcgagaagcaagcaatgcaaaaaccataattacacaatacaagaagtaattgaaaaaaagatcggcctcaattatcaaagatacactatatccgtaccacttcgatcttttctccctataccagatgatgcgtttaataataccctgaaaaaaatcaagagtttgtcgatgttccttagaaatgtgatgtatagggcacagctctttatcaaccactatatccttaaatacccagatggcttgccgaatgaattttttcaacaaaacttttggtattctttatgtcgattaataaatgaaaatatttcaattgatgtcttcaagcaaaagtattcttcccatattccttatcttgaagaagtatggaatgaactcagcggccttgaaggtgtcagtatggtagtaaataaagaaggtcttaccaactatggccaagatttatcgaccgcatgcgaaagtgttgcaacatgttacaacaatttttacatagaaaactttggaaatgttgttaatagctactgcatatacatgattcgtaaagaatttccggtaaatgaaaatttgaaatagacctttttttttctacaacgattgatactatcaattcataggacttgaagatgcctttgatcaaatacattgtatacaatcatgtattagagatcttgtttagcaccccatcatcaactttacctgaaaacattggaagttctgtagataaacagacccaagacaaaattcgaaactttctaaacccgttgattttagaaatcaaagaccgcttaccaccagctcctatcacaaaagagacattaaataacgcccctttcaacataatgcctgtttttagacatatattatcaaaatacgaatcaataattgacgcgaaccaacaaataacacccgtagttcaactaacagtggcttcacaacaacagcctaacttattacagcaagcagagggttcaaaccagccacgacagaggcccaaaaaaaagaaaaaagtattaaaaaatgaaaacccaagggagcgtaataataaagatagacagttccaaccaccgagactgttcagtttatttccgaatccaagcttaaaatggcggttcatcaaaattgatagtcaaaacctacaaggtatttttggaagaagaacccatcaacaacaggaagagactccttttgatttaacccaaaggtctttctttgaatgttttgacttcaaaaagttgaaaattaaaaggtaagctatgtaaaacgttctatgaatagtatgcatacttattttcaacatgaatagtctggtagaactacaatcaatgcatgaaaaaggcaggatgttcttaaacagcttctataccgatggttatacctgtagagtctccttttgtagaaaaagatatatcaactcacatttggataaagtcacactcacgctaaatgacttcaatagcgagagggttgagcagctatttcgaacttgcacagtagatcctaaccggaaggacgttttcacatcttaccatggagcaaatgatataaggcgtctctctagctctgaataccataatatgaacggagttgtcaatcgtcaaaaactagagcaagaacgaaagaagagagacaatattgaacatattgaaacaagaatcccttcacccaaaacaactaatgctgaaaactataaaaaacacataatgtatatgctccagcactttggaactttagtaaacttttacgattttcaaactgctagaatacggtggtcaaactatatagggaatcgaaaagctacagatcatgccatcaatattctgctaaacggttctacaaaatacaacaaaagcaggagaaaaaaaaccagacgaaacaaacgtaaaagaagaaaaacgaatagcaaatacgaacgagacctatcaaatactaagcactcaaaaaaagggaaacaagtgatgaggtacaacttacatttttatttttattttttatctagaagcattgatctttttattttttataggactcacaaagaaaggtttgaagaaggagacagaaaaaagatgccaatgattgtatttggaaatggattgcaaaacaaatctcatgtcaaatacaaaggattgaggcgcgggatgactgataagttgtacaaacagctgaaattgcgtgaaaaatcgggtgaattgctactgcttgacatcgacgagtttaatacgtcaaaggtgaaataaatatatgctcattttgcacaagtattaataacgcatcacttcttttgtagatatgcaatgaatgtttcacgaaaaacttggagaatttgaagtgtgatggtcgtaaaatccatcaggtattcaactgcaaaaattgcaatatcttttggaaccgagacgtcctggcatcaaaaaatatgttcaccattgctacctctatttggagcggcaatggatgtcccaatgtctttcaaagacaaagcgccacctccaatgtggttgcctcgactcactccggtgagtcgacggcttaaagatgactgcaggtaagaagtcttcataaagaaaaaaaaaaaagacaattctgatttccatataaaataggtaaacaaacttttaagctacagttgtgattcgtccaaaaaaaaactaacattttctaaacccataatattttttgtctcaactctatttttatttcatccaaaaagggtaagcaaagcgtctaacttaagtttttgatccgtctgaaaaaaaactgacatcatctgattttagactaaaatcctgtatgcatagatgtgatttatcataagacaatgaaggccatccaattgaatcaagtatcaattttgacccattcattcagcaactgagctatgaagacatccctatcactgcaatgaagaatcgacaattaaagatcatgttcagctttagcacaaattcacaaatcacaaatataaacaatagcaactggaaagcttttattaggagtcccatgcatcatatttccagaaatgtatggtacagacttcttcatagcaaattatccacccgatccaacttgcatagtcttatcccaacacttgtagaagatgaatcttgtcaactgtgtaaacttccagaaacagaacagcatatgctctttacttgcatacagaaacaagacatatggcaagcagttttcaagaaatacttatctaaccctaaagatcctcactgcagctcaatattccaggatttatctacacttaggctttccaagtattacatcctgcactaccatgacaagtttacaatatatgatttttttgccacagttattcgattcatttggaaagctcactggcaacaattctttgaacagacgcctattttggaagagattgtcatcaatcaaacccaaaaagaactattgaaactatctgcttacaattccttatgctaatatcttctgtattttcgtgacaagtcactgttttatacacttgcttcacatttaatcatctactctgatgagttttaataaacattaaaattttcatccataaaaaaaaaaaaatgtgatttatcataaaaaaagaaaaaaaagaaaatacatgtgatttattactatcttttgtattttcgcgacaagtcactgtttaatacacttgtatcgctcttaatctttatcttctgatgagttttaataaatattgaaattctcatccataaaaaaaaaaatacatgattttattggactatgtacagaataaggtatttaatgcggataataactggaaggtggatgggaaaatctcttgttgacttcatcttcagtaagttttcttgttacaaatgaaatgtcactcattgttctctgagagtattgatttggatattgtcttcccattgttttaaatttgcgaacatgaatacacattacgagtaataagatcagtggcaaatagacgaataaactttcaagtagaatccatatagatatatgataatcatctcctgctccatagcgtatccagcccaataaacacatacccatcattgacattgagaacagtaaaggcacaatacgtaaaaagaatagatcatccctattttgacgaacgttaccaaaccttgagctcttccatattacaaagcaattaataatcgtaagaatccataaaattgtaatacagataggcattgccacgctttgtacggttgaagtagatatttgaataacaatacagcatacaataattatagcatagaccaacaaaacgattacgcttgtccaatagttccagggacgaagggaatgcctttcttgtgctcttgggaatccctccgacttttcagaatctcttaaatagatactacgccaacgttctcggttataaagcgcagcagctacgtgtcgaatgaataatatctgagcttccataattccaaggagcaccaagatggatatcacaggtaatacattcaacacaagacttttactggaccaatctgatgttaatgtgaatccataatgtgcgctaagcataacgattaatgctatacttgtcaagaggccaaaaaggacaaaaggaagtaataaaagattatgacaacagcgtgctgccaatatgatagaaagtacagcaaaaaatacagtataaattatccaagctacttcttgtgctgacaacatggataagaacagaaagaaaagaagaaactaaggaaaggatcatttgtttatgtaaaaaaaaaaaaaaagcaatgctaaaaaacagctttctaaaaacaatagttttggccaagcctatcttttttccttttctagtaaagttttttgctcttccgtttctaataataagctataactctatttttatttttgacatctgatttttaattggttaaaataaaaataattaaaattcgggccaagactaagaaaagttgatgtcatgtccatttaacgaactctggtttatactctaattcatcaacaaattaaatttgaccatcttaaatctttaagcagagaggaagaagtcgatgattttaaaagctttatacaccattttcagaaagtaaattcgcatttttacaaactttataatgcaatatatacaaaaagcgttaagtaaacgcaatatttattcctgaaaatagtgtatgttttaagaaaaataaatagatgaaatggctatttcggacagtgattgattgagattattttctgtggttttatttattataatgcacacatcaaagagtagaaatcttctaccaaacttattgtcaccttctacaatgagttacacggaaacaaatagaaaaataaaaggtataatttacttatgttgtaggtgaatatagttagatttcaggtcgattatactaaacctgctaaagttttttatttttaaaaaaaaaattaaggtaaatcaatttgaaatgccccaggagaatattatctagtaaaaaaaaataatgtctaaaatggacatattctagttactcgcgttttgtttttgcagtacatttagataaacttgtacaagttaagcagctgtaattctataaaagaagcatgtacactatttattgagataaaaaataaatgcgctaaggcaattttttttctttaaatttttcttatgaaataaacaggctttaacattgggaaatcaaagaatttgaaggttttggagcaatattcttttaatttcaagtctagaaagaactattctatagaccataatcaataacaataacaaaagcaatggtttgtgctacttttcacaaaggctttgaattgtttcagccacactgaatttgcatgactacagtatgctgaaagtgaaatcagcaacatgttcaactcttgatatcaaattattctaattatttgaacataatgtttagtaaataagcaacaaggtattataggtatagccgcttctaatttgtttgtagtattaaactcgaataaaattcacaaactataaaaaaaaatgactgcattattgtaaataaagctgttaatgttaatccattgacaatggagagaaaggcatatatagcaaatataaatgcttatttctagtgacatcagctttcttttggcagctaaatgtttttaataatagtaattgaaaagtgtataaaatacaaataaaaaaagctgtaacttgttagctataaagttttaataataatttactaatgcaaggatgataatttactgaagggaaagtcaaagcttcatacaatatatagatttgtacaaattggccataaattaatgcagggttttgaattatacaaaatgctctaagcgtcagggcatgcaacacaatcacaatcgtcttcttctaccatttgattttttaattctctttccataatttctacataatcgccaactttgccttgatatggttgtaatctaagttcgtcatgaacaatggccaagcatgtagacaaatatttgtgaatacggggaatatattctgtgatctctggtggcatcattatttgcactttagaaatattcaataacaactgccaagcgttaatcaaaactcgcatgtcaaaataacagtcagtcgaccttgaccgaagatatttaattaagcgaacagtattgaaggcggcatgaactcctgttataacaatatgcttctgaatgtgggattcatgtggtcctagaaatgattctaccattgcaaagtattcttcatcagtaccttcaaaatcaatcttagcacgaagttctaatatcttttgtattcttctcctccattttctgctgatatttgcattttttggaatatttccgccattccaatgcatttttaataatttccattcattttcaggttgcggaattgctttagggaggtaagactgtgccatgataagccattcttcataaataactagtgtagtcaaaacaggtataacgctgtgggagcattctctttctaatgtactataaaattcttgacagctaatcgttgaatcaaacaaaggaagggacagtctaaactcaagtggtaaaactttagtgtaccaatgtctcattgccatctccacctgatgtccaattagacccacaaggtgatacaaatcacttgaataagcacacttgctagctttatgttcagttctttgtagaagtaatatgtacgaatgcatttgggcaaaccacttttcctgaattgagtcatcttcagcaatttcccattttccttcttcagagtgagttagtgtacagtaaggtagatttgtttcatcttttttcatatctggaagttgggcccttgtaatttcttcaaatgtctgtacacgacgcaaatgattcaacaagcgactaaaatgaacagcttctcctttctcttgtaaaaaagttgcgccttttcttttcatcttgaatatagccacatatttcggctgtaagaccactgaaattcgttcggccatatcagtatacagtttgcccttttcaaactcagaaatagtgagtgtgtagactgccatgaaaacgtaagcagtaaagctttccaagttgaattgatcaaatgaggcttctaaagcatcacgagcccttttaaagtaaaattttccatattcaaccaaagaagcagaaggtagacatcctgcaatatgtttacatcgcagtgtacagatagtagcacaaagagccattgcagcagcggattctcttgtgtcgagaaagcatctaataaacgtggggacatggatagctaactgttgaaaatgttgacaacgcaaataagcttgtatcaacttattggtcgtaacttgtatattttcaggtgaacatgcagtgactattgtatttacacttgacattctcggtgcagtaaaaatacgtattgattttgcgacgtttttacattgagttttaccatactttttgcgaatcaacataacaagttggtcgactatattatcctgtttaatgcaattttttattactggaggaatgcttgatccgtactccacagactgcagcacacaataaagattattaaacagatccgaataattgttgatatgcgtatcaatgcaaaagtctccttttttcacattaagcacccacggttgtgtttctctctctcctttttttaaaattgcctgtgtgccattatctaaaacagcaatcagctttgaatgctgggcaggttggcttgaaaagctgagagcggttgaaggtgatgaagggaactcatcagtcatacttccatcactgtcattagttaaagaaggtgtactacttccttgattcttcatgcgtttcattgttttttccatgtttgctatttcaatttctaacgactccgcttgctttaagagttctgtttgtattgcaatctgaatgaactcttcatcaacaggagaatgcgagcttgagtatacacaatcgatatcaaacttgtagcatctggatcgtatacctttgataagtaaagattatttgaatgcctaaattttaactaacctttcacagggttttaaaccattgcatttccgtttctgatttcgacactctaaattatattttaagcattttaattttttgattaatgtcctaaggcttatctaccttcgcatggaactttcttcattgtcatgcttaaagaaaaaaattcccaaaaagtaaaataattaatccgttactgcgtgtttataaactgtttagcctttaagccaatttctcttacagaatatgggaaaactattttgccgggcttattttaagtagaatgaactgtgattttttatattttattcgttgttgttgttatgctcctaccttgatagttataaagagacttatcattcaatggaataacaaatttcgtcttgtgatgaaaggattatctgcttatggaaacccatcgtgtattcaatttgttacagtgcaaacatgttctataccaaaagttaaaaacactaattgaaaataatcaacaatattgactatatatagcttcaaaatatatctaccggtttttatcgtctatttgcaaggagaattgatgctttaaaatatcgaaaaataaagctggaaactcatacctttaagaatttaacaacttatattccaagataaaaatatgcatgaagtatgtttttttctttacttactagcaattaactccaaagctgaaatttgcttaatcttaatagcattctttattgatgacataaataatgttcaggttggtgatagaagagcaggagttatggtagtaactcttcaatttgcgcttttatttattcaaaattacagaaaaataataaatgcacaaacatgcataccttatccttttcaaaccaagaaacgaaactttttttcatcacttttttaatttataataataaaaaaaattattcataaaatgaaaaagagtaataaagatacggtaggaccaaatatacattatcattttttttagttataaatatccagagttcatgtacttttcactatgtagatattattgtatacatttcgaagctgactatgtactatatatattatgcagtaagctgtatattaagtattatgaagacctattcataatttaatacaagaacgtgctcctgtatcgactgtttgctataacgttaaataagtccaaatttgtacacagttatacagttcaataaaaaaaataattatttgttattctgcaatgagctgctttatcaagtcagagaggatagagaaagaagagaaccggacagaaactaagaagcttgaatagtcaactaaaagaggacagtagagggtggcgttaaggatttgaagttatgaactgcaaataggacttaaaatagctgataagcaagaacgaaacaaagataagtaaagataggaatagacgtacagtctaatagagagaatgatacttgataattgactgatactttattaataactacaggtgtgtatttatacaaaagtcagaaacgcaatttgacaaaagaatgaactcagattattgagttttcagttaaaggatgttaagagactttaatgttattttcgagtttatatttaattctgatcaatgagtgatcttgccaaagtagtgaaaaccaaacaagtcagaagttatagaactttttagatagaagaaagaaagatgtcctttattaagtgtgttttttgtgtctatttatacactacctcaaaaaattgatcattttgaaccgccttttgctcattttgtaaattaactgcttcatattatttaggctagggggttttaggtaaaaggtagtataacaacaaagataaagaaatactgtgagggtatttctgggaagtcacagtctgactcagtctccagatttatcgtttttgggcgggattgagaatagtaaggaatttttttttttttttatggatgaacattttaatgtttattaaaactcatcaaagagtataaggattaagagcgatacaagtgtattaaacagtgacttgtcgcgaaaatactgtggtatttacacatgtaataaagtaataatgtaagttactacgaacaatggtcctccaaattaggaatatcggacattgtattacgccacttccaataaaatcccgatccactccagaatattctaataagttcctgatcaggattaataattacttcttgataagaagatgttaaactatgccaatcacataaataactcatcgtctaatatcgattaataatcaatacgcatacactgtaagtattattatttagccgtgattagaaaagtataaatacactcatatttttaacttgaataaaggacaatctactttgagtctcacttatttttatatttgttgattgacttagtactttttatattataaaacctcaaatatcacaaatacaaaagaaattagcatagagaagtgtgagcagatagtttcaatagctccttctggatttgattgatgacaatctcatccacgacaggagtctgttcaaataattgttgccagtgggctttccaaatgaagcgaatgactgtagcaaaaaaatcatagattgtaaacttgtcatgatagtgtaagatgtaatacttggataatctaagtgtggataaatcctcgaatattgagctacagttgggatctttaggatttgacaagtatttcttgaaggctgcgttccacaagtcttgtttttgaatacaagtcaagagcatatgctgctctgtttctggtagcttgcacaattggcagtagtcgtcatctacctttgctgggatgattctatgtaaattggcgcgagtggataattttttacgaagaagtctgtaccatagattcctaggaatatggtgcatagggctactgataaaagctttccaattgttatgacttatatttgtgatttgtgagtttgagttgaagctaaacattgtctttagttgacgattcttcaatgctgttatattgatatcttcatagctcatctgttgaatgagtgggtcaaagttgatatttggttcagttggatggtcttcattgtccaattcaagatcttgctgttcagctgataataaagatgcaaaatacggcttgaagataaggtttccagtaaggacagcatttttgattttttgtagaatattgggagagccacaatgttgtctgcttttgaactgtataccatttaaaaggaaatcttgttcaaagaaatgatatgctttttgtgcttgaagaaacttgctaaacttgaatttttcttgagggtcttcttcgcatatatctttgaagggaatgagcagactagtttgtaatgatattgtcaagtcattttctgtaggtgaacgaggacaggagtccaaagcactaaacatggggattattggatggaggcctttcatgttgccgtataatctagaatgtttgaatatcaaagggatgacgtgtgagggagcatcaaaggaagattgcagagtaaatatcaacatcttgtacaggaagtctggtatcctttgacgacagtttaacagcaatggattgatatatcgaa

SEQ ID NO: 32 - DNA, 12516 bp, unidentified
  misc_feature 1..12516: note = Fanzor polypeptide
  source 1..12516: mol_type = other DNA
tatcttttattctgggaattcctcactgatttgaataacgttattttacgcgttatttcaattatgtgaaagattagaaatattcctgacattggattggatttggttattttagttgatacttcttcttatcaaagaactctcatgaatacgatacatattctaaaagaacatgtttaattggaattgattgtatgatcttatttaaataaacttatattttattttattttaattatgatcttgtattaagacttatatttattaatgtcaactacaatcagttactgttctacaacagttatttctctgtatcttaggtgcatgaaaagaaatggttttagtgtggcccatttgccctagtggtgtacttcaggagcggcaccctggtaacctcactaatgccatccccctcaaagtatttcgtgttaactattacatcaaccaaatatatattcactaattgtatttctctttcctcatcttatttttctcgttttatagccaactactacgttctcgtgttaccaaatattcgtaccactcccacagtcttcctgttcgctcgctatgacagcttgagggctataaataaaactctgttcatttattttttaaatgcctatcaaagcctttgtttgataacagttatagtcaagtaaaatttgagattttcgagagtttataactgctgttaaaaaaaactataagatgtattaatagccagttgaacagtagaatgattatgtctcaaaaaaaccttctcgaaataaaaagtaattttgccataggaaaacctaatgttgctataatcctgtatgtatatcagaaacgatattttcacatcctgtggagacactattgatgaatgtccttaaacaaatacaccagaatgcgttttttgatgaaaggatgggttctccacatacttgtacatattataaaaaaccttccttggatccctgtttgattcacacttcattaaaaaaaagctatctttttatgagttagctttattggtcaattgtcaaatatatgttatgggagtattacaataaaaataatagtacctactatgtatacaatttcctactaagcttaacagtcacctacttaaaaccataaaatctattattttaacaacaattttgtaatatcttcatttctttccatataatatgtcccttacgcgtatcccaatttacccaaatgctgaagccttcataaagctaaaaaagcaatatatatacgaaaagcaacaacagcaagaagaagaagaagcggcagcagcacgcagtaattttagaggtcaagttaaagaaaaaaaggtaatgtgaactatgtgccaataatgaaacagaagaactcaagttttagaaggcgtaaaatggaaggatacagcggaagaaaagattaacaaaagatcagccaaactggcgcgtaattcccgtgttgtaacaacagacgtattgtgtaaatcttgtggtgaaagcgggcattcatctgcgagaagcaagcaatgcaaaaaccataattacacaatacaagaagtaattgaaaaaaagatcggcctcaattatcaaagatacactatatccgtaccacttcgatcttttctccctataccagatgatgcgtttaataataccctgaaaaaaatcaagagtttgtcgatgttccttagaaatgtgatgtatagggcacagctctttatcaaccactatatccttaaatacccagatggcttgccgaatgaattttttcaacaaaacttttggtattctttatgtcgattaataaatgaaaatatttcaattgatgtcttcaagcaaaagtattcttcccatattccttatcttgaagaagtatggaatgaactcagcggccttgaaggtgtcagtatggtagtaaataaagaaggtcttaccaactatggccaagatttatcgaccgcatgcgaaagtgttgcaacatgttacaacaatttttacatagaaaactttggaaatgttgttaatagctactgcatatacatgattcgtaaagaatttccggtaaatgaaaatttgaaatagacctttttttttctacaacgattgatactatcaattcataggacttgaagatgcctttgatcaaatacattgtatacaatcatgtattagagatcttgtttagcaccccatcatcaactttacctgaaaacattggaagttctgtagataaacagacccaagacaaaattcgaaactttctaaacccgttgattttagaaatcaaagaccgcttaccaccagctcctatcacaaaagagacattaaataacgcccctttcaacataatgcctgtttttagacatatattatcaaaatacgaatcaataattgacgcgaaccaacaaataacacccgtagttcaactaacagtggcttcacaacaacagcctaacttattacagcaagcagagggttcaaaccagccacgacagaggcccaaaaaaaagaaaaaagtattaaaaaatgaaaacccaagggagcgtaataataaagatagacagttccaaccaccgagactgttcagtttatttccgaatccaagcttaaaatggcggttcatcaaaattgatagtcaaaacctacaaggtatttttggaagaagaacccatcaacaacaggaagagactccttttgatttaacccaaaggtctttctttgaatgttttgacttcaaaaagttgaaaattaaaaggtaagctatgtaaaacgttctatgaatagtatgcatacttattttcaacatgaatagtctggtagaactacaatcaatgcatgaaaaaggcaggatgttcttaaacagcttctataccgatggttatacctgtagagtctccttttgtagaaaaagatatatcaactcacatttggataaagtcacactcacgctaaatgacttcaatagcgagagggttgagcagctatttcgaacttgcacagtagatcctaaccggaaggacgttttcacatcttaccatggagcaaatgatataaggcgtctctctagctctgaataccataatatgaacggagttgtcaatcgtcaaaaactagagcaagaacgaaagaagagagacaatattgaacatattgaaacaagaatcccttcacccaaaacaactaatgctgaaaactataaaaaacacataatgtatatgctccagcactttggaactttagtaaacttttacgattttcaaactgctagaatacggtggtcaaactatatagggaatcgaaaagctacagatcatgccatcaatattctgctaaacggttctacaaaatacaacaaaagcaggagaaaaaaaaccagacgaaacaaacgtaaaagaagaaaaacgaatagcaaatacgaacgagacctatcaaatactaagcactcaaaaaaagggaaacaagtgatgaggtacaacttacatttttatttttattttttatctagaagcattgatctttttattttttataggactcacaaagaaaggtttgaagaaggagacagaaaaaagatgccaatgattgtatttggaaatggattgcaaaacaaatctcatgtcaaatacaaaggattgaggcgcgggatgactgataagttgtacaaacagctgaaattgcgtgaaaaatcgggtgaattgctactgcttgacatcgacgagtttaatacgtcaaaggtgaaataaatatatgctcattttgcacaagtattaataacgcatcacttcttttgtagatatgcaatgaatgtttcacgaaaaacttggagaatttgaagtgtgatggtcgtaaaatccatcaggtattcaactgcaaaaattgcaatatcttttggaaccgagacgtcctggcatcaaaaaatatgttcaccattgctacctctatttggagcggcaatggatgtcccaatgtctttcaaagacaaagcgccacctccaatgtggttgcctcgactcactccggtgagtcgacggcttaaagatgactgcaggtaagaagtcttcataaagaaaaaaaaaaaagacaattctgatttccatataaaataggtaaacaaacttttaagctacagttgtgattcgtccaaaaaaaaactaacattttctaaacccataatattttttgtctcaactctatttttatttcatccaaaaagggtaagcaaagcgtctaacttaagtttttgatccgtctgaaaaaaaactgacatcatctgattttagactaaaatcctgtatgcatagatgtgatttatcataagacaatgaaggccatccaattgaatcaagtatcaattttgacccattcattcagcaactgagctatgaagacatccctatcactgcaatgaagaatcgacaattaaagatcatgttcagctttagcacaaattcacaaatcacaaatataaacaatagcaactggaaagcttttattaggagtcccatgcatcatatttccagaaatgtatggtacagacttcttcatagcaaattatccacccgatccaacttgcatagtcttatcccaacacttgtagaagatgaatcttgtcaactgtgtaaacttccagaaacagaacagcatatgctctttacttgcatacagaaacaagacatatggcaagcagttttcaagaaatacttatctaaccctaaagatcctcactgcagctcaatattccaggatttatctacacttaggctttccaagtattacatcctgcactaccatgacaagtttacaatatatgatttttttgccacagttattcgattcatttggaaagctcactggcaacaattctttgaacagacgcctattttggaagagattgtcatcaatcaaacccaaaaagaactattgaaactatctgcttacaattccttatgctaatatcttctgtattttcgtgacaagtcactgttttatacacttgcttcacatttaatcatctactctgatgagttttaataaacattaaaattttcatccataaaaaaaaaaaaatgtgatttatcataaaaaaagaaaaaaaagaaaatacatgtgatttattactatcttttgtattttcgcgacaagtcactgtttaatacacttgtatcgctcttaatctttatcttctgatgagttttaataaatattgaaattctcatccataaaaaaaaaaatacatgattttattggactatgtacagaataaggtatttaatgcggataataactggaaggtggatgggaaaatctcttgttgacttcatcttcagtaagttttcttgttacaaatgaaatgtcactcattgttctctgagagtattgatttggatattgtcttcccattgttttaaatttgcgaacatgaatacacattacgagtaataagatcagtggcaaatagacgaataaactttcaagtagaatccatatagatatatgataatcatctcctgctccatagcgtatccagcccaataaacacatacccatcattgacattgagaacagtaaaggcacaatacgtaaaaagaatagatcatccctattttgacgaacgttaccaaaccttgagctcttccatattacaaagcaattaataatcgtaagaatccataaaattgtaatacagataggcattgccacgctttgtacggttgaagtagatatttgaataacaatacagcatacaataattatagcatagaccaacaaaacgattacgcttgtccaatagttccagggacgaagggaatgcctttcttgtgctcttgggaatccctccgacttttcagaatctcttaaatagatactacgccaacgttctcggttataaagcgcagcagctacgtgtcgaatgaataatatctgagcttccataattccaaggagcaccaagatggatatcacaggtaatacattcaacacaagacttttactggaccaatctgatgttaatgtgaatccataatgtgcgctaagcataacgattaatgctatacttgtcaagaggccaaaaaggacaaaaggaagtaataaaagattatgacaacagcgtgctgccaatatgatagaaagtacagcaaaaaatacagtataaattatccaagctacttcttgtgctgacaacatggataagaacagaaagaaaagaagaaactaaggaaaggatcatttgtttatgtaaaaaaaaaaaaaaagcaatgctaaaaaacagctttctaaaaacaatagttttggccaagcctatcttttttccttttctagtaaagttttttgctcttccgtttctaataataagctataactctatttttatttttgacatctgatttttaattggttaaaataaaaataattaaaattcgggccaagactaagaaaagttgatgtcatgtccatttaacgaactctggtttatactctaattcatcaacaaattaaatttgaccatcttaaatctttaagcagagaggaagaagtcgatgattttaaaagctttatacaccattttcagaaagtaaattcgcatttttacaaactttataatgcaatatatacaaaaagcgttaagtaaacgcaatatttattcctgaaaatagtgtatgttttaagaaaaataaatagatgaaatggctatttcggacagtgattgattgagattattttctgtggttttatttattataatgcacacatcaaagagtagaaatcttctaccaaacttattgtcaccttctacaatgagttacacggaaacaaatagaaaaataaaaggtataatttacttatgttgtaggtgaatatagttagatttcaggtcgattatactaaacctgctaaagttttttatttttaaaaaaaaaattaaggtaaatcaatttgaaatgccccaggagaatattatctagtaaaaaaaaataatgtctaaaatggacatattctagttactcgcgttttgtttttgcagtacatttagataaacttgtacaagttaagcagctgtaattctataaaagaagcatgtacactatttattgagataaaaaataaatgcgctaaggcaattttttttctttaaatttttcttatgaaataaacaggctttaacattgggaaatcaaagaatttgaaggttttggagcaatattcttttaatttcaagtctagaaagaactattctatagaccataatcaataacaataacaaaagcaatggtttgtgctacttttcacaaaggctttgaattgtttcagccacactgaatttgcatgactacagtatgctgaaagtgaaatcagcaacatgttcaactcttgatatcaaattattctaattatttgaacataatgtttagtaaataagcaacaaggtattataggtatagccgcttctaatttgtttgtagtattaaactcgaataaaattcacaaactataaaaaaaaatgactgcattattgtaaataaagctgttaatgttaatccattgacaatggagagaaaggcatatatagcaaatataaatgcttatttctagtgacatcagctttcttttggcagctaaatgtttttaataatagtaattgaaaagtgtataaaatacaaataaaaaaagctgtaacttgttagctataaagttttaataataatttactaatgcaaggatgataatttactgaagggaaagtcaaagcttcatacaatatatagatttgtacaaattggccataaattaatgcagggttttgaattatacaaaatgctctaagcgtcagggcatgcaacacaatcacaatcgtcttcttctaccatttgattttttaattctctttccataatttctacataatcgccaactttgccttgatatggttgtaatctaagttcgtcatgaacaatggccaagcatgtagacaaatatttgtgaatacggggaatatattctgtgatctctggtggcatcattatttgcactttagaaatattcaataacaactgccaagcgttaatcaaaactcgcatgtcaaaataacagtcagtcgaccttgaccgaagatatttaattaagcgaacagtattgaaggcggcatgaactcctgttataacaatatgcttctgaatgtgggattcatgtggtcctagaaatgattctaccattgcaaagtattcttcatcagtaccttcaaaatcaatcttagcacgaagttctaatatcttttgtattcttctcctccattttctgctgatatttgcattttttggaatatttccgccattccaatgcatttttaataatttccattcattttcaggttgcggaattgctttagggaggtaagactgtgccatgataagccattcttcataaataactagtgtagtcaaaacaggtataacgctgtgggagcattctctttctaatgtactataaaattcttgacagctaatcgttgaatcaaacaaaggaagggacagtctaaactcaagtggtaaaactttagtgtaccaatgtctcattgccatctccacctgatgtccaattagacccacaaggtgatacaaatcacttgaataagcacacttgctagctttatgttcagttctttgtagaagtaatatgtacgaatgcatttgggcaaaccacttttcctgaattgagtcatcttcagcaatttcccattttccttcttcagagtgagttagtgtacagtaaggtagatttgtttcatcttttttcatatctggaagttgggcccttgtaatttcttcaaatgtctgtacacgacgcaaatgattcaacaagcgactaaaatgaacagcttctcctttctcttgtaaaaaagttgcgccttttcttttcatcttgaatatagccacatatttcggctgtaagaccactgaaattcgttcggccatatcagtatacagtttgcccttttcaaactcagaaatagtgagtgtgtagactgccatgaaaacgtaagcagtaaagctttccaagttgaattgatcaaatgaggcttctaaagcatcacgagcccttttaaagtaaaattttccatattcaaccaaagaagcagaaggtagacatcctgcaatatgtttacatcgcagtgtacagatagtagcacaaagagccattgcagcagcggattctcttgtgtcgagaaagcatctaataaacgtggggacatggatagctaactgttgaaaatgttgacaacgcaaataagcttgtatcaacttattggtcgtaacttgtatattttcaggtgaacatgcagtgactattgtatttacacttgacattctcggtgcagtaaaaatacgtattgattttgcgacgtttttacattgagttttaccatactttttgcgaatcaacataacaagttggtcgactatattatcctgtttaatgcaattttttattactggaggaatgcttgatccgtactccacagactgcagcacacaataaagattattaaacagatccgaataattgttgatatgcgtatcaatgcaaaagtctccttttttcacattaagcacccacggttgtgtttctctctctcctttttttaaaattgcctgtgtgccattatctaaaacagcaatcagctttgaatgctgggcaggttggcttgaaaagctgagagcggttgaaggtgatgaagggaactcatcagtcatacttccatcactgtcattagttaaagaaggtgtactacttccttgattcttcatgcgtttcattgttttttccatgtttgctatttcaatttctaacgactccgcttgctttaagagttctgtttgtattgcaatctgaatgaactcttcatcaacaggagaatgcgagcttgagtatacacaatcgatatcaaacttgtagcatctggatcgtatacctttgataagtaaagattatttgaatgcctaaattttaactaacctttcacagggttttaaaccattgcatttccgtttctgatttcgacactctaaattatattttaagcattttaattttttgattaatgtcctaaggcttatctaccttcgcatggaactttcttcattgtcatgcttaaagaaaaaaattcccaaaaagtaaaataattaatccgttactgcgtgtttataaactgtttagcctttaagccaatttctcttacagaatatgggaaaactattttgccgggcttattttaagtagaatgaactgtgattttttatattttattcgttgttgttgttatgctcctaccttgatagttataaagagacttatcattcaatggaataacaaatttcgtcttgtgatgaaaggattatctgcttatggaaacccatcgtgtattcaatttgttacagtgcaaacatgttctataccaaaagttaaaaacactaattgaaaataatcaacaatattgactatatatagcttcaaaatatatctaccggtttttatcgtctatttgcaaggagaattgatgctttaaaatatcgaaaaataaagctggaaactcatacctttaagaatttaacaacttatattccaagataaaaatatgcatgaagtatgtttttttctttacttactagcaattaactccaaagctgaaatttgcttaatcttaatagcattctttattgatgacataaataatgttcaggttggtgatagaagagcaggagttatggtagtaactcttcaatttgcgcttttatttattcaaaattacagaaaaataataaatgcacaaacatgcataccttatccttttcaaaccaagaaacgaaactttttttcatcacttttttaatttataataataaaaaaaattattcataaaatgaaaaagagtaataaagatacggtaggaccaaatatacattatcattttttttagttataaatatccagagttcatgtacttttcactatgtagatattattgtatacatttcgaagctgactatgtactatatatattatgcagtaagctgtatattaagtattatgaagacctattcataatttaatacaagaacgtgctcctgtatcgactgtttgctataacgttaaataagtccaaatttgtacacagttatacagttcaataaaaaaaataattatttgttattctgcaatgagctgctttatcaagtcagagaggatagagaaagaagagaaccggacagaaactaagaagcttgaatagtcaactaaaagaggacagtagagggtggcgttaaggatttgaagttatgaactgcaaataggacttaaaatagctgataagcaagaacgaaacaaagataagtaaagataggaatagacgtacagtctaatagagagaatgatacttgataattgactgatactttattaataactacaggtgtgtatttatacaaaagtcagaaacgcaatttgacaaaagaatgaactcagattattgagttttcagttaaaggatgttaagagactttaatgttattttcgagtttatatttaattctgatcaatgagtgatcttgccaaagtagtgaaaaccaaacaagtcagaagttatagaactttttagatagaagaaagaaagatgtcctttattaagtgtgttttttgtgtctatttatacactacctcaaaaaattgatcattttgaaccgccttttgctcattttgtaaattaactgcttcatattatttaggctagggggttttaggtaaaaggtagtataacaacaaagataaagaaatactgtgagggtatttctgggaagtcacagtctgactcagtctccagatttatcgtttttgggcgggattgagaatagtaaggaatttttttttttttttatggatgaacattttaatgtttattaaaactcatcaaagagtataaggattaagagcgatacaagtgtattaaacagtgacttgtcgcgaaaatactgtggtatttacacatgtaataaagtaataatgtaagttactacgaacaatggtcctccaaattaggaatatcggacattgtattacgccacttccaataaaatcccgatccactccagaatattctaataagttcctgatcaggattaataattacttcttgataagaagatgttaaactatgccaatcacataaataactcatcgtctaatatcgattaataatcaatacgcatacactgtaagtattattatttagccgtgattagaaaagtataaatacactcatatttttaacttgaataaaggacaatctactttgagtctcacttatttttacatttgttgattgacttagtactttttatattataaaacctcaaatatcacagtcaatcgcatgcttaaacggctgtcagaggagaaaataaacgatcacaaacaggcattaaccgcatccacatcaatgtatgatatttccaaggagcctggattacat

SEQ ID NO: 33 - DNA, 22145 bp, unidentified
  source 1..22145: mol_type = other DNA
  misc_feature 1..22145: note = Fanzor polypeptide
cagaatgctacgaaagagtggtagcaaagtgtaaagaataaataaatatgttccggagagtagattaacaatatgattttttttgaaaaaatcaaaaatttcaaccagctatgtgagtcaaacaggccctgaaagtatgagtaaatagagattcatgtagagcaaggatgagattatatggatgcatttcatagtataagttatagaagctgattgcgtatctagctaaaaacaagattgattaaaatctgttatgatcatatgtagattttttcaatttaacacgtaagctcttctatagccccttttaatgcttatgaagccttcgaataagtcgggtatactcgtacagctcaagattttcgctagtccggacaaagaaaacggatgtttcatcagataatataaattcagttgatcatcaggttcgggtgcttctaaaatgaccaaattctttgtagcatactggtctctcgtcatacacattcatgtagggcccttgaaataatttaaagtcgaatacactcaaaaggggccacgatttctcaaaaagagaaaacatgtatatactatttgttatacacaaaaaaaaaaaaaacattttctccttctcggcccaatcatgtaggacacttgaaataattgatgagtacatacactaaaggggccatgatttttcggaagcaaagaagaaaacttgcataattgttcattagggggtggttatttacaaataacgatcgtcaggccaatcatacgacagtaacagtacataaaaaaaaacaacaaagaaatactcctttttatacaaaaacaaaacaaactttcatcttctcctgggccattttcccaagatatatataaagcggacgatatatctcattattctcttcgtttacttcattcaattttttttattgattgatggcagttgagagtagaatcctcaaatgcaaactgggtccgctattgcagcaggatttcaaacctttcaaggtataatccatcaaaagttttaaagacaacatctttattaatagtcaaatatattatcatagaatgaatttcgcgttatttcagaagagcatagcattcttagaagagacgctatcaattttgcatgctatatggttgtacactggttagaaaatagggacactggagatcctcagccatgcccgcctctacttcaaggtcaattttggagccattgctatagactagtcagtgattatcggaatttcaggcttgacgttgtatgttgtcagaattatttacaataagagaaatcttgactcacttacaatcatacctatttatttatacaggacgttgcagtgaatatggcacatcgcttcattgaatttgataatttgaggctgaacgaagctagaggtatacttgatgatttctttaagttactatccgttgaaaatgctaactactttaactagaatatctctatcccagagttcaattggatctcttacatgcaactttagcaaacagctacggggttgatatcatgacaagtaaatgcttaatttaatctgaaaacgtcattggggtgctcatatttaaaatttacgtatgtattcatttagacatcaagctacatctgacaagaaacatccctgtgtatcaaaagcgtattctcaaagggttttttatgagatacaagatcgataatggtttagaaaatttcaatccaggtcaactaggtttgtatacataatacctacgatatcaagccggttgtctaatatacacactttactacttgtatttatagccgatgaagcattccgtaatctttttagattgagagtaaaccaaatcgatggattgtatggcgatcaaggtgaagttcatgctgttgctttaagaaattttttcaggtatactcaacgcaacaaagttcgttcatgatccaccttaatttaacttatttttatattttatagagcgcagtttaatcgttggcgtactacttttgcgaataccaagttggaggtcattaccgatttttcttacgctactcctgctagagttgcaacgattttacaattttatgctgctcttttgaatgatattggcttgcacaaccttaatgtaaaacggtggtccttaagtgtgtacgtttcaatccaggtcaactaggtttgtatacataatacctacgatatcaagccggttgtctaatatacacactttactacttgtatttatagccgatgaagcattccgtaatctttttagattgagagtaaaccaaatcgatggattgtatggcgatcaaggtgaagttcatgctgttgctttaagaaattttttcaggtatactcaacgcaacaaagttcgttcatgatccaccttaatttaacttatttttatattttatagagcgcagtttaatcgttggcgtactacttttgcgaataccaagttggaggtcattaccgatttttcttacgctactcctgctagagttgcaacgattttacaattttatgctgctcttttgaatgatattggcttgcacaaccttaatgtaaaacggtggtccttaattcctatagctacacatcaaatgggtattttatataatttggcaaagtgtatctcgatcagtgcaatactaaccacttttataattttttttagtgcatgtgaatttctctggccctgtaatagtatacattttacttcaacgattgagaaatagaggacccttgcctgatattgaactacaacacgaaactgggatactggtaacttgcaactatttcactagagtactttcatttttttttaacatttacgtaaacatgacagaggtttaatcaaggaactactcgtgctgaatttctcaggcactacaggataccggaatttaaagagcatttgtggcagcagatcttccgactagacaagttggtcaaaaatagaagattaggtgggtttgcttgtcacctttatcagtgaaaaaacttaaattaatcgtaatgtttagagaatgaagtaaatcgtgatagaccctaccaactcgcttatggatttaagactgatggccatatgatttctatgcatttctacaaagacatgcaaggtcgacgtaagtgattcttttgtgcgtaattgtttacatgatctaatgattatttatcactctagcacctatcccatttgatatgggtgaattacgaactatggctagaaaccttgatgtctcgcactgggagaacggaatggtggaactaataaaagaacccataggacttcctaacgactgtcgtatagtgggtgtcgacccaggtatgcactctaaaaatataaaaatgagtttgtcaattttttaatttaagcaatattcgtaggagtgcgtgatttactttgtgcagtagaaagggtcaatgttgaaggtcaagaagtcaatcgcaaagcttttagtatatctaatgcggaataccagtaggttttaagtgaatatgtcaatacatgataaaatttactgataatctaattttatatagagtgcgttcagtttctatgcatttctacaaagacatgcaaggtcgacgtaagtgattcttttgtgcgtaattgtttacatgatctaatgattatttatcactctagcacctatcccatttgatatgggtgaattacgaactaacgcacacactcttgatgtctcgcactgggagaacggaatggtggaactataaaagaacccataggacttcctaacgactgtcgtatagtgggtgtcgacccaggtatgcactctaaaaatataaaaatgagtttgtcaatttttttaatttaagcaatattcgtaggagtgcgtgatttactttgtgcagtagaaagggtcaatgttgaaggtcaagaagtcaatcgcaaagcttttagtatatctaatgcggaataccagtaggttttaagtgaatatgtcaatacatgataaaatttactgataatctaattttatatagagtgcgttcaggccgtcaatgggcgcaaatgaaggagttgcaatcaagagagcacgcccatattcaagaagtatatgatcttattgctagcccaaaagttcacaccattacagacttcagcttatatgtgagatccatttctcaaactcataataggtcggttattacattttatatagtttactttcagctactaataccattttctcattagaatcttcgacttcaatagatcatatagacatagagaaattaaaggttatttgtactctgctaaaaaaatgacacttgactacattgccgacaatattattgggctgtatcctttacgggtggataacaagacatattgtaaagtgatgctcccccacaaaagtacaaaaaaagaacgtcgacgcgccagaaaacaatttagaaatgagagtactggttttcaaccacccacacaaagaacaattgtagcattcggtgatgcgtccatcaatagctctatgaaaggtcatccaccaatccctcaccaagtaagtattccaatcaaatgattgatgaaattttgaactaactgtctttatttgtttacacagcaacaacaaagagccattgcaagaaaagcaatactagttcgagtcgacgagtacaacacctcccaaacctgcaacgtttgcagcagccgcctggaaaatgtgtactccagagagaacgtttgctttgagcacaggtaccaagataccaactttcattattatccataaaactaaatctagatttctgtagaaaaagacgaaagaaaatacaaggagtccaaaaaagaaaaaagtgctgtgttggtgacgacttgagtattatttcgcaagcatcacaatgcactcaacgcactctgcacaatggttagtagtttaatcatgttttgttgaatttagaaattaactgtttttttagttcttctctacccgttgaaattctgtaaccaatgtttagctggtagatccactgtaagtgcacttttgcatgttccaaatggtgtttttatataacagttgtaatgtaggtgtggaaccgagacttcaatgctgcaattaatattcgaaatatccttgctttatatattgagaataattatgacatcaactctcggccgactcccctctcaagaacacggcggtaatgaaacgccagacagctacccgtttagcccgcatgtaagtaacaaaacgacaaaattaagagttctgcaagaactaaccatcttctgtttaggctcgtaagttttatattgtcaagtttgtagttaaatgtgtgactaattttttttttacaacgtcattttggtggcttaaataaaaggtcgtgctttcagtcggagaaacaacttgatttgctctgtgtttcaatccccaagctcagttcaattaaaatgaatgatatgtgtcctactacagcagtaattctactgcaataagaacaatactttattgtaaatatttagatactcttatctataatcttggagtgaacattgtattcgctaatctcactttgtgatattttcttgttggatgagcccaagtatttgaatgtacgctttttcatattatgcgaaaactgagagcacatagctaaagcgtttcctttatcagatctgagagtgtaattagtgataacatcacgacgaccgataacatcaccacttccaacgaagtttgattgacttcctttctgtgtcgcaacactgtaaattccacgcacgtgaatatccactgccttcaaatcatgaatctttcgtctgttggataatcgactggctcttctgctttgcgacttcttggtatcaatcaattcagcccccaaattatcttcctcatccacataattttcatcttcgtcatcagtgactgcatgcgactcttttacaatattagaccaaggtgatgtgatagtatattgtttgggttgtaattcttgcgcattcttctcaatgatttttgaatagagttcttctttttcaatagcgtttaactttgaccattcctcctcttcttctgcaggaaccaacacatgtagaccttcctcttcaagaatgtcttttctttgtaaaagttcccaattaccactggtataactaccatcattaatcgccgcagcagaagacaatacaggaaactctgcactgtcttctaaccaatcgatgtaaaattctgtgctagcggatggatcttgtacctgctcagcaaaagcgacagggaaatcttgtttatatgtgagtgttgaggacattacgatctgtaataaagagaaagaaatgttcaagataaagaggggttaaatgattattctcatttgaataactgcggctggactgcggtcattggtactgtcttatgacagatgacctgcccctctcacacgcctttgtgtacagttcaaattgcattatcgtcggcattttaaataatatcgttatcgtcacttgcaataagcctgcaataaataatagttttcgttacgtacgtaaatggtatcagttacctgagcgtttgtatggtgaatttctgcattgaattctcttactttagtgtatgtgtgaaagggatccgtgatatatcgtaatttgggttgagcgagtgtagacttcaaaagttttccccaggccatgaactctgtagtattatgttggaattcatatataacataaaaagaaatacatatcttgcataaaagctgacaaacgcttcaagaaatatagttatcaccactgagcttagtgtatgacatggagaagtgctcttatcatgcagcgcgtccagcataagtattgtgagttttgaatactacaagaaggcaaacatacaggcggtctattaacgcattctgatgagatgtttgtttataatttcttatcgactgtgtctcattttaaaataccgtcagacaccccttcgtatatgcatcacaaagtaatatgacgaatcaaatcttatccattttaatagttgaataatctagttttttattacagtgaaccttataaagataggggagagtacgtagaaagaacattatatacacagtttatatcgagggggatgctaataatcaacggggtatatgacaatgataatgatgaaagatagaaaaaaataaaaggtgcaatgaaaatatggagaagtaaattattgtcttacaatagctgaatgaattgagaattcagaaacgtcagggaatgcagggcgttttgtctcggtaggtccagcactgtacttgtaagtatatcgcttcacgttgtgtgtgaatctggcagaaaatgtaagagcttgagctttgtttgatactctaaaattagccaaattatcaacgtatgtatccaatacagtcttgtttttacgttgttcgattgttggcaacttcttttcgtatggcacccaagttacttctgtcttacccaaattggaggtagccaatctgaaaataccttcgacatgaatgtccactgtcttcaagtcgtgaatcttgcgtttgcttgataatcggttggctctagtgctttgagatttttggcaactgcgtaattcgtaagataaatcatcttgatatgtatcctcatcaatttcatcgtcttcttcctttttcgcagcctttttcttgctgatattagaccaaaggggttgaatatcacgttttgtaggctgtaattcggaggcattcttttcagtaatttgagagtaaagttcttgtgttgtacctggagtcgtaagctttgaccaagcttcgtcttcaacaggaattaaagtgtgatcaccatcgttgatttcttttctttggagtagttcccaagttccggcggtaaggttgctttcatctttggtggaagataaactggggaattcagaaccatcgtcaagccattcaacgtaaaatacggtatcatcgttggctgggaggcaattgttggtttgttcggcaaagccgacaggaaagtcttcttgctgtaaggaagcagtcaaagcggacatctttcttgaaagaatgagattgtttgagttgataatatattataccattgacttatttgacctatttatatgtttatgaattactgctgcggtgagcgtaaaagcagccgcagctctccttctagtgtaaaatgttcaaacacagcagtgagaaaaatagggccaatcagaactctcgtttggaatcgactgcggacgcgctgttttcacacttttctcagaaagaaaatttaaaatttggtaaactattttaacccagctttcggaccttttcaaaaaatcttcggacgttctcaaatcttgattggacgaaatcattttttttttaggaccttctcaggttctaaattcggatcaagtcatagctctttcagaaattttcatcatcgattctagttaaacgtataacacttttaataaaaaaaatgaattataataattatcagcctaattttgacaactataagtccgaggatggtggcgaagagatagagttagaaataaccgcgatcgagtttggctcagtcgaaaaaatacttgacttcgacggaatgaaaaatattcaggaagtcgaggaggaagaagcagtaaatgagcttgccgagagggtggagcttgtctgtataaaaaaactagaaagtataagaattatggaccgagtaatatagaaaggttcattcactttatgcaggaggaaggtctttctgtccccaaagccgctctactttacggtataccttttagcactgcctatgaattattgaatgagtttaatgagagcaatgggacggtgttacatggtgataaccctaggaaacccagcaaagagccaaagagcttttatttgagcactcagcgttcttaatctctctatttgacagcaatccttccaccgtgctcgaagaagtgaggattaagctgtgcgaaacgtttcctggactcacagaaaaatgcgcattatctttgaagcaagcatcaaagtatacccaagagagggatgcacctagaacattgaaacttcgttttaattttattttccaatggaaagcagcaggcatagactacataccgaaaaaattgtgtttttttttacgaagccggctttcacacgcaaatgtcaagaggacgcgcatggtctaagaaagacgattttgcctttgtgaagatgcacactcagaaggcagtgaatgtaagcatcgtcggctctttttctagcatgggaattatcaacttttttaaagttgaacctttcaagaaaagcgatgcagctcaggttgaaaaagagtttggttcttacgccagcaagaagagaaaagaaggcagcaaagaggctgccaagcctagaaagcttgggaagggtactaccgcataccatattgtttgcttcatgaactcagttatggacttctcggatatgcattacgaaaaaggcattttcatcgtaatggaccactgtagaatacaccattctgcatttgtagttgacgccatcaacgagcgtggatataggtctttgtttatgcctccataattaccatttttgaacccaatcgaggagtgttgatccaaaatcaaagagtatattcgcagaaatcctctcgagagtgctgatactcttacccctcgcattgctgaggctatcagtaaagtcactgcagagggctgtcagggatggattaaacactctgagacattctgggttacatgtctcgccaaagaaataggtttaaaataaaccattttatttcatgataaatttgagtttttttaatattgcttgacaggtggatgtgattggttcaatataatgacagaaaaaaaaaacgccagttttaaatgattttgacaacaatgtgctttttattcatctttcttcttcattttttttttaacagagaatgtctagcgatgtaaatgataaagatgtaatatactaataactcaaacagtcttacattacgtagtttaactctttctttcttttttgtaataccagacaactccgcgaataatgtctgtcaaggcacctattcacaaagttttcaaaccagagtttattcaaccaactatcaaattggcagaaactgtaaacgatataacaacgcacacatactccttcttgaaatacatatttatcaaagaagtcaaagatgaccgcaactttgaattgtcaagttttctaaacaagtctttctttattgaagtatttttgtcacttgtagaaaggcaagtacgagatggtgtacggagtggaagtggaaattcttcaataaaagagacaacaacaacatatcgtaatttgatcttgaaacacaaagaaaaatattgcagatatagcggctatgtaccacccaagttaacccatgcgaagcagaatgcggattatgagtgtacgaagattaatacagcatatatcaataatatcaaagctcatttcggtgaccggcttaaacaggtagtaaacatcatttgtggaaaacaaaataaaatacgtgaacttgaagaaaagatgaaggccgcaagatacacagctgaagcaatcaaagggctaatcaaaaatactgtaattacaccttgtgcgaatgtgaagatatcggtatcaaagaaacaagttccaagtgacaatttcttaggtgaaaaagaaaaagctttcataagaaggatcttattttcgtatccccaagactataccttcatgaaagactcgatatactacgacgtgaaggtcaaccctctaaatcactataaggcctttattcaactggaggagataattgaagaattaacttatgataaagaaaagcagacctgcaaatcatttgttgtttatcctttacgcacatcattcatacctgcacacgtaacgatggacaccactattatgaattaccatattctgggggcaaaatcatacaaagaagagaaatcgaatatctggcctaaaattatgaacatggattacaaggcgctaaagaagcaaaaaactgacaagtccctgtgcttccacggtatgattcaaacagatggtgtcactgtaaccgttttgaagcaaaacttcgaaacaggacgccgacaacaatccagaaattcgaagccagctgatgatgatgatggattcacttatatagaaagtatgacgaaagagcaactggaacaaacaaaagaaaagtgcgttcttgtagatcccggccgccgtgacatactctattgtatgaaagaatcaagtacaccaaaaaatagacagtgttttagatttaccaaaaatacaagaagcaagaagtcacgtaggtttcgctacttgagaaaccaactgaaaccagattctatcaagtctgcagaaggtcaattgtcaaaatttcgttcaaacacacttgatcctgacaagtttatcgagtacctcgaagcgagaagggacgtgggaacacagttgaaagtatattattccaatgaaacatatgatgaaactccagattactatcctgaaccattggattttgttgttggaagaaaaggtgatatctattatggaagacgcttgttgtttataaaacgcgttgaaaatgctcgtcgtggtgttgctgatttacattcctatttacgctacctggccatgttgatgtcgtccaagcatttggtgaaaagactgacacgtcaagatactgacaacttgagtaggattatttcagatacaaccaaatgtttagacgaagatcaattatcaccagaagaagttaataccaaacatcgtgaagtcaagcaacaagtacataaaattgtttcgaagcttttattacttccttttcgcagaatgaagtttacatcgaagatatactatgacaactgtgacatgactctggccaaagacttgaaggaaaaatttggaaatgactttattctcatcattggcgactggtcagccccaacccaaaaatttcacgagccaactaggaacaaaggcttgctgaaatttctcaagaagagtggattccctatttacttgattgacgaatacaaaacgtccacttgttgcccgttttgtttttcaagtaaccttgagaaatttaaggaggttcagaacccaagaccgtaccagagagagaagcacccacttgttaagtgtcatggtctgctaaggtaatatttaaatcagacaaggataaaacacaagactgatttgttttattagatgcaagagcgagtcatgtttggctattggaaaaagaagaatcatgaacagggatacagcagctgtattgaacttccgtctaattctaaacagtttaagagaagaaggctcaagacctccaagattttgtagaagtgcccccaaacgacaacttacagatgagggtggaagtcaaaggaagtcccaaagaagaaaacaataattgtccatcttggttatcgctattgattatattttgcaggtaagtcgagccatccaaatatggttttgaacccatctgataatccgcttcattttttctagttctcttcactgacctggtccgagaaggtaagctaaaaagtctcgaatttaattttgattcgtccaaaagaaaattaacattgtctgttttaagagtttaaaaactgtaaactatacttatttaagagctgctcaagattttttttgcatgacgaatgaatttttgtgagatgcacatgtagcttatggtcaatgtctgtgaaataattaaattgaatggataaaactaaagattaaggtgtatttggctatgtatttgtgatatttatttacaatattacattaatatttaagaagtagctaaagggtaatatacaatttaagagttgaaagtcttttgggcttcacccttcttttcttgagccttgttggcggcttcaccagaggtgttaccagtgagagagttgacagcacccttaacagcaccagagacttggtcaatggctccttggacgtaaccttgtacattggcagcggtttcttggacattaccagcgttggcttgggtcttacccttggcttcgagggattcgttaccgacgacgtgaccgacgttttccttggtgtgaccgatgaattgatctttcttggcttcagttcttgatggagaggacatttttgttattatactttaatattaaattaattgatgaagaaactgtggagaggtgaatttcaattgtatttatatgttttcagggcaagaagatccctttacgtcatgtttccatatagggaaattttcttgaaatttcgtcatgatgaactcaacaaaagtatagcaaaagtcgttcatatgaaagatgatcaaatatttggactaatcaggatctgcataaaataattgcattacgtgtacatgttttttatttacgagcagtaaacattgacgtagctcactcggataacgcgaacgtcattatttacatatcacgtcgtctctagaaccaagatcacgttttgtttgaaaaggtatgacttcacacgtcaaacatcaacgaatgtggcgtgaagtaaaaatgcatcaatcggttaaagttattttagtttattgtccaagattataaatgagacgagaggaagtttattagtaccttttgtgaaaggtaatttccaaatcgacagggctgacaatagggaatccagcagtaggcatttgttcagaattttcagcatgtttaggagcggaccaagtaaattttttgactgtgatacgcgagatgtttaattaccgttagtgtgattagtacgaagcttacgctgtagtcaagtacaataatttaacttacgcatcattgaaagcaggactctctgttcatttagagtgaaattcatgccaatgcactgtcttgcaccatttccaaaaggtgaccaagctactccttccccagatccacgaattccgtctccattcgaggcaaatctatctggattaaactcgttactgtctttccagtgtttattcctatgatggagattatagatgttgacagtgagatgagaaccctcgggaacaaaagtaccgctgggtaaaattgtatcttccgccaccgttcgggtaagaactcttggagctggacagtgcaaacgaagagtttccttcaaaacttgattaatatacaccatttttttagtatcttccatagtaggaataacgtccattggttcgtcacccaagatggtgatagcttcttctcttgctttttgttgaacttcctacgtattcagtaaaaatatataggaaaacgtgcatgaataattgaataaatcaaagtgattgtataacaaaacttacagggtgtttgcttaattcatgcaaagcaaaacttaaaacgctagctgaagtgctttgaccagcaaaaaagaataagcgcaagttactctgtgagttaaagatgtaggtattagaaaaccacagacatttgtaggtagcctttttgttcaagtcgacatacctttaactcttcgtcagtaatcatttcttttcctgtagattgactttcgatcaaaagagtcaacacatctttttcgttttcctccaggtggctgttatagactattccctctttcaaaagagttcttttatactcgatcacctcgtcaagcatttctttaagcctgtctaattttttatgaattcttcttctttggggaaaaagccatagcaaatgcttatccaaggaagggaaaacgaaaaatttaatatcgcgaagacctataatgatatgcttataggtttccaaccactcgttgtcactttcattggaaagtgtgttaaaattgtagtctacgtgtaaatcgattagtagtgatatcattttgtaaatggtgaagcggtggtttactcaccaaaagcagctctaccgatggcatcaagtgtgtatctcaacaacaagtctgatacattgacagtttcgtccatggtttccatgcaaacaaacatttctttagctacctctccaaaaagagtaataggtgatgagcgtctaaatgcagggttgattatcattcgttgagttttccactgattactgctcaaattaagtacacttggtcctcccaagaacttcgcaaaaaaattaccaacgttcgcctctctgatgtctattttaggaaaaatctctacgtacataaaattttttgttgagcttaataccaactgagagagagattttacatcactacataccatgcttcatgagaactaattttgcatcctccggatcagaaatatttacttcccatcccaacattccgggttcctgttaatataatttagaggtctaaagtcgaactgcataccataagcaccaaattatgtttatgtcttaccaagtatacaccaaggttattatcattattcaggaaaggaaggtttactttatgagctcgtttaaaaaatgagtcatttgtgtacaaagatttgataacgctaaaatatccaaggtaaggaatatggcgtaggttttttggaggcctgagcgcccaatcttgaacaaaatatatcaaagtcatggtggctgcaacaccgatgccaattattttgtttttcttggtaactccatgagtcagctcattattgaagaaggtaatcagcttttgcattggaacagcgattgatactttagccattgtattagacatctgtcttgttgaaagaataaaagacgaacaaaagactttacttgcaatttccaattaactttatacatactcacctgcatgtgatggattgtttctagaattgttatcttctcctgctgattatatgtatgttgttcgcttcttctgctgattatatgtatgatggtctcacctgcataacctaatagtctacatacctaaatagatcagcttgccgtgaaagattagagtctgtaaaagacgagtatcaacacacatcgcattctggaagctatatcactccataactacaagatcatccattgcttatacttttttacggtattaatgacataaagtttctatgggctgtgaatctttttcaaatatgacatttacgtatttatataaaacgtgcacttagattcactggatacatattcgtcttacatgtgcaaggagaaacaagtgctcaagtactttcattttaaaaatcttgcgtaccatgagaaagattatcactcaatatgggatgtacataaagttacgcatacacttgcttcttgtattcttatttacaaccttccaaaatacatcatcaaggcatctatttagaggaagaagatgtgaagttgtctctattataattggtttttggtatattcatcttgcatttacttcattaagtacgtacgcgcctagtttaaaatccgccctctgcttggctcgcatacgtaatgcaactgtagcttataggattaagtaaactacttaaattccacctctaatatcatggaagaaaatatacgaatcgcataaaattactttttctataatcaagtttgcaaagtgtttttactatttgaaagcgttggagatgtaagggtattttcaggtgcattactctttatgtgataagtaatgtaggagtaaaaaatattcatggggttaatctgcaaagacatgataaaggagaagcacaatcaaatttcatataccaagttgataaatccaaacctcttgccaacttttaatacctttccatcgatgtattccaacagtttttgtttatgggttgaggaagggaaaagcaagggcacgtatgaaattcaatcactgtttttagaaaaaggagcatagttgtggtacatgattaaaataatccatgtttgtatacttcctttgacaaaaagctaaattttgccactatgcaatgcttattcattaaatataatgtgcagaacattttcaaatcaacagcctatatgctgtttattgcaggtctgatcaaaacatttctatagtactagttgcatataaaatacatttcataaatgtgtacgacacagtctttgatcctaagtataataaggctcaaaattatacttttacatatacgctaactttatatgcaatgtattatcaagtagcatatagatgtagaactatggaaaaagcatcgttcctgaaggttactatatgacaagtttttccatataataaccatgatggtaaaaacagagtatctacattcagtgttttataaatataagtctgttgtaagtcgatacatgagttctttagagaaaatattgaaacctctcattagttgttcatgtctaatgatttttatcttagactgataagcaaatttcaacctagaaaagaagaacctaaataattccaggagttgtggtactccattgcctcgtataatttgagacagagacgattggcttaccctccttccttaaataacctgtttaaaaaagacaacagaaaaaatttttcaacacaggctattgtgacatcctacaaacgttcaaatttgaatatacaatcggattacttcgtgaatcgctttgtatcttaacattaggtgaacatatttacatgttacacttgtaaagttggacagctcattttttccttttagaggattcaggaagagctgaggtgaaacaattcttcctgacttcttcctgagtattccaaggttacattattactatataagttaatgtagttactacattggtcaatatacttactatattcgtcaagtaacaccgaagtcaggacgaagtcaggaagtaagttttgcttgagaacatgaagtcctatttttttgagtaatactagtgagtcacaaatggtaaggtatctttacaagcgatcaagtcgagatattttaatatatattaaccaaggtcggaagtgtttttagtgattgtggtatcattcatttcactctgctagtacatacgtaccattcgttttatcttgcaaaggcagcgaatgctttgattctttcctcaaagaacaggtcatcagttccatgcccctgctgcaaaactaaacacgcacagtttctggatctttacttgaataatcaaaattaaatgcagtaagtactcctgcttagccctcccctttattttttctggtaaactgacccctctttattgtaaatttaaccgatcaaaatcaagatagcttattcataaaagcagaagaaaagcagaagaaaagatttatttttcccattccttcttgttcttgtattttatagcgatcttaaaacatttatacgtacaaaataaaaatgtcactctttacttcatataaatacagcaaagaccacgtatggatctcttttgataatggcatcggcaccatcggtatcactgattttgctcaaaattctttgggtgatgtcatttatgtagaagatcctgccattggtactttttttgaatgtggagacccactgatcgttgttgagtccgtccaaactgcttacgatgtttactcccctgtttctggtaaaatcatcgaaatcaatgaaaatttggatatcgatccttcactggttaaccgcagtcctcagatagacggttggttggctaagatcgagcttagcgatccttccgaacttgaatcattgatggacaaagctgcctatgaagctttaaacgctggcgaagaatagcctttaaaattaataccagataattcggaggctgcacagttccctccctgatagcccacatagcgagagttatacaataaagaccgcacagaataatgttatctacataaaacacagcatacacatgttttttttcatatcgcttaatgaattaaatttaaagtaaagacttgagcaaatactaatttggggccaaatcataactgaagttcgaatgaggttacgtctaccgtggtcgatgaacctcataatgatggtcttttatggtataagcaagtatgttcgtatagtatgctgggtttaaagatgctattaccatgtagacatggaatacataggatacgacataagagtaatatacgttatcttccactgatgcaatttcgcgcatggaccatttgcagcgaaaatatgctccttcgattatttagagcgtaaatgcaacatcaacttcacaacctgtacgtattatttaaatcattgtaaacgcttgggttttattatttgaaagtgaaagcacagtctacatagagtttagctagagtaaaagttctagctattggtcgcgataaaatcgctcggaaaggtaaaaaaaaatgaaagagaggttaatatacttttctaacagttgagcgagaaagtgcctagagtagtcttgatgaaagcgaatgttacgtacggatgaacacacttcattttgatgtgtataatgcttaattaattttcgcaataggtatagcgaatggggttattactatgatttatcacacaattcattttgaattacgaagagtgaatatctatagatgtcgctgaatttttatttggttgccacaaagtttaaattctgcgccaccctgggccatttacacaataaaaaaaaattacagtggctgtaattccacacatacacgtcaaacaaatacgcagagtgaaaagtatatttcgatacatgtagttagagagtttatttacaatgttacattaatatttaagaagtagttgagggtaatatacaatttaagagttaaattccttttgggcttcacccttcttttgttgaaccttatttccggcttcaccagaggtgttaccagtgagagagttgacagcacccttaacagcaccagagacttggtcaatggctccttggacgtaaccttgtacattggcagcggtttcttggacattaccagcgttggcttgagtcttacccttggcttcgagggattcgttaccgacgacgtgaccgacgttttccttggtgtgaccgatgaattgatctttcttggcttcagttcttgatggagaggacatttttgttattataatttaatatttaattaattgatgaagaaactgtggagaggtgaatttcaattgtatttatatgttttcagggcaagacgatcccttacgtcatgtttccatataaggaaattttctttaaatttcgtcatgatgaactcacttcgctatgacgacaatgtaatgatgaagaacttcattgtttaagattggtcaaacgtatgcattaaagtaatacacaagaggagcaaacattgacttagctcgttcaagtaacgccaaaaatcagaactttttcgtttgcataatacaccaacatgttcctgcaaaactagtgcgaactgtgtgtaaacaagagtatacatcgatgatttgataaagaaaaaaatatagtaaatttattcttgcgtagacattatagttaaaaacaggaactctattaatacctttttttgaaggtaagaatcagagtaaccgggctgacaacagggataccagaggtgaccaatccatccttatggatagaatcctcgggaatagtccaggagtatttacgaactatcaacttgtaagtaactgtaacgtatcacttgtatcataataaaaacttacgcatcatcgaaaggaaaactctctgttcattcagactgaaattcataccaatgcattgtcttgcaccatttccaaagggtatccaagacaatccttctccaggtccacgcgtcccttcttggctatcagcaaatctatctggatcaaacttactgccgtctttccaattactctccttatgatgaatgtcaaaaacgttaacagtaacaatcgagtcttttggaataaacgttccaccagataaaactacatcttcggctgctttacgggccacaactctggggaagggatcgttcaaacgaagcgtttctttcaaaatttggttgatataaaccattttcttggtatcttcaacggtaggaataacatcgattggctcgtcacctaaaatacggatagcctcttctcttgctttctgttgaatttcctatagcaagagcatcgcctcagtaagagcttacttgatacagaaaaaaagttttaaattatgaaacttacaggatgtttacccaaatgatacataacagacgtaagcgcgctggctgtggtatcatggccagcaaaaaagaacatgcacaagttgctctacgtatatatgaatattatgacgtgcttaaaggtataaagatagaaatacatctctcatgcaagtgtttacctttaactcttcgtgagtgaggagtccttctcctctgttttcgctttcgattaagagggtcaataaatctttttcgttttcttgcaaatggctgttatgagcgtttccttctttcaagagatctttcctacgttcaatcaccccatcgagcattttcagaaacttgtccaacttttcatgtagtctctttctttctgggaagagccataaaaaggtcgagtccaaaaatgggaagagaaagaacttacggtcttgaagaccttcagcgatatcattgtagatatccacccactcattgttttccattttgtcaagcgaatggaagttgaagtctacggtttgcatgtcaattagttcatgtacgcaaacggtgcaataaagaaaatataccacgcaccaaaaccagctctaccgattccctcgagtgttagtcgcatgatcaagtcagatacattcacagcagtattatccatcctttccatagcagtaaaaacttcttgggtgattttaccgaaaagtttgacaggcagagagcgacggaatgcgggattaattaccattcgttgatttttccattcctgacccattgtcagaaccacattgggtccgcccacaaactttgatatcaaggtgttttcatttccctcggtaatgtttaacttggggaacgattctacgtagaatagatttaatcagttattttttacatggcaaagtcgagaaaagcaaacacttaccctgcttcaaaagaattttctttgcatcctcagggttcgaaacatgaatttcccatccaaatcttccgggttcctaccaaaaaaccaaaccagttttcattagacatattgtacacagtgaaaatcagaaaagaaattaaaaacctaccgcgtaaagaccaagattactcttgtttaacatggggattatcactttgtaaccgcggtcgaacagcgaa

SEQ ID NO: 34 - DNA, 12680 bp, unidentified
  misc_feature 1..12680: note = Fanzor polypeptide
  source 1..12680: mol_type = other DNA
ccgtaatctttttagattgagagtaaaccaaatcgatggattgtatggcgatcaaggtgaagttcatgctgttgctttaagaaattttttcaggtatactcaacgcaacaaagttcgttcatgatccaccttaatttaacttatttttatattttatagagcgcagtttgatcgttggcgtaatacttttgcgaataccaagttggaagtcattaccgatttttcttacgctactcctgctagagttgctacgattttacagttttatgctgctcttttgaatgatattggcttgcacaaccttaatgtaaaacggtggtccttaattcctatagctacacatcaaatgggtattttatataatttggcaaagtgtatctcgatcagtgcaatactaaccacttttataattttttttagtgcatgtgaatttctctggccctgtaatattatatattttacttcaacgattgagaaatagaggacccctgcctgatattgaactacaacacgaaactgggacactggtaactttcaactatttcactagagtactttcatttttttttaacatttacgtaatcatgacagaggtttaatcaaggaactactcgtgctgaatttctcaggcactacaggataccggaattcaaagagcatttgtggcagcagatttttcgattagacaagttggtcaaaaatagaagattaggtgggtttgcttgtcacctttatcaatgaaaaaacttaaattaatcgtaatgtatagagaatgaagtaaatcgtgatagaccctaccaactcgcttatggatttaagactgacggccatatgatttctatgcatttctacaaagacttgcaaggtcgacgtaagtgattcttttgtgcgtaactgtttgcatgatctaatgattatttatcactctagcacctatcccatttgatatgggtgaattacgaactatggctagaaaccttgatgtctcgcgctgggagaacggaatggtggaactaataaaagaacccataggacttcctaacgactgtcgtatagtgggtgtcgacccaggtatgcattctgaatattagaacgagtttgtcaatcttttaatttaagcaatattcgtaggagtgcgtgatttgctttgtgcagtagaaagggttaatgttgaaggtcaagaagtcaatcgcaaagcttttagtatatctaatgcggaataccagtaggttttaagtgaatatgtcaatacatgataatagttactgataatctaattttatatagagtgcgttcaggccgtcaatgggcgcaaatgaaggagttgcaatcaagagagcacgcccatattcaagaagtatatgatcttattgctagcccaaaagttcacaccattacagacttcagcttatatgtgagatccatttctcaaactcataataggtcggttattacattttatatagtttactttcagctactaataccattttctcattagaatctttgacttcaatagatcatatagacatagagaaattaaaggttatttgtactctgctagaaaaatgacacttgactacattgccgacaatatcattgggctgtatcctttacgggtggataacgagacatatagtaaagtgatgctccctcacaaaagtacgaaaaaagaacgtcgacgcgccaggaaacgatttcgaaatgagattactggttttcgtccacccacacaaagaacaatcgttgcatttggtgacgcgtctattaatagctctatgaaaggccatccaccaatccctcaccaagtaagtattccaatcaaatgattgataaaattttgaactgattgtctttatttgtctacacagcaacaacaaagagcgattgcaagaaaagccctactagttcgtgtcgacgaatacaacacctcccaaacatgcaacgtttgcagtagccacctggaaaatgtgtactccagagagaatgtttgctttgagcacaggtactaagataccaactttcattattatccataaaactaaatctagatttctgtagaaaaaggcgaaaaaaaatacaagaaggccaaaaacgaaaaaagtgctgcgttgatgacgacttacgtattatttcgcaagcatcacaatgcactcaacgcactctgcacaatggttagtagtttaatcatgttttgttgaatttagaaattaactgtttttttagttcttctctacccgttgaaattctgtaaccaatgtttagctggtagatccactgtaagtgcacttttgcatgttccaaatggtgtttttatataacagttgtaatgtaggtgtggaaccgagacttcaatgctgcaattaatattcgaaatatccttgctttatatattgagaataattatgacatcaactctcggccgactcccctctcaagaacacggcggtaatgaaacgccagacagctacccgtttagcccgcatgtaagtaacaaaacgacaaaattaagagttctgcaagaactaaccatcttctgtttaggctcgtaagttttatattgtcaagtttgtagttaaatgtgtgactaattttttttttacaacgtcattttggtggcttaaataaaaggtcgtgctttcagtcggagaaacaacttgatttgctctgtgtttcaatccccaagctcagttcaattaaaatgaatgatatgtgtcctactacagcagtaattctactgcaataagaacaatactttattgtaaatatttagatactcttatctataatcttggagtgaacattgtattcgctaatctcactttgtgatattttcttgttggatgagcccaagtatttgaatgtacgctttttcatattatgcgaaaactgagagcacatagctaaagcgtttcctttatcagatctgagagtgtaattagtgataacatcacgacgaccgataacatcaccacttccaacgaagtttgattgacttcctttctgtgtcgcaacactgtaaattccacgcacgtgaatatccactgccttcaaatcatgaatctttcgtctgttggataatcgactggctcttctgctttgcgacttcttggtatcaatcaattcagcccccaaattatcttcctcatccacataattttcatcttcgtcatcagtgactgcatgcgactcttttacaatattagaccaaggtgatgtgatagtatattgtttgggttgtaattcttgcgcattcttctcaatgatttttgaatagagttcttctttttcaatagcgtttaactttgaccattcctcctcttcttctgcaggaaccaacacatgtagaccttcctcttcaagaatgtcttttctttgtaaaagttcccaattaccactggtataactaccatcattaatcgccgcagcagaagacaatacaggaaactctgcactgtcttctaaccaatcgatgtaaaattctgtgctagcggatggatcttgtacctgctcagcaaaagcgacagggaaatcttgtttatatgtgagtgttgaggacattacgatctgtaataaagagaaagaaatgttcaagataaagaggggttaaatgattattctcatttgaataactgcggctggactgcggtcattggtactgtcttatgacagatgacctgcccctctcacacgcctttgtgtacagttcaaattgcattatcgtcggcattttaaataatatcgttatcgtcacttgcaataagcctgcaataaataatagttttcgttacgtacgtaaatggtatcagttacctgagcgtttgtatggtgaatttctgcattgaattctcttactttagtgtatgtgtgaaagggatccgtgatatatcgtaatttgggttgagcgagtgtagacttcaaaagttttccccaggccatgaactctgtagtattatgttggaattcatatataacataaaaagaaatacatatcttgcataaaagctgacaaacgcttcaagaaatatagttatcaccactgagcttagtgtatgacatggagaagtgctcttatcatgcagcgcgtccagcataagtattgtgagttttgaatactacaagaaggcaaacatacaggcggtctattaacgcattctgatgagatgtttgtttataatttcttatcgactgtgtctcattttaaaataccgtcagacaccccttcgtatatgcatcacaaagtaatatgacgaatcaaatcttatccattttaatagttgaataatctagttttttattacagtgaaccttataaagataggggagagtacgtagaaagaacattatatacacagtttatatcgagggggatgctaataatcaacggggtatatgacaatgataatgatgaaagatagaaaaaaataaaaggtgcaatgaaaatatggagaagtaaattattgtcttacaatagctgaatgaattgagaattcagaaacgtcagggaatgcagggcgttttgtctcggtaggtccagcactgtacttgtaagtatatcgcttcacgttgtgtgtgaatctggcagaaaatgtaagagcttgagctttgtttgatactctaaaattagccaaattatcaacgtatgtatccaatacagtcttgtttttacgttgttcgattgttggcaacttcttttcgtatggcacccaagttacttctgtcttacccaaattggaggtagccaatctgaaaataccttcgacatgaatgtccactgtcttcaagtcgtgaatcttgcgtttgcttgataatcggttggctctagtgctttgagatttttggcaactgcgtaattcgtaagataaatcatcttgatatgtatcctcatcaatttcatcgtcttcttcctttttcgcagcctttttcttgctgatattagaccaaaggggttgaatatcacgttttgtaggctgtaattcggaggcattcttttcagtaatttgagagtaaagttcttgtgttgtacctggagtcgtaagctttgaccaagcttcgtcttcaacaggaattaaagtgtgatcaccatcgttgatttcttttctttggagtagttcccaagttccggcggtaaggttgctttcatctttggtggaagataaactggggaattcagaaccatcgtcaagccattcaacgtaaaatacggtatcatcgttggctgggaggcaattgttggtttgttcggcaaagccgacaggaaagtcttcttgctgtaaggaagcagtcaaagcggacatctttcttgaaagaatgagattgtttgagttgataatatattataccattgacttatttgacctatttatatgtttatgaattactgctgcggtgagcgtaaaagcagccgcagctctccttctagtgtaaaatgttcaaacacagcagtgagaaaaatagggccaatcagaactctcgtttggaatcgactgcggacgcgctgttttcacacttttctcagaaagaaaatttaaaatttggtaaactattttaacccagctttcggaccttttcaaaaaatcttcggacgttctcaaatcttgattggacgaaatcattttttttttaggaccttctcaggttctaaattcggatcaagtcatagctctttcagaaattttcatcatcgattctagttaaacgtataacacttttaataaaaaaaatgaattataataattatcagcctaattttgacaactataagtccgaggatggtggcgaagagatagagttagaaataaccgcgatcgagtttggctcagtcgaaaaaatacttgacttcgacggaatgaaaaatattcaggaagtcgaggaggaagaagcagtaaatgagcttgccgagagggtggagcttgtctgtataaaaaaactagaaagtataagaattatggaccgagtaatatagaaaggttcattcactttatgcaggaggaaggtctttctgtccccaaagccgctctactttacggtataccttttagcactgcctatgaattattgaatgagtttaatgagagcaatgggacggtgttacatggtgataaccctaggaaacccagcaaagagccaaagagcttttatttgagcactcagcgttcttaatctctctatttgacagcaatccttccaccgtgctcgaagaagtgaggattaagctgtgcgaaacgtttcctggactcacagaaaaatgcgcattatctttgaagcaagcatcaaagtatacccaagagagggatgcacctagaacattgaaacttcgttttaattttattttccaatggaaagcagcaggcatagactacataccgaaaaaattgtgtttttttttacgaagccggctttcacacgcaaatgtcaagaggacgcgcatggtctaagaaagacgattttgcctttgtgaagatgcacactcagaaggcagtgaatgtaagcatcgtcggctctttttctagcatgggaattatcaacttttttaaagttgaacctttcaagaaaagcgatgcagctcaggttgaaaaagagtttggttcttacgccagcaagaagagaaaagaaggcagcaaagaggctgccaagcctagaaagcttgggaagggtactaccgcataccatattgtttgcttcatgaactcagttatggacttctcggatatgcattacgaaaaaggcattttcatcgtaatggaccactgtagaatacaccattctgcatttgtagttgacgccatcaacgagcgtggatataggtctttgtttatgcctccataattaccatttttgaacccaatcgaggagtgttgatccaaaatcaaagagtatattcgcagaaatcctctcgagagtgctgatactcttacccctcgcattgctgaggctatcagtaaagtcactgcagagggctgtcagggatggattaaacactctgagacattctgggttacatgtctcgccaaagaaataggtttaaaataaaccattttatttcatgataaatttgagtttttttaatattgcttgacaggtggatgtgattggttcaatataatgacagaaaaaaaaaacgccagttttaaatgattttgacaacaatgtgctttttattcatctttcttcttcatttttttttaacagagaatgtctagcgatgtaaatgataaagatgtaatatactaataactcaaacagtcttacattacgtagtttaactctttctttcttttttgtaataccagacaactccgcgaataatgtctgtcaaggcacctattcacaaagttttcaaaccagagtttattcaaccaactatcaaattggcagaaactgtaaacgatataacaacgcacacatactccttcttgaaatacatatttatcaaagaagtcaaagatgaccgcaactttgaattgtcaagttttctaaacaagtctttctttattgaagtatttttgtcacttgtagaaaggcaagtacgagatggtgtacggagtggaagtggaaattcttcaataaaagagacaacaacaacatatcgtaatttgatcttgaaacacaaagaaaaatattgcagatatagcggctatgtaccacccaagttaacccatgcgaagcagaatgcggattatgagtgtacgaagattaatacagcatatatcaataatatcaaagctcatttcggtgaccggcttaaacaggtagtaaacatcatttgtggaaaacaaaataaaatacgtgaacttgaagaaaagatgaaggccgcaagatacacagctgaagcaatcaaagggctaatcaaaaatactgtaattacaccttgtgcgaatgtgaagatatcggtatcaaagaaacaagttccaagtgacaatttcttaggtgaaaaagaaaaagctttcataagaaggatcttattttcgtatccccaagactataccttcatgaaagactcgatatactacgacgtgaaggtcaaccctctaaatcactataaggcctttattcaactggaggagataattgaagaattaacttatgataaagaaaagcagacctgcaaatcatttgttgtttatcctttacgcacatcattcatacctgcacacgtaacgatggacaccactattatgaattaccatattctgggggcaaaatcatacaaagaagagaaatcgaatatctggcctaaaattatgaacatggattacaaggcgctaaagaagcaaaaaactgacaagtccctgtgcttccacggtatgattcaaacagatggtgtcactgtaaccgttttgaagcaaaacttcgaaacaggacgccgacaacaatccagaaattcgaagccagctgatgatgatgatggattcacttatatagaaagtatgacgaaagagcaactggaacaaacaaaagaaaagtgcgttcttgtagatcccggccgccgtgacatactctattgtatgaaagaatcaagtacaccaaaaaatagacagtgttttagatttaccaaaaatacaagaagcaagaagtcacgtaggtttcgctacttgagaaaccaactgaaaccagattctatcaagtctgcagaaggtcaattgtcaaaatttcgttcaaacacacttgatcctgacaagtttatcgagtacctcgaagcgagaagggacgtgggaacacagttgaaagtatattattccaatgaaacatatgatgaaactccagattactatcctgaaccattggattttgttgttggaagaaaaggtgatatctattatggaagacgcttgttgtttataaaacgcgttgaaaatgctcgtcgtggtgttgctgatttacattcctatttacgctacctggccatgttgatgtcgtccaagcatttggtgaaaagactgacacgtcaagatactgacaacttgagtaggattatttcagatacaaccaaatgtttagacgaagatcaattatcaccagaagaagttaataccaaacatcgtgaagtcaagcaacaagtacataaaattgtttcgaagcttttattacttccttttcgcagaatgaagtttacatcgaagatatactatgacaactgtgacatgactctggccaaagacttgaaggaaaaatttggaaatgactttattctcatcattggcgactggtcagccccaacccaaaaatttcacgagccaactaggaacaaaggcttgctgaaatttctcaagaagagtggattccctatttacttgattgacgaatacaaaacgtccacttgttgcccgttttgtttttcaagtaaccttgagaaatttaaggaggttcagaacccaagaccgtaccagagagagaagcacccacttgttaagtgtcatggtctgctaaggtaatatttaaatcagacaaggataaaacacaagactgatttgttttattagatgcaagagcgagtcatgtttggctattggaaaaagaagaatcatgaacagggatacagcagctgtattgaacttccgtctaattctaaacagtttaagagaagaaggctcaagacctccaagattttgtagaagtgcccccaaacgacaacttacagatgagggtggaagtcaaaggaagtcccaaagaagaaaacaataattgtccatcttggttatcgctattgattatattttgcaggtaagtcgagccatccaaatatggttttgaacccatctgataatccgcttcattttttctagttctcttcactgacctggtccgagaaggtaagctaaaaagtctcgaatttaattttgattcgtccaaaagaaaattaacattgtctgttttaagagtttaaaaactgtaaactatacttatttaagagctgctcaagattttttttgcatgacgaatgaatttttgtgagatgcacatgtagcttatggtcaatgtctgtgaaataattaaattgaatggataaaactaaagattaaggtgtatttggctatgtatttgtgatatttatttacaatattacattaatatttaagaagtagctaaagggtaatatacaatttaagagttgaaagtcttttgggcttcacccttcttttcttgagccttgttggcggcttcaccagaggtgttaccagtgagagagttgacagcacccttaacagcaccagagacttggtcaatggctccttggacgtaaccttgtacattggcagcggtttcttggacattaccagcgttggcttgggtcttacccttggcttcgagggattcgttaccgacgacgtgaccgacgttttccttggtgtgaccgatgaattgatctttcttggcttcagttcttgatggagaggacatttttgttattatactttaatattaaattaattgatgaagaaactgtggagaggtgaatttcaattgtatttatatgttttcagggcaagaagatccctttacgtcatgtttccatatagggaaattttcttgaaatttcgtcatgatgaactcaacaaaagtatagcaaaagtcgttcatatgaaagatgatcaaatatttggactaatcaggatctgcataaaataattgcattacgtgtacatgttttttatttacgagcagtaaacattgacgtagctcactcggataacgcgaacgtcattatttacatatcacgtcgtctctagaaccaagatcacgttttgtttgaaaaggtatgacttcacacgtcaaacatcaacgaatgtggcgtgaagtaaaaatgcatcaatcggttaaagttattttagtttattgtccaagattataaatgagacgagaggaagtttattagtaccttttgtgaaaggtaatttccaaatcgacagggctgacaatagggaatccagcagtaggcatttgttcagaattttcagcatgtttaggagcggaccaagtaaattttttgactgtgatacgcgagatgtttaattaccgttagtgtgattagtacgaagcttacgctgtagtcaagtacaataatttaacttacgcatcattgaaagcaggactctctgttcatttagagtgaaattcatgccaatgcactgtcttgcaccatttccaaaaggtgaccaagctactccttccccagatccacgaattccgtctccattcgaggcaaatctatctggattaaactcgttactgtctttccagtgtttattcctatgatggagattatagatgttgacagtgagatgagaaccctcgggaacaaaagtaccgctgggtaaaattgtatcttccgccaccgttcgggtaagaactcttggagctggacagtgcaaacgaagagtttccttcaaaacttgattaatatacaccatttttttagtatcttccatagtaggaataacgtccattggttcgtcacccaagatggtgatagcttcttctcttgctttttgttgaacttcctacgtattcagtaaaaatatataggaaaacgtgcatgaataattgaataaatcaaagtgattgtataacaaaacttacagggtgtttgcttaattcatgcaaagcaaaacttaaaacgctagctgaagtgctttgaccagcaaaaaagaataagcgcaagttactctgtgagttaaagatgtaggtattagaaaaccacagacatttgtaggtagcctttttgttcaagtcgacatacctttaactcttcgtcagtaatcatttcttttcctgtagattgactttcgatcaaaagagtcaacacatctttttcgttttcctccaggtggctgttatagactattccctctttcaaaagagttcttttatactcgatcacctcgtcaagcatttctttaagcctgtctaattttttatgaattcttcttctttggggaaaaagccatagcaaatgcttatccaaggaagggaaaacgaaaaatttaatatcgcgaagacctataatgatatgcttataggtttccaaccactcgttgtcactttcattggaaagtgtgttaaaattgtagtctacgtgtaaatcgattagtagtgatatcattttgtaaatggtgaagcggtggtttactcaccaaaagcagctctaccgatggcatcaagtgtgtatctcaacaacaagtctgatacattgacagtttcgtccatggtttccatgcaaacaaacatttctttagctacctctccaaaaagagtaataggtgatgagcgtctaaatgcagggttgattatcattcgttgagttttccactgattactgctcaaattaagtacacttggtcctcccaagaacttcgcaaaaaaattaccaacgttcgcctctctgatgtctattttaggaaaaatctctacgtacataaaattttttgttgagcttaataccaactgagagagagattttacatcactacataccatgcttcatgagaactaattttgcatcctccggatcagaaatatttacttcccatcccaacattccgggttcctgttaatataatttagaggtctaaagtcgaactgcataccataagcaccaaattatgtttatgtcttaccaagtatacaccaaggttattatcattattcaggaaaggaaggtttactttatgagctcgttt

SEQ ID NO: 35 - DNA, 22205 bp, unidentified
  misc_feature 1..22205: note = Fanzor polypeptide
  variation 13259..13599: note = n is a, c, g, or t
  source 1..22205: mol_type = other DNA
cgagacggtcgccgtgcctgccagcagggatgtcagggacgcgttcgtcgagctcaatgttcccgcagagaggacaggggccgtgagagtcgatgcgaacgaggccggacccgccaccgagaggctgccggagactgatgcggagccggtgatcagcagcggaccgttcagggagaggctgccagacacgaacgcaccgccggtgagagacgagaagcctgtcgcgatcagtgtggtcgcactgaggttcccggtcacggaggcggtcgtcgcggtcaacgaggtcaccgtggcacccgtcgccgtgagggatggtgtggtcacggaggtcatagaagccggacccgtcactgacagactgcccagaagcgaggtggtgctggcgaccactagcgggccgccgaccgacaggctggaggcctgcaccccgccggtgagggacgagaatcccgtggcgttcacggcggatgcggtcagtgtcgctgtcacgttcgcgacggcagtggtgagggtggttatcgtcgcggatgtgacggtgaggccgctcgtgaccagggacggggtgaccacggaggtcgtgaaagaagcggggcccgcaacggtgagagacccgctggtgttgacgtccccgccgacatccagtgcgtgggcgggagccgtgttgatcccgagctgtccgagggagttcaaggtgaggcctgcgacgccgaagcttgcggtaccaccggcagtgctggtgcccagagaaggacggatgagcaggttgccgttcagcttcatcacctggaacgccgtcgaggtgtgcgacgtcctccatgcggtgccgtcgtagtaggcgtcgaagttcatggacacgttgtcatgctgccagttgagcccttggtacagcgggtagttgtctgcagtcgtgtatgcggagctgtggggtcccaggatgctggacgggggccctgtctgctgcagattggagtacatggccagcccggacccgctgacgccgagcaccatggtgctgccgttgtacaccagcatggagggctgttgaccggcctgcctgactgtcacggcagccccagtgcctgcattgtcaatctcaaactgattggtcgtcgtcgagttggtatacagatgggtcagtgaccccatgacgatgaggtttccgtcgacgcggaggtcgtttccgacatgtagccccgcgagtggattgggggtgcctacacccaagaaggacccaccgttggcgaacatcaggcgggacagggatccgccctctgtcagcgccagaccggtgccggaatagccgagggtgtacttggccccgtcgggcccctggatcaggatgcctgactgcagcgtgacatcgggctggactatgtgcagctgctgtgtgggcgacaccgtcccgatggcgagcctggagctcgggaccgccaggtcggaccctgacaaccgcagggctgtattcaagaccgaaagcatctggtcaggtcactgttagtgtgtgccacattttgtggcttggacggacgggaggccccggatggcatgcgtctaccaggcgcgaacgactgcaaagcaacgaaatatacgctagctgtgaatccacagccagggcaggtctacatcacgagattcttcagtttccacatgaagccaccgtcccttctcactatccttttcctgtcatctgcctggtacacctcaccgcatcctttcacgtatgtcaggtcagcctgagtcggtctcgtgaggagcttcggcatcaatgcctttccctgttcgagtttcttccataggctttcggcaccctcgcatgtctcgaaatacagcttcacgaccctgctcgggtagcctccgtcgttgtagaaggctctgtccaccctgtagaaaccgtagtgcatggagaatatcatgtggaggtcgtggatcagatcgtcctgcttctcagcgtccatctccttgctggggaacgcgtagcgcagaatgatggtgttcttgtcaagcatgtcacgtcgcgctgtggttttgggcttcatcccagggtgccctaacacgcggctttgcttttgcctgcgagtggtgtcagctagtgatgaaagcaacgccatgctcgctgcacccatgatctgaatgttgctcctctttctggtgcccttccagcactgtgcccttccaggtgagcactgcgtgatgccctccgggaaagaccgcgattctggtcgccacaagcactatgctagcgttgatgtggccacataaaagtacgctttatcaccacgagcacatgaccacagaggtcaaagagataaagtgcccgacatgcgagcaggtctttaaagaggagcgaagtttgagcaagcacctagtgaaaaagatcccatgcattcccaagggacaggcacggcactcctgccaggcctgcaatcagacattcgaaaggagaaatgacctcgccaagcacctaaccacaaagaaacacgctgacgctgtggcaagagcaaactcaaccgactccagtcacactctgacgggcgatgccacatacaagtatactatcgcgaatccgccaccccgaccaaggatgttcggccgctccgaccttctccacgttgtcgacatgacttccgaggagcttgacaaacatctccacttacgaaccaggactggtctgacgctgttcctgaacctcttcaagctgacgcatctcaacgatgacgcgcccaagaatcacaacgtgatgatagagtcccccgacgcaccttttgcttgggtcttcaagcagaagcactggagacgcgtcgatgccgatggtatcgtcagggactgtcttctccagacgacggtgctcgctctggactttgaattcgcaatccaggaggccatggacgaggctcactactgcaagttcatcaaactccgaggccaggtcgaatttgagacgtgtggaccgaggccactgtcacctggagtgtcaagcctgctgaaaaggatctgcgtagcaatcgtcgctttcacagaccgccatcccgacttgctgcactatgcaagggcagacagcgagacagcaccgcccatggtggcgctcccaaggcaacgtacactgtctatgtggcaacctggtggagttcgatacgaagctttccgagagacccgggagactgaagatcacgcacgtttaccatcgacacctgcaatgatgcgtctcctatacaaggtccaatgccgtcatcctgagtgtcctatttgtgaaatgccatccattgatgttcggtacagcaggagagattcctcgtcctgtcacaggaggtgacaggactacaaccgaaagatggagatgcggatgctgaaaacgagtccgcgggtttcgcaggtgccggtcatgtaggccacagagcccttgtccattgagtaactgtccgaggattgtccgaagcgggtgacctcaagggcgagggttgtctgttggaagggcagggaacggtggcacagtcgggtcagctcggcagcattcgtcgaggaggacgcagtcagcgccttgtcgatagctgcgaacacgctctctgcggtctgcttgggaatgttctggctggcgtggtacttggtgaacattggtctgggttgttcgagttcctcaggtcgatttttggttttcttttcttggccacactgatgaggggctgctgccaggctctgtcaagttcgcagtcggtctgtgttttgcacccaggatcctacggtggtcatggctgcactctcaaaagggctctagagcagacatcctgagtgtcctgttcgcgaacttttccccaggaacagccttcatcgcttcttgcactgcgtcacagagctgtcgcgatcccagcagtcgcacacccatctcggtgaaggctcgtacagccttcgtcctggtgctaggcttcgaaaaagtgacaaagctgtcgctgtaacttttcttgaactccagaaagtcatcgagatggaagaggagggctgccctgaggatcaagtacgagaatacgctgctcgtctgcaccagccgtgtgcccttgtcaggggacgatcgcaggaaggccttcaggctcggaaacccgtagtggtgaagcaccttggcagcctggaacactgcccatctgcgttcgacgtccagcagctccaagcaatttgacgagcccagcacggcggcgacgaacatggtgttcaggatgtccgccacacactcggtgtaggcctcgttgggcagcactgcagtcttgcaattcataaacttgtctgtgcagccggtgtcatcgatgtagaaccccctgtagaattctccgagcaacttgtgtggatagcgcttgatgtcgaagcagaggcagtgcaccagctcgtgctgaaacaccttctggtgctcctcggcacgccagcactgtatcagaccgtgtcctcgtgccagggtgctccctgagttgatgtgtgtgggtcctatgggctctccaggtgctggcaaacatttctttgcgtcggaaggcacgtagtcgatgtgcaccctgtcggtgtgcccgaacatcagcatgatgcagagcaggtgtcggaggatcgcaaggaagccctcgggtggtcgacggcactcgacgtgcacctcgacctgcatgcctccatgctgacaccgatacagccacgctgttttcccacacagctcgatggccttcgacgtcacaaaggcgttgtcggccagcagatctgctctcgcctgagtgggttcacaggagctcgatgactcctcgcgcacctgatccctccattccagcagcctcgtgtactgtgttttcagcatcgtctgactcgtgggcgagagtggtggcacggatatccctgaaacgaatgcctcgagtcgctgtgactcagggctgatcatatgggtagtaaatgcggagaaactacataaagctttccttcatctgtcagagagagtgtcatgatggagagcaagcgcctcatgatcgtcgagtcatcgacgaagatcaagaccctcacgaggtttctcccggcggacatcgtcgtcaaggcatgcttcgggcatgtctcggacctgccgaagagggagctgggcatcgacatcgggaagcagttcaggccacactggagggagttgcaggagaagaaggggacgatagagcaattgaaaagagcatgcgaggcctccacgacggtgattctcgccaccgatcccgacctggagggcgaggccatcgcgtggcacctgaccagggtgctcaagctcgcgaaggagagggtcgtgcgcgtagcattctgctcggtcacggaggcagaggtgctccgggcgttgagctgtccccgcaaggtggacaggaacctcgtggatgcccagatcgctcgccgcatcgtggacagactggtggggtaccgggtgtcacccatcctgtggaggcacctcaagagcggactgtcagcaggacgtgtgcagtccgctgcgctcaggctgctcgtggagcgcgagagggagatcgaaggctttcgaccagagaagtcctggcagctcacagcgagcttcgaggatggcaagatcagcggtacgtaccagaacgctttcgcaacgcgtgatgaggctcgcgaggccctggaaggaatgaaggatcacgagtacatcatatcgcacatcgatcgaagtgtggaacatacctccgctcctcctccactgcggaccgccaccctgcagcaggaggccggcagcaggttcggcatgtctccgaaggtcaccatgaccctggcgcagggcctgtacgaggctggtcacatcacgtaccaccggaccgactctgtggacatgtctccggaggcgatgcagggcctgcggacctacatcagcagcacgcacggggagaaatacctcgcagaccagcagcgcaactttcgacaggctccaggagcgcagatggcacacgagtgcatcaggccgacgagctggacgaggacggcgatcactgggggtgcccagaggctgtacgacctgatatggaccagagcggtcgcatcacagatggcacgtgctgcctacgacgtctgcaagctgcaggtgccatacagagactcgcacttcctgagcagtgcgagaagcgtggagttcgatggctttctcagggctagcggacacggcggtgaccctcatggctctggcacgatggcaatgctggcgaacctgaagtgtgggcagaggctgactctgcacgagggcaccgctcgagagcagctcacatctccacccccacattacagtgagagcgggctcgtcaaggagctggaacgctgtggattgggcaggcccagcacctacgccacaattgtgacgaccctccaggacaggcggtactgtgagagtgcggcacccagcaaggtcaagcaacgcttggaagtgatgcacctcagggaggggaaaatcacgatgggcaagagggagcaggaggccccaaacgtgaggggtcgtttgacggtcaccgagatcggccaggacgtctacagctacctcgacaagcactttggatgcataacggacatcgcattcacccgagacctggagctagaactggacaggatcgccgcaggcagcgtgaaatggatggacatcgtgaagaagttccatgacgagttcgggccgactgtcgacaccctgatgaagacgaaggcgctggagaagcgcatcccgcgggcaatcagagaggtgcgcaggatcggcaggcacccccacacgggccagatgatcgagacatgcaaggcccggtacggcccggtggtgaagatgggcgacggctacaagaccgtcttcgcgaagatcgacgctgcatcgatggacagtctggacttgaataccgcggtcaccatgctcaacaggaagatgcattgacgattgttgtgtaaaagtcgtgctcaaacccgactttttcttgagaataatcactcgttcactagagactgagggaccggtggtggagcctcgacagggcccttcgaccccttctcggcggcgcgctgatgcagcagcatggcgagccttctcaggaagcgtctgagccatcgatcggactcgtcatccgtcagcttccacggcagatggatctcccggatgagggctcgactgaacgtgatgcagtttcgatcgcgcaggaggctgtagccattgtccgggaatttgcctgcacggaggcgctgcagcgcagtctcgacctcaccgaccgtgctgacaccggcgaagaccttctcgaagggctcgaagtaccgtgggtagcgcaggatagacgtgatgcctccaccagagtaggcgaggggtctcagctgttgcttgaagacccggtgtcgtagtcgctcgaaccagccgtgtctcgcgatgcgccagtagctgtactcgccgaggaacttggggcgctgctcatgagtccagacctctaccgacgcgtgcatgggcatgacatgatggctcatgaggaatccgccgaggaggcggtagagtttctgctggcccccatcgatggcgtaggagcgctcgtaaacatccactggcacgtctggtgccgatgttgctggcatacacgttttgatgggactcaagacactgtgccatcggtaaatcaatttttgtcagcatctctgcttgggactgcgcgatggcttgtcagccttgccgtaccgagccagctccttgcgcaccgcatcgagctcctccctcacatcgcgcagctcctgacgaagcccggcgagcgatctgttctggtcgatctggttgtcatgcacaatgcctatcgcgtctgtgagggcattcactctatccaccaaagcctccatgtttcagtaagatgcagaagggtgtcgctgttgctttatgagagtctcaaagtgctgcagcacattttcttgggaaaagataagaggatgacagttcttgaccgcatgaagcagagcctgctgtctcgctacggagcgcacggtggtacggtcgagaagaagcaccttcccccggccgtggaggaggtcgtgcaacaccaccacgtcaaccgcatcatcccggtgatcgtcagggaggaccacgaggtccacgtagagcagtcgatcctgcccatcatcgagaacctggaggaggaaggcgacgtgcaggagcggacccaggcgccgtcgttccgggaagtccatcacgacatgccgcaggacctcgtaagcaagcgcatgcagaaccgacaggccatggtggacatcggcaggaacatcaccgaggacgacacccaggagaccgtggaggacgaacccatcgtggaacaccgagtcttccgccacgttattcaggagtgccagcccgtcatacgcagacgaattcggaaatcgcatgtcgtccacacgatagcccctatcttcgagaagagcctgcgcatctcgcacattgccgatctgcacgagcacaaggcgattaccatggccgagtggaatcgtcagcagaggcagctcgagaatggtggtcaatccagcggtacaggcggggaagtcactgaggctacgcaggagtcttgaacccgtcgtagtagaggtgatgaatggtcacagccctgtctggaatattgcagacgctctgtaggatctgagtggtgagaacatctaagcgagctttccacactttcttctgaggcagtggcacctcctccttcttactatattgaaagcatgatggaatgactgtgccctcgctgtcgacgtatttgtcggggttgaatctgatcattatcaagggccgaaagcctgtgtcttggtagatctccatcatccgcttgttctcgcacggataagaagattcgctggcgtgctggttttcgtcacattcgatcacgatcgcgtgcgaaaagcactcgagaaaggcatcaggacgtctgcgcgagcacccacccagagcccgatcgaaagtcagctgtagccccttcagacgctcgtcagtgctagcaagctcagatatgtgttggcgaaagcgtgtctcttttgttttccaattgcgagccacaggctcgtcagggtacagatggatgtaacagcgaatacagtacccatcgtacttgtttctggatgtcatggcctgacagccatttttgcacctgtaattcatgacatcaatcatgcccaggggttcgccgtgtgccctacagtgcgtggccgctcgatcaattattacccctaacgctgacaatgtcagtcattgagatctcagattcgttctgagattccttcctcacatacttaccaccccctccacggtatgaggcctcaagccatcagaacttgtttcttccgtatgcgctctcttggatgctcctttcgacacatctccgatgcactcgctgtctctcagagacagctctaccggtggcagcgcgcgcctctgctcatgactcgccccctggacagaagtcatctgcgtcggaagacgacaatagagatcggagacgctgttatccgtttggtaacccagcgcaacattgtcaccctgggtgacattcgaaacaacctcaggtccaccctctcggtgttggcctccaaacagtccatctctcgggtgctcaaagaacgcaagtggacgaggaaaagaggcgccaaagcgtacacagaggcggacgcctccagatgtgcagcattcgcgagatccatagcgagcgggctcagctcaaggctgctcgccctcgacgagtgtgccttctttctcaaccacagccagcactacgcctggagccctcgaggctccagagctgtgatcagtaggcccggcaaccgtatccgggcctactcgctcctgctgtgcatgggatacagtggacacacctcgtggcgcctgttcgagggagccgtcaccgcctctcgctttcagaagttcctgacactcatcccacacagcagcgacctcattctggacaacgcagccatccaccgcgccactcgtgtcctgagactccaggggagcccaaccatttctgatacagccgatgcccggggcatcggtctcagatacctcccgccctactgtccccagctcaacccagtggagctggcgttcaacaccatccggcagttcgtgaatcacagacagcccagggatccggtcgccctggagcgatgcataacggaggccatcgcacggctgaccccccaagtctgctctgccacctttcggaagtgcttctcggcattctcatagagaatctcggtgcgtctggatctggggaaagaaatctggcagacaccaaagagatgaggagaccgaagaaacctccgaaagatccgcagctccgcctgcaggagcagtacctcgtctacgccaagaacaagctcttcaaggagaagaaggtcaaggagaaggctgtcagggaggacgtgaaggagcgcgcagtaacaaacgcccactccactttcacagtggtcaagaccacatggaggagcctctgcaaacgtgcagcacgcctcttggatttggagactgctctgcgcgaggtcaacaccaccatcgccgaggcctatctcctggccaatgtgcacgtcgtccgcctctgcaccgccggcatccctctgtgcaagctcaaccagtccttcttctaccagtgcctctcggcggtgagcgtcagtgagagggagaaaccggagatcgaagacttcgagctccgcatgtccgtcaagctgtacagatcctggcgcccccaggggtaccagccgcctgacagcaccaacctctcgtctggtttccaccagcaggccagcaggcagatggcgacgaacatgcgcaactcgacagtcgccaacttctacaggaggttcaagaggtatctcaagttgcgctactccctggatggcaagcaggcctacgaggccctgcttgccatccgagccgccgagtacgagggtgaagaccccctcgtgaagcgatacagagatatgctgcccccgaagcccgagaagagtcgtctggaagacaatccagagctggtcatgccccttcagcaccattttctgcgcgctttcgaggctgcgcaggccgaccagcaggcagagaaacctccgcgtctcttctctctggtgcccacgaagcagggattcgaatgcagccacatcaagatctgttcgagcggcctgtacggcctgctgaggaggagcggcatcaaggacttgcccagcagcaaaggcttcccaggcaaagccgacgctttttggaggcgtttcttccacatctcgaagttcgagaccaccaacaggaggttcgcaggggagatcctgacggacggcaagggcgtcagcatcgtcctgaggaagccgaaagtggaacccgcggcaaaaggcgcacctctggacccagacacgttcggagaggtgtggggtctcgatcccgggcgaagagagatgtttgtcgccagcaacgacgctcagagggtgcagagagtgacgacacggcagttctaccacgacgccaagtacagggagtcgaatgcgaagatcagggtgtggcaggatcacgatccggacatcctggaggcgatccggaacatgccctccaagaagcactcacatctggaggggctgcaggcgtacgtcagctacctgttgccgatgctggactttctcttgaggtggcacatgtgcaaagctttccgggacctcaaattcaagcgctacgtgttcgccaagaaggtgctgaggaccatctgtcagaatttgacccgcgaggcgggtcagaacaccctggtgggcttcggagactggtcgaatcaggatagcgcaggcatcatcaagaagtcgcctgcaggccctgtcaagagactggagaacgagctgaggaggcactgcagggtggtcagcgtcgatgagcacctgaccagcaagctgcacagctgctgtcatcacaggatgaagcagatgtaccagcggagggtgtgcagagatggtgtgatgcggagcgtgaaggtgcacagtgtgctccattgtgacaacaatggctgccatggcatgacggtgaaccgagacgtgaacgcatcgcgcaacatcctgcacatcctgagggcgacagccggcggagggcctcgcccggaggcgttccatcggtcgagaacgaagtattcagaggcacccgccacgagcgggctgcctctgaatggccagtcgactctggcattattaccagtacctgacagccactgacattgtgggcgttaggggtaataatccatacatggccgaatgctcgcagtcaggctcttcacaacgcttcgtcgcaaggcatcgcatcccaagctctttgtgcaggaaacaacgagctttctcctctacaccccaggtcgcaacgtttgtgcaactctcaaaggagcatctcttactgactaggttgagatagccatgtggtcgagcatgcgcagcgcagaaccgagcttttccatcctctggaccaaagcatgctgtgatcttacatccctcttcttcacattgcttgttgaccacacacacaaatgcaagctcctttccatgctttgagcagtattttgctttcccgttctcgggtccaaagctggcccgggtgtcgcagccaggcttttggcactttacatttttgacatcttcgtagcccagaagctcaccatgctccttgcaatgactggctttcttcccagcagggccgaagtttggtcgcttgtcgcaccccgctgtcttacaacgtgcgctcttgttgttgtcatagcctcgctcctctccgtgccctttacagtactggggttgaccaccaacagggccgtgcgatgggtgtttgtcgcacccggcgacctcgcagcgtttgttcttgacatcgacgtagccctccagcgcgtgctctttacagtacatacgtttcccatttggttcaccaaagttcgctctcttgctacagctcaattcaagacagaactctggcatctctctgccctgatcatccgccagggggtttttccagatattttacgcagccctccagagaaaaattgatgtcgtccgagccgaaaaccaagaggatggtcaaaatgagtgtggacgccgctacgcagaccactccctccaagtcggcaggactgccgaagcccaaagcaaatccgctgaccggcctctgcattcagctcgtcatgctggccctgatgctcgcaggcttcatcgccctgatcgtgctgatcgtccggcaggacagacccgagacccacgcgcagctcctgtgccagggtctggannnnnnnnnnnnnnnnnnnnnnnnnnnnnnnnnnnnnnnnnnnnnnnnnnnnnnnnnnnnnnnnnnnnnnnnnnnnnnnnnnnnnnnnnnnnnnnnnnnnnnnnnnnnnnnnnnnnnnnnnnnnnnnnnnnnnnnnnnnnnnnnnnnnnnnnnnnnnnnnnnnnnnnnnnnnnnnnnnnnnnnnnnnnnnnnnnnnnnnnnnnnnnnnnnnnnnnnnnnnnnnnnnnnnnnnnnnnnnnnnnnnnnnnnnnnnnnnnnnnnnnnnnnnnnnnnnnnnnnnnnnnnnnnnnnnnnnnnnnnnnnnnnnnnnnnnnnnnnnnnnnnnnnnnnnnnnnnnnnnngagtgccagcccgtcatacgcagacgaattcggaaatcgcatgtcgtccacacgatagcccctatcttcgagaagagcctgcgcatctcgcacattgccgatctgcacgagcacaaggcgattaccatggccgagtggaatcgtcagcagaggcagctcgagaatggtggtcaatccagcggtacaggcggggaagtcactgaggctacgcaggagtcttgaacccgtcgtagtagaggtgatgaatggtcacagccctgtctggaatattgcagacgctctgtaggatctgagtggtgagaacatctaagcgagctttccacactttcttctgaggcagtggcacctcctccttcttactatattgaaagcatgatggaatgactgtgccctcgctgtcgacgtatttgtcggggttgaatctgatcattatcaagggccgaaagcctgtgtcttggtagatctccatcatccgcttgttctcgcacggataagaagattcgctggcgtgctggttttcgtcacattcgatcacgatcgcgtgcgaaaagcactcgagaaaggcatcaggacgtctgcgcgagcacccacccagagcccgatcgaaagtcagctgtagccccttcagacgctcgtcagtgctagcaagctcagatatgtgttggcgaaagcgtgtctcttttgttttccaattgcgagccacaggctcgtcagggtacagatggatgtaacagcgaatacagtacccatcgtacttgtttctggatgtcatggcctgacagccatttttgcacctgtaattcatgacatcaatcatgcccaggggttcgccgtgtgccctacagtgcgtggccgctcgatcaattattacccctaacgctgacaatgtcagtcattgagatctcagattcgttctgagattccttcctcacatacttaccaccccctccacggtatgaggcctcaagccatcagaacttgtttcttccgtatgcgctctcttggatgctcctttcgacacatctccgatgcactcgctgtctctcagagacagctctaccggtggcagcgcgcgcctctgctcatgactcgccccctggacagaagtcatctgcgtcggaagacgacaatagagatcggagacgctgttatccgtttggtaacccagcgcaacattgtcaccctgggtgacattcgaaacaacctcaggtccaccctctcggtgttggcctccaaacagtccatctctcgggtgctcaaagaacgcaagtggacgaggaaaagaggcgccaaagcgtacacagaggcggacgcctccagatgtgcagcattcgcgagatccatagcgagcgggctcagctcaaggctgctcgccctcgacgagtgtgccttctttctcaaccacagccagcactacgcctggagccctcgaggctccagagctgtgatcagtaggcccggcaaccgtatccgggcctactcgctcctgctgtgcatgggatacagtggacacacctcgtggcgcctgttcgagggagccgtcaccgcctctcgctttcagaagttcctgacactcatcccacacagcagcgacctcattctggacaacgcagccatccaccgcgccactcgtgtcctgagactccaggggagcccaaccatttctgatacagccgatgcccggggcatcggtctcagatacctcccgccctactgtccccagctcaacccagtggagctggcgttcaacaccatccggcagttcgtgaatcacagacagcccagggatccggtcgccctggagcgatgcataacggaggccatcgcacggctgaccccccaagtctgctctgccacctttcggaagtgcttctcggcattctcatagagaatctcggtgcgtctggatctggggaaagaaatctggcagacaccaaagagatgaggagaccgaagaaacctccgaaagatccgcagctccgcctgcaggagcagtacctcgtctacgccaagaacaagctcttcaaggagaagaaggtcaaggagaaggctgtcagggaggacgtgaaggagcgcgcagtaacaaacgcccactccactttcacagtggtcaagaccacatggaggagcctctgcaaacgtgcagcacgcctcttggatttggagactgctctgcgcgaggtcaacaccaccatcgccgaggcctatctcctggccaatgtgcacgtcgtccgcctctgcaccgccggcatccctctgtgcaagctcaaccagtccttcttctaccagtgcctctcggcggtgagcgtcagtgagagggagaaaccggagatcgaagacttcgagctccgcatgtccgtcaagctgtacagatcctggcgcccccaggggtaccagccgcctgacagcaccaacctctcgtctggtttccaccagcaggccagcaggcagatggcgacgaacatgcgcaactcgacagtcgccaacttctacaggaggttcaagaggtatctcaagttgcgctactccctggatggcaagcaggcctacgaggccctgcttgccatccgagccgccgagtacgagggtgaagaccccctcgtgaagcgatacagagatatgctgcccccgaagcccgagaagagtcgtctggaagacaatccagagctggtcatgccccttcagcaccattttctgcgcgctttcgaggctgcgcaggccgaccagcaggcagagaaacctccgcgtctcttctctctggtgcccacgaagcagggattcgaatgcagccacatcaagatctgttcgagcggcctgtacggcctgctgaggaggagcggcatcaaggacttgcccagcagcaaaggcttcccaggcaaagccgacgctttttggaggcgtttcttccacatctcgaagttcgagaccaccaacaggaggttcgcaggggagatcctgacggacggcaagggcgtcagcatcgtcctgaggaagccgaaagtggaacccgcggcaaaaggcgcacctctggacccagacacgttcggagaggtgtggggtctcgatcccgggcgaagagagatgtttgtcgccagcaacgacgctcagagggtgcagagagtgacgacacggcagttctaccacgacgccaagtacagggagtcgaatgcgaagatcagggtgtggcaggatcacgatccggacatcctggaggcgatccggaacatgccctccaagaagcactcacatctggaggggctgcaggcgtacgtcagctacctgttgccgatgctggactttctcttgaggtggcacatgtgcaaagctttccgggacctcaaattcaagcgctacgtgttcgccaagaaggtgctgaggaccatctgtcagaatttgacccgcgaggcgggtcagaacaccctggtgggcttcggagactggtcgaatcaggatagcgcaggcatcatcaagaagtcgcctgcaggccctgtcaagagactggagaacgagctgaggaggcactgcagggtggtcagcgtcgatgagcacctgaccagcaagctgcacagctgctgtcatcacaggatgaagcagatgtaccagcggagggtgtgcagagatggtgtgatgcggagcgtgaaggtgcacagtgtgctccattgtgacaacaatggctgccatggcatgacggtgaaccgagacgtgaacgcatcgcgcaacatcctgcacatcctgagggcgacagccggcggagggcctcgcccggaggcgttccatcggtcgagaacgaagtattcagaggcacccgccacgagcgggctgcctctgaatggccagtcgactctggcattattaccagtacctgacagccactgacattgtgggcgttaggggtaataatccatacatggccgaatgctcgcagtcaggctcttcacaacgcttcgtcgcaaggcatcgcatcccaagctctttgtgcaggaaacaacgagctttctcctctacaccccaggtcgcaacgtttgtgcaactctcaaaggagcatctcttactgactaggttgagatagccatgtggtcgagcatgcgcagcgcagaaccgagcttttccatcctctggaccaaagcatgctgtgatcttacatccctcttcttcacattgcttgttgaccacacacacaaatgcaagctcctttccatgctttgagcagtattttgctttcccgttctcgggtccaaagctggcccgggtgtcgcagccaggcttttggcactttacatttttgacatcttcgtagcccagaagctcaccatgctccttgcaatgactggctttcttcccagcagggccgaagtttggtcgcttgtcgcaccccgctgtcttacaacgtgcgctcttgttgttgtcatagcctcgctcctctccgtgccctttacagtactggggttgaccaccaacagggccgtgcgatgggtgtttgtcgcacccggcgacctcgcagcgtttgttcttgacatcgacgtagccctccagcgcgtgctctttacagtacatacgtttcccatttggttcaccaaagttcgctctcttgctacagctcaattcaagacagaactctggcatctctctgccctgatcatccgccagggggtttttccagatattttacgcagccctccagagaaaaattgatgtcgtccgagccgaaaaccaagaggatggtcaaaatgagtgtggacgccgctacgcagaccactccctccaagtcggcaggactgccgaagcccaaagcaaatccgctgaccggcctctgcattcagctcgtcatgctggccctgatgctcgcaggcttcatcgccctgatcgtgctgatcgtccggcaggacagacccgagacccacgcgcagctcctgtgccagggtctggagcccgccaaggtcgagagggaggacgcctacgacaagtactccaagttggcgctggcggtgatcgtcggcctgttctcactaggcgacaaaattcactcgattgtaatcctgcgcagccacaagcagcagctgcaggccgtcacctctgcccagcagtccgcgcagcagcagcagccgctgacctccggtgaggactggggcatcggcagcgacgccggggaccgcgaggtcgacgtcgacgtcaccatccacaagcactactcagctcctatccaccgttgattctgaatcaaccaaccgcacgaggtgtctcgtgcggttccccacagtatcacaccagccgcgttatctgagagtttttttcttgccacggttgcacatacgggtgatggaggcgatcgtgcaggcatacaacaatctgctcaaggtgctcgaggacattcagaagatgggcaagctgactctgggcgaggccagcgcaatattctccagcgtgctgggtatgaagaacgccatcgacgagggcatcaaggaccccgggcagcgcgccaagggcagcggacctggcgaggactccagcaaccgcctgaaggaggctcaggtacagctcatgacgaggaacatcgagctgcagaacctcaaggagaggttcgccgagacactggagcagctgaacaagctgaacggtaacaaggggggcacccagatcgaggaactcccgtgaagaaactaatctgcccggatagaaatggctggtgctagccctgacttcgacacgttcaaggaggcccctggcaggaagcgttacaaccgccacgtgctcacggggagcgtgtgcggcaacctgctgaaccagctcttcctgtccgacagcaacatcaagatcatccagaacgcgatccggtacaaggtgtatgaaaaatcaaacgggaagctggtcatcagcaaccaggacgagaccgagctggtcatcaccatgcgcgctgtctacctagagtacggcaggaacaccccggacgacgtcaagggccagatcgcagagctcaatcaaaaggtcttagagttggtcgtgccgggaatcatcggccaggcctacgggtaccaacagtacctcatagacgcgaccacccagccggtgcccatcgccaggccctccaacgtgtcgtcctccgggacgaagaccctccgatccgtgaccagtgtcttcgcttgaggcatggactggatgagcgaggcctacagcaggtggctgaggcccgtcgacatcaaatccaaaaaacgcaggaggagacgccccggcgttgtagactgcatccggggactgctgagcgatgtttccggtcagcagtggctgtgtgtcggactcgtgtcgatcatctacaattgttcttcgtggagggtcgcgctctttatggtccccctcgcgtcggtcgtggcctgctgggggcaacgcgcccccacttcgggcctgctcctggctgcgggttccgccctcgtcgtgcggctggcagtggtggccagcaatgccgtgatcgagctggcgttgttgacatgtgtcagtgccatggccctggcagccgtgcgatgcaagagatggggtgtgtggacacgccatctcgggaccctcttcgcgcagccatcggatattgtcgccgcacagagtagggaatgactgcgggtgtctctgtgacgctcttcgtgtacgatctcgcgcaatccaacacactgacccgctggctcgggctgggcaagtacctcgcgacggtcgagatctatggcaccagggtgtgggccggcaagaacggggtggagacttccaaggacccgctcgatctgccactgcgctggacgggcgtgatcggacacaccaccaagagcagggcggagaccatggcggtcgtcgaagatctgcgcgaccacttcaaggacggggcctacgatgccatcggaaacaatggaaacacgttcgcatccgagctgtgtgtgaaattgtgcggccgcgacatcccacaatgggtcaacatgctctacgacgtgttcgcgaccctgcacttctatccgacacttcagctgttcaagcccgttcacggaacgagtatgaccgcgtagacgactgcacgcagtatcaacagggccacgtatgacgcgagaacatacacataggttccctgaaggcctgcagcgaccctggcgtcgagatcggggtcgccggcgatgctgtggtacgcgtatccgcctatcgcatccagagagagcagagcgatgagccccatgaccagcagggccccaggcagagtcgttgcgggggctctcaggagcatgactgcgagaagcgggttcacgccgaggctcaccatcgacatgccgttcacgaagcttctctgcgaagacggagacggggcgctccagcgggcgagcagcgcactcttggctatctgcaagacgagcaggatcccgatgaccgcattcgccgcgactcctatcttactgaatgcccgtggcatctgtataagcagccgacatattctcgcctcagcacacgaccctgcctctctggtaggcccgcagctcctccagatcattcgtgatgtctttcgaggagaatggagagctgtagcccctggaggccatcctcgccagcttgactgggtcgagaggaccggtgtgcgtccgcacgtgcttggccacatcggggaatcggcgctcgaagaactgttcccagcaccgccggttgatgttgcagaccttcggtggctgggtgaagagctctccattcaggtccctgtcaacgtacctgctgtatctcccgcgtcccctgccgtatcggccaaacagctgtttgcagaggtcgtccagggcctccgtgcaattcttccccgacagggtgagcccgaagaccctcgacaaactcttgctgtaggcgggcagcatgcgcgtgttccagccctccagtatgcaggctatgtactgggcatttgcactgtgggacagccacgcgttgtacgtccgctggcggctctcctgatcatctggcatcgctacgctggcgtccatgacgtagaagaggagacggaggacatcggtgaggtgctcggcgggaaagtagtccagcaggcggaactcgaagccgaatcccttgcccttcgaagggtcgcgcctgaagtccgtgccgatgatggggaccaggggatcgttgccgttgctgagtatggctccgtaccgcgtctggatgtatcttctcagcgcgagcggagatgacatcgtctgcttgtacagggtcctgatccactcgggaaacttgtccacgctctccttgactgtctgcatgatcttcttcagggcgcgctgcatctgtccggtatccagggggttgtacgcgtctggctgacgaaggacgagatcctccctctgccgcggataccgtgccgcaaggatacgctcgtagtactgcttcagggggtctttgccgtcgtccgtggagcgctcctccgggaagccgagcatgccgatgttgctgccgagagccgtggccaacgactcctcaccgtgcctgaccgagagctgcgtgaagccgtttccgtcgaggatgcaggcagggctcgggcatcccagcactgccatcaacagcggctctatccactgcaccatctgcgcggccgcctcgtgtatacggatgaa

SEQ ID NO: 36 - DNA, 22205 bp, unidentified
  variation 22004..22205: note = n is any nucleotide
  misc_feature 1..22205: note = Fanzor polypeptide
  source 1..22205: mol_type = other DNA
  variation 7991..8331: note = n is any nucleotide
ggagagggtcgtgcgcgtagcattctgctcggtcacggaggcagaggtgctccgggcgttgagctgtccccgcaaggtggacaggaacctcgtggatgcccagatcgctcgccgcatcgtggacagactggtggggtaccgggtgtcacccatcctgtggaggcacctcaagagcggactgtcagcaggacgtgtgcagtccgctgcgctcaggctgctcgtggagcgcgagagggagatcgaaggctttcgaccagagaagtcctggcagctcacagcgagcttcgaggatggcaagatcagcggtacgtaccagaacgctttcgcaacgcgtgatgaggctcgcgaggccctggaaggaatgaaggatcacgagtacatcatatcgcacatcgatcgaagtgtggaacatacctccgctcctcctccactgcggaccgccaccctgcagcaggaggccggcagcaggttcggcatgtctccgaaggtcaccatgaccctggcgcagggcctgtacgaggctggtcacatcacgtaccaccggaccgactctgtggacatgtctccggaggcgatgcagggcctgcggacctacatcagcagcacgcacggggagaaatacctcgcagaccagcagcgcaactttcgacaggctccaggagcgcagatggcacacgagtgcatcaggccgacgagctggacgaggacggcgatcactgggggtgcccagaggctgtacgacctgatatggaccagagcggtcgcatcacagatggcacgtgctgcctacgacgtctgcaagctgcaggtgccatacagagactcgcacttcctgagcagtgcgagaagcgtggagttcgatggctttctcagggctagcggacacggcggtgaccctcatggctctggcacgatggcaatgctggcgaacctgaagtgtgggcagaggctgactctgcacgagggcaccgctcgagagcagctcacatctccacccccacattacagtgagagcgggctcgtcaaggagctggaacgctgtggattgggcaggcccagcacctacgccacaattgtgacgaccctccaggacaggcggtactgtgagagtgcggcacccagcaaggtcaagcaacgcttggaagtgatgcacctcagggaggggaaaatcacgatgggcaagagggagcaggaggccccaaacgtgaggggtcgtttgacggtcaccgagatcggccaggacgtctacagctacctcgacaagcactttggatgcataacggacatcgcattcacccgagacctggagctagaactggacaggatcgccgcaggcagcgtgaaatggatggacatcgtgaagaagttccatgacgagttcgggccgactgtcgacaccctgatgaagacgaaggcgctggagaagcgcatcccgcgggcaatcagagaggtgcgcaggatcggcaggcacccccacacgggccagatgatcgagacatgcaaggcccggtacggcccggtggtgaagatgggcgacggctacaagaccgtcttcgcgaagatcgacgctgcatcgatggacagtctggacttgaataccgcggtcaccatgctcaacaggaagatgcattgacgattgttgtgtaaaagtcgtgctcaaacccgactttttcttgagaataatcactcgttcactagagactgagggaccggtggtggagcctcgacagggcccttcgaccccttctcggcggcgcgctgatgcagcagcatggcgagccttctcaggaagcgtctgagccatcgatcggactcgtcatccgtcagcttccacggcagatggatctcccggatgagggctcgactgaacgtgatgcagtttcgatcgcgcaggaggctgtagccattgtccgggaatttgcctgcacggaggcgctgcagcgcagtctcgacctcaccgaccgtgctgacaccggcgaagaccttctcgaagggctcgaagtaccgtgggtagcgcaggatagacgtgatgcctccaccagagtaggcgaggggtctcagctgttgcttgaagacccggtgtcgtagtcgctcgaaccagccgtgtctcgcgatgcgccagtagctgtactcgccgaggaacttggggcgctgctcatgagtccagacctctaccgacgcgtgcatgggcatgacatgatggctcatgaggaatccgccgaggaggcggtagagtttctgctggcccccatcgatggcgtaggagcgctcgtaaacatccactggcacgtctggtgccgatgttgctggcatacacgttttgatgggactcaagacactgtgccatcggtaaatcaatttttgtcagcatctctgcttgggactgcgcgatggcttgtcagccttgccgtaccgagccagctccttgcgcaccgcatcgagctcctccctcacatcgcgcagctcctgacgaagcccggcgagcgatctgttctggtcgatctggttgtcatgcacaatgcctatcgcgtctgtgagggcattcactctatccaccaaagcctccatgtttcagtaagatgcagaagggtgtcgctgttgctttatgagagtctcaaagtgctgcagcacattttcttgggaaaagataagaggatgacagttcttgaccgcatgaagcagagcctgctgtctcgctacggagcgcacggtggtacggtcgagaagaagcaccttcccccggccgtggaggaggtcgtgcaacaccaccacgtcaaccgcatcatcccggtgatcgtcagggaggaccacgaggtccacgtagagcagtcgatcctgcccatcatcgagaacctggaggaggaaggcgacgtgcaggagcggacccaggcgccgtcgttccgggaagtccatcacgacatgccgcaggacctcgtaagcaagcgcatgcagaaccgacaggccatggtggacatcggcaggaacatcaccgaggacgacacccaggagaccgtggaggacgaacccatcgtggaacaccgagtcttccgccacgttattcaggagtgccagcccgtcatacgcagacgaattcggaaatcgcatgtcgtccacacgatagcccctatcttcgagaagagcctgcgcatctcgcacattgccgatctgcacgagcacaaggcgattaccatggccgagtggaatcgtcagcagaggcagctcgagaatggtggtcaatccagcggtacaggcggggaagtcactgaggctacgcaggagtcttgaacccgtcgtagtagaggtgatgaatggtcacagccctgtctggaatattgcagacgctctgtaggatctgagtggtgagaacatctaagcgagctttccacactttcttctgaggcagtggcacctcctccttcttactatattgaaagcatgatggaatgactgtgccctcgctgtcgacgtatttgtcggggttgaatctgatcattatcaagggccgaaagcctgtgtcttggtagatctccatcatccgcttgttctcgcacggataagaagattcgctggcgtgctggttttcgtcacattcgatcacgatcgcgtgcgaaaagcactcgagaaaggcatcaggacgtctgcgcgagcacccacccagagcccgatcgaaagtcagctgtagccccttcagacgctcgtcagtgctagcaagctcagatatgtgttggcgaaagcgtgtctcttttgttttccaattgcgagccacaggctcgtcagggtacagatggatgtaacagcgaatacagtacccatcgtacttgtttctggatgtcatggcctgacagccatttttgcacctgtaattcatgacatcaatcatgcccaggggttcgccgtgtgccctacagtgcgtggccgctcgatcaattattacccctaacgctgacaatgtcagtcattgagatctcagattcgttctgagattccttcctcacatacttaccaccccctccacggtatgaggcctcaagccatcagaacttgtttcttccgtatgcgctctcttggatgctcctttcgacacatctccgatgcactcgctgtctctcagagacagctctaccggtggcagcgcgcgcctctgctcatgactcgccccctggacagaagtcatctgcgtcggaagacgacaatagagatcggagacgctgttatccgtttggtaacccagcgcaacattgtcaccctgggtgacattcgaaacaacctcaggtccaccctctcggtgttggcctccaaacagtccatctctcgggtgctcaaagaacgcaagtggacgaggaaaagaggcgccaaagcgtacacagaggcggacgcctccagatgtgcagcattcgcgagatccatagcgagcgggctcagctcaaggctgctcgccctcgacgagtgtgccttctttctcaaccacagccagcactacgcctggagccctcgaggctccagagctgtgatcagtaggcccggcaaccgtatccgggcctactcgctcctgctgtgcatgggatacagtggacacacctcgtggcgcctgttcgagggagccgtcaccgcctctcgctttcagaagttcctgacactcatcccacacagcagcgacctcattctggacaacgcagccatccaccgcgccactcgtgtcctgagactccaggggagcccaaccatttctgatacagccgatgcccggggcatcggtctcagatacctcccgccctactgtccccagctcaacccagtggagctggcgttcaacaccatccggcagttcgtgaatcacagacagcccagggatccggtcgccctggagcgatgcataacggaggccatcgcacggctgaccccccaagtctgctctgccacctttcggaagtgcttctcggcattctcatagagaatctcggtgcgtctggatctggggaaagaaatctggcagacaccaaagagatgaggagaccgaagaaacctccgaaagatccgcagctccgcctgcaggagcagtacctcgtctacgccaagaacaagctcttcaaggagaagaaggtcaaggagaaggctgtcagggaggacgtgaaggagcgcgcagtaacaaacgcccactccactttcacagtggtcaagaccacatggaggagcctctgcaaacgtgcagcacgcctcttggatttggagactgctctgcgcgaggtcaacaccaccatcgccgaggcctatctcctggccaatgtgcacgtcgtccgcctctgcaccgccggcatccctctgtgcaagctcaaccagtccttcttctaccagtgcctctcggcggtgagcgtcagtgagagggagaaaccggagatcgaagacttcgagctccgcatgtccgtcaagctgtacagatcctggcgcccccaggggtaccagccgcctgacagcaccaacctctcgtctggtttccaccagcaggccagcaggcagatggcgacgaacatgcgcaactcgacagtcgccaacttctacaggaggttcaagaggtatctcaagttgcgctactccctggatggcaagcaggcctacgaggccctgcttgccatccgagccgccgagtacgagggtgaagaccccctcgtgaagcgatacagagatatgctgcccccgaagcccgagaagagtcgtctggaagacaatccagagctggtcatgccccttcagcaccattttctgcgcgctttcgaggctgcgcaggccgaccagcaggcagagaaacctccgcgtctcttctctctggtgcccacgaagcagggattcgaatgcagccacatcaagatctgttcgagcggcctgtacggcctgctgaggaggagcggcatcaaggacttgcccagcagcaaaggcttcccaggcaaagccgacgctttttggaggcgtttcttccacatctcgaagttcgagaccaccaacaggaggttcgcaggggagatcctgacggacggcaagggcgtcagcatcgtcctgaggaagccgaaagtggaacccgcggcaaaaggcgcacctctggacccagacacgttcggagaggtgtggggtctcgatcccgggcgaagagagatgtttgtcgccagcaacgacgctcagagggtgcagagagtgacgacacggcagttctaccacgacgccaagtacagggagtcgaatgcgaagatcagggtgtggcaggatcacgatccggacatcctggaggcgatccggaacatgccctccaagaagcactcacatctggaggggctgcaggcgtacgtcagctacctgttgccgatgctggactttctcttgaggtggcacatgtgcaaagctttccgggacctcaaattcaagcgctacgtgttcgccaagaaggtgctgaggaccatctgtcagaatttgacccgcgaggcgggtcagaacaccctggtgggcttcggagactggtcgaatcaggatagcgcaggcatcatcaagaagtcgcctgcaggccctgtcaagagactggagaacgagctgaggaggcactgcagggtggtcagcgtcgatgagcacctgaccagcaagctgcacagctgctgtcatcacaggatgaagcagatgtaccagcggagggtgtgcagagatggtgtgatgcggagcgtgaaggtgcacagtgtgctccattgtgacaacaatggctgccatggcatgacggtgaaccgagacgtgaacgcatcgcgcaacatcctgcacatcctgagggcgacagccggcggagggcctcgcccggaggcgttccatcggtcgagaacgaagtattcagaggcacccgccacgagcgggctgcctctgaatggccagtcgactctggcattattaccagtacctgacagccactgacattgtgggcgttaggggtaataatccatacatggccgaatgctcgcagtcaggctcttcacaacgcttcgtcgcaaggcatcgcatcccaagctctttgtgcaggaaacaacgagctttctcctctacaccccaggtcgcaacgtttgtgcaactctcaaaggagcatctcttactgactaggttgagatagccatgtggtcgagcatgcgcagcgcagaaccgagcttttccatcctctggaccaaagcatgctgtgatcttacatccctcttcttcacattgcttgttgaccacacacacaaatgcaagctcctttccatgctttgagcagtattttgctttcccgttctcgggtccaaagctggcccgggtgtcgcagccaggcttttggcactttacatttttgacatcttcgtagcccagaagctcaccatgctccttgcaatgactggctttcttcccagcagggccgaagtttggtcgcttgtcgcaccccgctgtcttacaacgtgcgctcttgttgttgtcatagcctcgctcctctccgtgccctttacagtactggggttgaccaccaacagggccgtgcgatgggtgtttgtcgcacccggcgacctcgcagcgtttgttcttgacatcgacgtagccctccagcgcgtgctctttacagtacatacgtttcccatttggttcaccaaagttcgctctcttgctacagctcaattcaagacagaactctggcatctctctgccctgatcatccgccagggggtttttccagatattttacgcagccctccagagaaaaattgatgtcgtccgagccgaaaaccaagaggatggtcaaaatgagtgtggacgccgctacgcagaccactccctccaagtcggcaggactgccgaagcccaaagcaaatccgctgaccggcctctgcattcagctcgtcatgctggccctgatgctcgcaggcttcatcgccctgatcgtgctgatcgtccggcaggacagacccgagacccacgcgcagctcctgtgccagggtctggannnnnnnnnnnnnnnnnnnnnnnnnnnnnnnnnnnnnnnnnnnnnnnnnnnnnnnnnnnnnnnnnnnnnnnnnnnnnnnnnnnnnnnnnnnnnnnnnnnnnnnnnnnnnnnnnnnnnnnnnnnnnnnnnnnnnnnnnnnnnnnnnnnnnnnnnnnnnnnnnnnnnnnnnnnnnnnnnnnnnnnnnnnnnnnnnnnnnnnnnnnnnnnnnnnnnnnnnnnnnnnnnnnnnnnnnnnnnnnnnnnnnnnnnnnnnnnnnnnnnnnnnnnnnnnnnnnnnnnnnnnnnnnnnnnnnnnnnnnnnnnnnnnnnnnnnnnnnnnnnnnnnnnnnnnnnnnnnnnnngagtgccagcccgtcatacgcagacgaattcggaaatcgcatgtcgtccacacgatagcccctatcttcgagaagagcctgcgcatctcgcacattgccgatctgcacgagcacaaggcgattaccatggccgagtggaatcgtcagcagaggcagctcgagaatggtggtcaatccagcggtacaggcggggaagtcactgaggctacgcaggagtcttgaacccgtcgtagtagaggtgatgaatggtcacagccctgtctggaatattgcagacgctctgtaggatctgagtggtgagaacatctaagcgagctttccacactttcttctgaggcagtggcacctcctccttcttactatattgaaagcatgatggaatgactgtgccctcgctgtcgacgtatttgtcggggttgaatctgatcattatcaagggccgaaagcctgtgtcttggtagatctccatcatccgcttgttctcgcacggataagaagattcgctggcgtgctggttttcgtcacattcgatcacgatcgcgtgcgaaaagcactcgagaaaggcatcaggacgtctgcgcgagcacccacccagagcccgatcgaaagtcagctgtagccccttcagacgctcgtcagtgctagcaagctcagatatgtgttggcgaaagcgtgtctcttttgttttccaattgcgagccacaggctcgtcagggtacagatggatgtaacagcgaatacagtacccatcgtacttgtttctggatgtcatggcctgacagccatttttgcacctgtaattcatgacatcaatcatgcccaggggttcgccgtgtgccctacagtgcgtggccgctcgatcaattattacccctaacgctgacaatgtcagtcattgagatctcagattcgttctgagattccttcctcacatacttaccaccccctccacggtatgaggcctcaagccatcagaacttgtttcttccgtatgcgctctcttggatgctcctttcgacacatctccgatgcactcgctgtctctcagagacagctctaccggtggcagcgcgcgcctctgctcatgactcgccccctggacagaagtcatctgcgtcggaagacgacaatagagatcggagacgctgttatccgtttggtaacccagcgcaacattgtcaccctgggtgacattcgaaacaacctcaggtccaccctctcggtgttggcctccaaacagtccatctctcgggtgctcaaagaacgcaagtggacgaggaaaagaggcgccaaagcgtacacagaggcggacgcctccagatgtgcagcattcgcgagatccatagcgagcgggctcagctcaaggctgctcgccctcgacgagtgtgccttctttctcaaccacagccagcactacgcctggagccctcgaggctccagagctgtgatcagtaggcccggcaaccgtatccgggcctactcgctcctgctgtgcatgggatacagtggacacacctcgtggcgcctgttcgagggagccgtcaccgcctctcgctttcagaagttcctgacactcatcccacacagcagcgacctcattctggacaacgcagccatccaccgcgccactcgtgtcctgagactccaggggagcccaaccatttctgatacagccgatgcccggggcatcggtctcagatacctcccgccctactgtccccagctcaacccagtggagctggcgttcaacaccatccggcagttcgtgaatcacagacagcccagggatccggtcgccctggagcgatgcataacggaggccatcgcacggctgaccccccaagtctgctctgccacctttcggaagtgcttctcggcattctcatagagaatctcggtgcgtctggatctggggaaagaaatctggcagacaccaaagagatgaggagaccgaagaaacctccgaaagatccgcagctccgcctgcaggagcagtacctcgtctacgccaagaacaagctcttcaaggagaagaaggtcaaggagaaggctgtcagggaggacgtgaaggagcgcgcagtaacaaacgcccactccactttcacagtggtcaagaccacatggaggagcctctgcaaacgtgcagcacgcctcttggatttggagactgctctgcgcgaggtcaacaccaccatcgccgaggcctatctcctggccaatgtgcacgtcgtccgcctctgcaccgccggcatccctctgtgcaagctcaaccagtccttcttctaccagtgcctctcggcggtgagcgtcagtgagagggagaaaccggagatcgaagacttcgagctccgcatgtccgtcaagctgtacagatcctggcgcccccaggggtaccagccgcctgacagcaccaacctctcgtctggtttccaccagcaggccagcaggcagatggcgacgaacatgcgcaactcgacagtcgccaacttctacaggaggttcaagaggtatctcaagttgcgctactccctggatggcaagcaggcctacgaggccctgcttgccatccgagccgccgagtacgagggtgaagaccccctcgtgaagcgatacagagatatgctgcccccgaagcccgagaagagtcgtctggaagacaatccagagctggtcatgccccttcagcaccattttctgcgcgctttcgaggctgcgcaggccgaccagcaggcagagaaacctccgcgtctcttctctctggtgcccacgaagcagggattcgaatgcagccacatcaagatctgttcgagcggcctgtacggcctgctgaggaggagcggcatcaaggacttgcccagcagcaaaggcttcccaggcaaagccgacgctttttggaggcgtttcttccacatctcgaagttcgagaccaccaacaggaggttcgcaggggagatcctgacggacggcaagggcgtcagcatcgtcctgaggaagccgaaagtggaacccgcggcaaaaggcgcacctctggacccagacacgttcggagaggtgtggggtctcgatcccgggcgaagagagatgtttgtcgccagcaacgacgctcagagggtgcagagagtgacgacacggcagttctaccacgacgccaagtacagggagtcgaatgcgaagatcagggtgtggcaggatcacgatccggacatcctggaggcgatccggaacatgccctccaagaagcactcacatctggaggggctgcaggcgtacgtcagctacctgttgccgatgctggactttctcttgaggtggcacatgtgcaaagctttccgggacctcaaattcaagcgctacgtgttcgccaagaaggtgctgaggaccatctgtcagaatttgacccgcgaggcgggtcagaacaccctggtgggcttcggagactggtcgaatcaggatagcgcaggcatcatcaagaagtcgcctgcaggccctgtcaagagactggagaacgagctgaggaggcactgcagggtggtcagcgtcgatgagcacctgaccagcaagctgcacagctgctgtcatcacaggatgaagcagatgtaccagcggagggtgtgcagagatggtgtgatgcggagcgtgaaggtgcacagtgtgctccattgtgacaacaatggctgccatggcatgacggtgaaccgagacgtgaacgcatcgcgcaacatcctgcacatcctgagggcgacagccggcggagggcctcgcccggaggcgttccatcggtcgagaacgaagtattcagaggcacccgccacgagcgggctgcctctgaatggccagtcgactctggcattattaccagtacctgacagccactgacattgtgggcgttaggggtaataatccatacatggccgaatgctcgcagtcaggctcttcacaacgcttcgtcgcaaggcatcgcatcccaagctctttgtgcaggaaacaacgagctttctcctctacaccccaggtcgcaacgtttgtgcaactctcaaaggagcatctcttactgactaggttgagatagccatgtggtcgagcatgcgcagcgcagaaccgagcttttccatcctctggaccaaagcatgctgtgatcttacatccctcttcttcacattgcttgttgaccacacacacaaatgcaagctcctttccatgctttgagcagtattttgctttcccgttctcgggtccaaagctggcccgggtgtcgcagccaggcttttggcactttacatttttgacatcttcgtagcccagaagctcaccatgctccttgcaatgactggctttcttcccagcagggccgaagtttggtcgcttgtcgcaccccgctgtcttacaacgtgcgctcttgttgttgtcatagcctcgctcctctccgtgccctttacagtactggggttgaccaccaacagggccgtgcgatgggtgtttgtcgcacccggcgacctcgcagcgtttgttcttgacatcgacgtagccctccagcgcgtgctctttacagtacatacgtttcccatttggttcaccaaagttcgctctcttgctacagctcaattcaagacagaactctggcatctctctgccctgatcatccgccagggggtttttccagatattttacgcagccctccagagaaaaattgatgtcgtccgagccgaaaaccaagaggatggtcaaaatgagtgtggacgccgctacgcagaccactccctccaagtcggcaggactgccgaagcccaaagcaaatccgctgaccggcctctgcattcagctcgtcatgctggccctgatgctcgcaggcttcatcgccctgatcgtgctgatcgtccggcaggacagacccgagacccacgcgcagctcctgtgccagggtctggagcccgccaaggtcgagagggaggacgcctacgacaagtactccaagttggcgctggcggtgatcgtcggcctgttctcactaggcgacaaaattcactcgattgtaatcctgcgcagccacaagcagcagctgcaggccgtcacctctgcccagcagtccgcgcagcagcagcagccgctgacctccggtgaggactggggcatcggcagcgacgccggggaccgcgaggtcgacgtcgacgtcaccatccacaagcactactcagctcctatccaccgttgattctgaatcaaccaaccgcacgaggtgtctcgtgcggttccccacagtatcacaccagccgcgttatctgagagtttttttcttgccacggttgcacatacgggtgatggaggcgatcgtgcaggcatacaacaatctgctcaaggtgctcgaggacattcagaagatgggcaagctgactctgggcgaggccagcgcaatattctccagcgtgctgggtatgaagaacgccatcgacgagggcatcaaggaccccgggcagcgcgccaagggcagcggacctggcgaggactccagcaaccgcctgaaggaggctcaggtacagctcatgacgaggaacatcgagctgcagaacctcaaggagaggttcgccgagacactggagcagctgaacaagctgaacggtaacaaggggggcacccagatcgaggaactcccgtgaagaaactaatctgcccggatagaaatggctggtgctagccctgacttcgacacgttcaaggaggcccctggcaggaagcgttacaaccgccacgtgctcacggggagcgtgtgcggcaacctgctgaaccagctcttcctgtccgacagcaacatcaagatcatccagaacgcgatccggtacaaggtgtatgaaaaatcaaacgggaagctggtcatcagcaaccaggacgagaccgagctggtcatcaccatgcgcgctgtctacctagagtacggcaggaacaccccggacgacgtcaagggccagatcgcagagctcaatcaaaaggtcttagagttggtcgtgccgggaatcatcggccaggcctacgggtaccaacagtacctcatagacgcgaccacccagccggtgcccatcgccaggccctccaacgtgtcgtcctccgggacgaagaccctccgatccgtgaccagtgtcttcgcttgaggcatggactggatgagcgaggcctacagcaggtggctgaggcccgtcgacatcaaatccaaaaaacgcaggaggagacgccccggcgttgtagactgcatccggggactgctgagcgatgtttccggtcagcagtggctgtgtgtcggactcgtgtcgatcatctacaattgttcttcgtggagggtcgcgctctttatggtccccctcgcgtcggtcgtggcctgctgggggcaacgcgcccccacttcgggcctgctcctggctgcgggttccgccctcgtcgtgcggctggcagtggtggccagcaatgccgtgatcgagctggcgttgttgacatgtgtcagtgccatggccctggcagccgtgcgatgcaagagatggggtgtgtggacacgccatctcgggaccctcttcgcgcagccatcggatattgtcgccgcacagagtagggaatgactgcgggtgtctctgtgacgctcttcgtgtacgatctcgcgcaatccaacacactgacccgctggctcgggctgggcaagtacctcgcgacggtcgagatctatggcaccagggtgtgggccggcaagaacggggtggagacttccaaggacccgctcgatctgccactgcgctggacgggcgtgatcggacacaccaccaagagcagggcggagaccatggcggtcgtcgaagatctgcgcgaccacttcaaggacggggcctacgatgccatcggaaacaatggaaacacgttcgcatccgagctgtgtgtgaaattgtgcggccgcgacatcccacaatgggtcaacatgctctacgacgtgttcgcgaccctgcacttctatccgacacttcagctgttcaagcccgttcacggaacgagtatgaccgcgtagacgactgcacgcagtatcaacagggccacgtatgacgcgagaacatacacataggttccctgaaggcctgcagcgaccctggcgtcgagatcggggtcgccggcgatgctgtggtacgcgtatccgcctatcgcatccagagagagcagagcgatgagccccatgaccagcagggccccaggcagagtcgttgcgggggctctcaggagcatgactgcgagaagcgggttcacgccgaggctcaccatcgacatgccgttcacgaagcttctctgcgaagacggagacggggcgctccagcgggcgagcagcgcactcttggctatctgcaagacgagcaggatcccgatgaccgcattcgccgcgactcctatcttactgaatgcccgtggcatctgtataagcagccgacatattctcgcctcagcacacgaccctgcctctctggtaggcccgcagctcctccagatcattcgtgatgtctttcgaggagaatggagagctgtagcccctggaggccatcctcgccagcttgactgggtcgagaggaccggtgtgcgtccgcacgtgcttggccacatcggggaatcggcgctcgaagaactgttcccagcaccgccggttgatgttgcagaccttcggtggctgggtgaagagctctccattcaggtccctgtcaacgtacctgctgtatctcccgcgtcccctgccgtatcggccaaacagctgtttgcagaggtcgtccagggcctccgtgcaattcttccccgacagggtgagcccgaagaccctcgacaaactcttgctgtaggcgggcagcatgcgcgtgttccagccctccagtatgcaggctatgtactgggcatttgcactgtgggacagccacgcgttgtacgtccgctggcggctctcctgatcatctggcatcgctacgctggcgtccatgacgtagaagaggagacggaggacatcggtgaggtgctcggcgggaaagtagtccagcaggcggaactcgaagccgaatcccttgcccttcgaagggtcgcgcctgaagtccgtgccgatgatggggaccaggggatcgttgccgttgctgagtatggctccgtaccgcgtctggatgtatcttctcagcgcgagcggagatgacatcgtctgcttgtacagggtcctgatccactcgggaaacttgtccacgctctccttgactgtctgcatgatcttcttcagggcgcgctgcatctgtccggtatccagggggttgtacgcgtctggctgacgaaggacgagatcctccctctgccgcggataccgtgccgcaaggatacgctcgtagtactgcttcagggggtctttgccgtcgtccgtggagcgctcctccgggaagccgagcatgccgatgttgctgccgagagccgtggccaacgactcctcaccgtgcctgaccgagagctgcgtgaagccgtttccgtcgaggatgcaggcagggctcgggcatcccagcactgccatcaacagcggctctatccactgcaccatctgcgcggccgcctcgtgtatacggatgaattgtttctgggatgtgttcgcggcgtggggcagggtgatgttgatgtggtagctgccgagatagtgcgggaaatcaacgaggctcttgtctttgtactggtacgtgaggtagtcggcgccctgctccgggaagatgaccgagtccggtctgctccccggtctgcccgaggacatcgtgttgatgtcgtggaggagcagatccctcgtccgcaacaggtcagcgacctgctgactcagcgtgcgcccctcccagtcacgagtgatgcactcgatgcagggcctgagtcccgagtggtcctgtttgataatcatcggatacgcccgcgtgtctcccccgtctgcgtcatgctgtacctggtagacggctgaccagaacgattgcctcatgatgaacgcctcggctaccggatacaacctcctggacgccgtcgacaggcggcgattcaggcgcgtactccatatgggtaccacctcctgctcgatcccgagaccccatgtgaccattcggcgtccgttgatataccccggttttttttctgtgtcaaaggacattcacatgtcgcttgtcgagagagtgagacaacgggtgtacatgctgtaccactcacgatgcgtgctggcggagctgcaggtcgtcaccaacaggaacacatgggtcttcgagagagatctctcggagaggtgcagcaagttccggatcgaccccgctggaatcctcacttgagccacccctgcgtcgaggagtctggcgagttgccagactcactggacttgagactgcacgagcccgagctgtcccaattcgccgccctgcaaggcgcgatggcgctgcacaggagggagcagtctgaggcggacgcggtaggcacgcttgtcagggcagtcccggttatggacgtgttggatttccacgtgggatcgggagccgaattgaccttgaggtgcagggtccctgatctcgtcgtgagattttgggggttgactgcgctccggagcgtgcacgagtctgtgccatcgtcgtagaaggcgctcttgcaggcaggagcggccgagcagagcttgctacagacgtcatctccacccacactcgataccatcttgaaagcatccccctgggcatccacgttggacacggccagcacgggcttcgctgttccaccgggcgtcgcgaggctgaggtactcaaaatccgcgacggccgtctccttcccgtccacggggatgtggcaggcgtctgctccggaccacgtcctgcctatgtgagcctcaccgttttgcgcggcacggcacacccactgagtgcctgtgtcaccccttccaccgacaactttcctggctgggaatttgctgtagtacatcggcgagctgccgtccagatatgtaaagtcttgtgcggccacctttgcgccgttccaggcgacatcgcacgaggctgcactgtcggtggtctcccctggcaagacactggtcccccctggcaactgcgcctggcacacgtaacggttgtcccccgacgaggaatatcccccgacctgcttcaggggcgggctggccgcccacctcactgacggggtctggccgctgggctgtgcctgcgcgggtctcgtcgcggatgatggtgtcactgtgctcacgaacccggacagaaggtcgcatgtcgcgaacccctccaggcgagtgctcacgagaacgataacggcgaggaccatgacgagcaccgttcctgtgaggaaccagccgctcgacgccttgggcatgaggcgatatagatctgagtgacatatttgaggaggttgggacgtggccgatccgagggtggatgaggtggggatggccttcatcgaaatctcatataaaagatctcagactctgggaaatcggtgccaatggtcggatgtctaggggcagggtcaagtccatcgttatacagtgtcaaaaagggataaggatggctaccatcgatgcgatagtcatccagggattccctggcgatgtcaaggacagggaactcaggaatcttttgtggacgcttcctgagattaaagatagctggctggaccccgacgatcccacctgcggagtcgcacgcttcttctcgcagtatggcgcattgaatgccgcacaggccatagagtgccacaccttcgatgcaaatcaccgattaagctgttcgctcgccgaacgcaaccctgagttcggcgagcagtgtcggcagcagcagagtcgagatcacttcgccgagtacacagagacatcgatagacgacaggtctggcctttcgatgctaacaggccggctgtccagcgatgcgatgtgttcagagcagtgagcgatttgctgcatattttaggaagcacgtcaaacagcggagggagagctcggggcgctctcccaacaaagtcttcatcggcaagctggctgccacgacggataaggtcggctctgcacttctcgctgattctgagcaaaccttggctctgtgctgggatgttcatccatgaaggcatggcaatcgtgcaggaggatgtcgcgtatgagctgagggcatggagagacagcattcaggacatcaggctggtgcccggcaggcagccttggatgcctgtctctatctttgtagatttcgaaagcgaggaggctgcggccggttgtgtccagaccttctcttcaggattcagggtgaccacatcgagatccgtcggggtcgtggagtttgccaagtgctagggtcaagctgggacacagtaatatgcggcctgatctgggatgcctctgatcgtgatgtatcctggccgtttcgtggagtgccatgatccaaaaggtgtcgcacgcaccctgtcttgcatggctttcgagacgaggacccttttgccatcggctgcttcacatagctctatcgctatggtcacgtcttgaccgagcagactgtaagcctcgcccatgacgcgaccacacaccgtgcccacgtgtgccgagcagtgcacaccggccagagctggcacggatacagtgcccaaagcgagcttcatggccctctgcacgtgtgtcgcatcgttgttggtcatgttgcccatcccgaagaaccacccctctctacagggaacggatgtcagcccgagcttttcacacgatgcggtcataactctcagctgtgggtcatcggctggtccgaagcagacacacgacacatcccggaatacgtcttcctgcatgaccagaccagctatgcccatgatgtagctcgaggaagacgagccgacgactgtttcagcctctttgaacgccatcagagtgtctctgacatgcaccatgggtgggcgagcgcctggatcttcactccaacacgtgaccatgagttcgtaaatggggatggcatcgaggatgtacctgatctcgggcctcttcgcctctgtgccattcggaacagcctcccttactgttgccatcactgcctcgccggattccccagcataaacatcccgcccgtgcaggatctcgtgcatgagcatggcgaaggcgaaagtgtccgaagccatcgtgtgtcgtccgccacgcagcagctcgggggctgtggtcggtgtgggtcccgatggcagggagcgacgcaggcagaaacgattgctgctgtctatctcgacataggtggtgtccatcgacataccgacaaacccctgggaatgcaggtaggcgagaacacacgcgatatcatgcagggcggatgtcacgagggacagagacatagtcacggtcttgttgatcagcaggtcgtgcagtgttccgcgcggactgcgtgggtgcagaaacaccacttcagaccttcttgcgagttccagcactccgagacatgggaagagcagatcgtgctgcaatgcggccaccgcgcacgcagatctagcccgggagtgagtgtgagagggcagcgccagctctcgcagggccctgtctatccacagacgcagtgtccaccggctcgcaccagacgccagattcacatccgcatctgcccctgcgatccctggcagcgcacgctctgtcagcactgcctcccccttcatactggctgcgtgaatgcagccataccggctctttcctatgacctctctctcgatgtgcaccagcttggagggaagggtgcccaatttcttccgccgtcgccccacagctacgcctgtgatgacacaggcgatagcgacaatcacaaacaccgtcgccacaagctgagccaatgtcagggcacctatccatcgcaccgtcgcgtgtacacacggacggcacacgcaggtgaatcccttcgggcatttcaagctcccacacgcctgctgcagattgtgtgagacctgcttgacgaagccggtcggacagacgatggctgaatatatgtcgaagagggtggtgcagactgagaatggaaattgtgcgattccgaggcgctgctggaggttgatggttgggatgagggccggaggtgtcgtccaggtggtgtactgaccgatgacagcctcctgcatgtcaggagtgatgttgagcagggcggaagctattctgttcctggtgctcatcgcgacgtgaggcatgaccgccacgatgagttccgggtacaggggagtggtcgtcgcgaacgggaagccctcccaggttcgaggatccaggtagctgaagatcccagattgcatctgaccctcgctctgcaggcgttctatgtatcctgctcgtgtgaaccccacatccaacagtccagaggctacaccctgaacgactgccaacgagttgtctgtgaggaagacaccagcagcatccgcgaacaggtccaacccatggtcttggacgtacgcccagggcagctggaagctgctcagatagttcaatggacctgtgcctatcaccctgtttctcagatctgtggcaacctgtatctgggtgctgttcgcgagcgtgaatacgacccctgcgatggacgagattttgtggtcttcagcctgctcgacaatcatggccatcggcaggactccatattctgcctgcatgcaggtgaataaggtggttcccatgaaaaggagatcggcactnnnnnnnnnnnnnnnnnnnnnnnnnnnnnnnnnnnnnnnnnnnnnnnnnnnnnnnnnnnnnnnnnnnnnnnnnnnnnnnnnnnnnnnnnnnnnnnnnnnnnnnnnnnnnnnnnnnnnnnnnnnnnnnnnnnnnnnnnnnnnnnnnnnnnnnnnnnnnnnnnnnnnnnnnnnnnnnnnnnnnnnnnnnnnnnnnnnnnnnnnn

SEQ ID NO: 37 - DNA, 16305 bp, unidentified
  misc_feature 1..16305: note = Fanzor polypeptide
  source 1..16305: mol_type = other DNA
aatatccacacaagtcctgtaaaaaatttaaactatttaatctaaggcaattttctgaaaggaacaccctatatatgtatgaacttacctgcggacgcggcagatgcccctgttcaagcagcatggaaaagttatttcaatatagtttagttatcagctatcagtttctttaaaaaagcgtcacttttaacctgactgacgatactatatggaatgaatataaatgtttgtaggtatgttgtaacacaacaacataagtataatagagcttccataccgttcgttcccatcaacaataatgcatacatctatatgaaggcatattctattattttaatagaacctttacattccattacagctgaaggcagccgccgctatcgagacgcaatttcctggcgttccggagacaacaatgttatgtcatggaatactggattctagccgctctctttcttactagatggttaataaagaaattcttgtttggagattgaattttaaacttgaatagaattatggtttcaggtgaatctaaggaataataaaatgatcagttttactttacttctattggttatactcgtttttcatcaatgatatcactggataccgcggcatctccattaacgaatacctattgaaccccgccttgaggaaataattcgtaagtactttataagtaacaattttcattatcgtcaacaacccatacttattttccatgctccatcaatcgacaacgacgcagtttaccattacggtaacatttccaccctcacagcctcaaagacctttacaaatacacaaattttcacgaaacattgaatccgaaaagatactagggaaatgtgaaagttggggctagaaatagctacttttgaaatgctaatatttttttctctccataatatttttccgggtaggtaatgaaagtgaatcgtttgagctcctttttatccctcgacggaaaaaatggggcgctgcctgtgtatctgtctgtggtagtggtagattagctcccaaacggctgagccgattatcgttttgtttttttagggtcataggactcaaaggtaatgttaccccgaacgttcttagccatgtttcatgaaaattggttccaccattcaaaagttatgcgttttatttttgaattttgggggtttttcacgttgtaggtgacttgtatcagtatcgtttatccaattctgggaaagtataccgatacagggtgttgcaaaaagggtaaactaaaccgaaagggggtgactcagggggtcattctgaacaacttatgttttaggaatttgaaaattcacgaaaaaaaatataccttttccatggaaactttagtataccctttttgcaacactctgtacaccaattattttattttgaagaattcctcttgacactgaagctgtaaggttctcacctgaacatgcacgtggatgtccccgctgcggtccgtgctgaccacatatttctgaaacaaaagaaaatacgttcagagaatattccatttacaataaacggaggtcaataggaatatttaggatgatagggttttgcaaaaatggtataagtatgccgaaaaggagtgactgagcttttctcaaaaaatgaacatggcaaaaaacaattcgttaaagtaaaaccaactatattttaatatgaaatagatggagtgtaagtgcaaaagaatagtttcgacaaataacacctcaattctactactgacctcttattttgaattacctagttaggttagaatatttatgtcattgatactatgttaaacttaaaactgtgtgacagtaagggtggcttacacaacaactgattacctttgttgtgcaagccaccctaaatacaatagggacagttgtatgctttgtttttgtatgtgacacaccatcttgtcagtatatcgtttatctaagagtaaaacaaaagtgatgttaagatgtagtaggtagcccacgccaagagcgttgtttgtctatttccggacgccactgaaaacgcaccgggcgcactgtaaacacattacagcgcgactgaaaatgttaaatgccccacctcgcaactaatagttttttagggttccgtagccaaaatggcaaaaacggaacccttatagtttcgtcatgtccgtctgtccgtctgtccgtctgtccgtctgtcacagccgatttactcggaaactataggtactacagtgatgaaatttgatgggaatatgtgttgtatgaaccgctacaaaaatatgacactaaatagtaaaaaaaagaattgggggtggggccccccatacatgtaactgagggatgaaatttttttttcgatgtacatacccgtgtggggtatcaatggaaaggtcttttaaatgatataaagttttctaaaaaacattttttcttaaagtgaacggtttttgagatatcagctctcaaagtcgtaaaaagtatgtccccccccctctatttttataactacggggtataaaattctaaaaaaaatagaggtgatgcatgctaattaactctttcaacgatttttggtttgatcaaagtatctcttatagtttttgagataggttgatttaactgtaatattatatttcctattttattttattatcctcttccccccggacctcactattgagtagacgtgtaacagacctcttgtcgaattttcaaaattatttaaataatcgaaaacaatttttaataacaaaaattcgaaacggaatattaggagtgcatagaagaaggaacgttcacttatcactcactgggtgagtgaaaaagctgtttcctatctcacttcacataaccactggttcaaaagtaccaggagagcataaagatatcggaggtatttcgaagaagcagatatccgaacaaagcgacgaatagatacacgaatttcgctgtgatacgcagaagcatctgtggcctattcgttaagactgctgactctgacgctagaggcacaagttcgaatccacggcacgatcttttttctttttatttgtggctgatatttaagaacactgactctgacgctagaggcacgagttcaaatcctccggcccgatccttttttctttttttctgtggctgatacttatactaaatgaatatccaacgcacgcccccgtcgaatacccaaaagttgtcaggcctgtcggcctcaaacccagatattgcaaatgctacaaactcagtccaacgcgttaagagaccacgccaacaatcagaagaagaaatgaacgatgtaacaaccgaattgacaacttttaaaacagaaataaaggaaatgatcgaaacatttatggacaaacaagaccaagaattcaaaaatatgcgaagactttaaaagaaacacagcagacaaacgcaaatattgaacattcattggcatttctgactgagcagaatgacgttttaaaacggaaaattgagagtcttgaagtgcagatgaaggaagataagaaatacatttcaattttagaagataaaattgaaaacatgcagatggacagccggaaatctaattttgaaattaaaagtgttcctaaaaaagacatggaaaccaaggaagatttaatagatatggttttaaatctgtcagcaaacattggaggtcaactgaaaaaggaagacattaaagacatctatagggtgcgcggaaagaaagaaaatacctttaataccccaattattgtagagacttcgtcaactatcgtaaaaaatgatactttaaagctttgtaaggcttttaacgtgaagcataaagagaaattgagggcaaagcatttgggctttcgttctgaaaacacggagaatacccctatatacgtgtctgaacaactgacagcaagggcttctcgactacactttctagcacgggatctagttaaatcaaagtcgtacaagttctgttggactgcctatggaaaagtctacgtgcgtaaagacgaagggtctcccaattattatgattagaagtgaaatacaaattcaaaacctcattaatggtcaatgactaatcttggcgcttctcgccttctctacgcatgcattattgttatttcaagattttgttacatatttttgccattatcacttttgctttattacgttaagagaaatacttcatatgtacatatcacaattacacatccacacatcccatgtcattcatctcacacacataaaattcttaattgaattgaaaaatgtttttataatttcacacacacacacaactttacactttcaacacaaattaagctatgtccaaatacacagtttcataatattattaactatggtttactataatgtacataaatcaattgtttacgatctcactacattagaattaaataatggataattctttattaacgttgaacgaaatagacaacacaaacatttcgaactcaattaaatgtgatattcatgagtttaccaaacatgtagttataggcagtacggatctcacaataatctcacaaaacatacgaagtatttatcacaactttgacgatctacaggtaactctctctcttttgaaattcgaagcggatatattaatactaactgagtgtagattagacaaaaacaaacccattccacatctacctaactatacgtctttagctacccagaacaatatgaaccaaaacgatggagtagccatatatgtaaaaacctccctcagacctctccgtgaatgaaataagattaaaagatgcttcatgtatacaaataagtgttcttggctacgttatattaggcatatataggtctccatctaattcgaactcaaccaattttattaatcatttatctcgccatttagatacccttaaatcatataaaaacataatcatttgtggtgatattaacataaatttgattcctaatgataaagaaaaatctctagattgcagcaatagacaaaattatcttagtatgttatcctctcacaaaattctgaccgggcataaatttccaacaagagagaaaaattgcttggatcatgtaatgataaaaattgacaaaaaacatatagctacaaacactgtcgtcttaaatactactgttacagaccactttatgacatttttccagtttggtgaaacaaaaaactagagataagagctcgaaaacagctgagttcatcgattataataaagcacttacagaactggtaaaaaagaatttatcggatcttttgtttcatgatgatccacaattggttattgaacatctaacaaacaaattaattgaaacattagagagtagtaaaacagttagatacttgcctaaatcccaaagaacaatcaagccttggataacgccagggattctacgatgtattaaaaataggaacaagatgcaacaaaagctaaaattagacagtgaaaataatattaagataattacgtataaaagatacagaaattattgcggtaaacttataaaaaacttaaagcgtaaatatgaaaaagaacaattagacataagctcaaaaaatccaagatctctatggaaagccataaattctataacacattttaaatcaaacaaaacatccaataataatttaataaatgtacaatcttctcctgatgaatccgttaactacgttaacgactttttttcctccgttgggaaaaaacttgcagaagatagcttctctactattccaacacaatttcatacacaaaattgtctgaacacaagtgctcatcaactttcctcttttgttcttttggaggcagatgaccaggaagtggagaggattctaatgaatctaaaacccaatagtgccccaggatgggatggtgtcccgactaagtttctaaagttggcaaaacacttagttgtcccaatcattagtcacttggctaatctctgcttccgaaccggagtttttccgtcataccttaaaaaatctatagttactccggtgcacaagggtggcaagacagacgatgtcaacaattataggccaatttctgttttaacatccatttctaaaattattgaaaaacttataaatgtacgacttttagagtatctacaaaaatttaacatattatcaaactcgcaatatggcttcaggcaaggtaggtcgacagaggatgcaatattatcactcacatctttgattactgagcaactagaccaagggaataagtgcttaacggttttccttgacttaaaaaagcttttgacactgtctgtctctctactcttgtgcagaaattggaaaccataggaataagaggtcttccactccagctttttagtgactatttaggatgtcgaacccaatgcgtcaaaatagctaatcatatgagcagagacgcgtccataacatttggcgttcccagggaagtgtgttgggccccacattatttttaatatacataaatgatctgacaaatttgaaaataaataatggacatattttttcgtatgctgatgatactgcaattgtgctaagtggtacctcttgggactctgttttttcaaatgctgaaactactttgtgtactgtgtctacatggttaaaaaacaattatcttacacttaacacaagtaagacaaactatatctgttttagtattaataaagccactcaaccgagccgtaacttgaaacttaaaattcatcactgtgatgtcaaaacaaattgtaactgcgaaattattgaaagagtagcgtacacaaaatatctgggagtgatcatagatcaacgactatcgtggcatatgcacatagaatacgtaaatgagaggataaggaaacttgtttggatcttcaagacattacggcatgttgcatcgaataaattaattaaacaaatttacctaacattagctcagtccgtaataagttattgtataacaatatggggtggtgcgacacaaactaaatttctcgaagtcgaaaggggtcagcgctatctgctcaaagttatccacttcaagaaacgtattttttccacagaggaactttacaaactgtgtgaactactttctatacgtaaaatatatatactaactacaattttaaaacaacacaaaaatctaacatttaaccctttactattaaatcgaaggagaaaaggaaaagtagtatctcaacccttcagaagaactgagtttgccaggagacagttctccactcaaagtggttacatttataataaaataaatacattactggacatttaccaaaacacatcacgtgaatgtaaaataaaagttacagactggctaaagacacaaaattatgcagatactgaaaaaatccttaaatatatatcataaaaatctaaaattacaagtattggacatactcattcatctatttacatacacaacataacacaacacaacacacacacacacacacacacacacacacacacacacacacacacacacacacacacacacacaaacacacacacatacatcagcatgatattacaatatgttaatattcacctaagcatgtttttctttatatttcttactaagttataatcttaaagttatttttactcactgtattattattaaacactagattattgatataattaagtacctactagagatatggaagagcggggcctcctgtcacaggttattacatagcctactaggttggtctcagcacttgattatagattgtgtaaaccattattgttaacgaaataaacatttttgatttttgatttttttttttgatttgctgctacggaaccctttgtgcgcgagcccgactcgcacttggccggtttttatataaaatgttggtaagttgctgagagtataacgtcaaataatgtgtgaaatggtatgcttcggctctcatgacaatgaagtataaattctggaaatggtggtagattatgacgtttgacaagtaattctaagattctacgtcaaaaaaataaaccatttcatttcatttcatttcatttcatttcatttcatttcatttcatttcatttcatttcatttcatttcatttcatttcatttcatttcatttcatttcatttcatttcatttcatttcatttcatttcatttcatttcatttcatttcatttcatttcatttcatttcatttcatttcatttcatttcatttcatttcatttcatttcatttcatttcatttcatttcatttcatttcatttcatttcatttcatttcatttcatttcatttcatttcatttcatttcatttcagaacgtatttttgttacaaacaattgtccgtttgaacaagggactcttgtctttggagagaacggagacaagaaactcctaataactagtagattagataggtacataatagtacatatggaaggaatttcctgatgcatgttaaatttattaaataaaacagaataaaatgtgatctacgactaataaacctaaactaaatacatattgtacttaatagaatagattttgtctatctgcttattttatgagtcgtatccattgaaattcggaacattcaaaactgccacaggaattatcttagctagttttgtcacacaatacatttcatctacctgcacgagtaatgtagatactgttatgttcgtagttcttaatacattatgtgcctacgtgaggctaggggagcctagggggtcactctataataaatcggagcgctacttcacacgtcacgactctctctcgttgtattaaacgtgccgattgcacgactgctctcggtttgtttttcgtcagtatagagtaacccgcctgcatcagttacagaacaaacgtattatttattccggatgcgatgcatcgtcgctccgtaactaggatgtgacgtcaccaacgacaggcgaaggctgatcattctgaacaacgcatgtatcaggtcgtagcaaaaacaggattgttaaatagaggtctcatttaccttcaatcgacaactgcaatactgttaaaaacaccgcatcttacgacattctggaaaatttcgaatgtttttaaacactcattcattgaattggacaaacttgaaaaggataacaacttgcgtgacctacgagtacgtacattcggattacctttctttaacttccgaacagagcatgaacttcactgcttatcttttaaataaggtaaaacctacaagttgagtaagaattttaaatttttaaacataggtacttatatgtaaataactatgcctacgattcattaatatgtaaatctggcacgtagttaaattattcctcccgtttaccctaaaccctgcatccattagctagacaaagtaattaaactccaattaaaaatacataatttagtatgaataactgcagaacttttcattaattcttaataagaaattaattctctaaagacctgaaacctctaaaaagcacaaataaacaggcaaccggttgtcagtttttcacccacggaacttataacaccccatattttcattagctgttaaatttcctaacaaaccacacaaagccaagccattacaatacgttataagtggattatcaactacccagtcacccatatatgtacctgcacataggatataggttaagtactaaaaattaaagagcgagctgggtatttcgtaattagtgaaataggtcatcgattgtgtttctagggcttctgttgacataccgtgtgtgatataaagccagttcagattcacttcatataggtacctgtacatgccagaataatagcgttaccaattaggtagtaaatggagtaaatggattctcacaccatagatgcgaattcaaaaccctaaaatcggttctttaccatttaatgacaatggacaccgtaaatcgtccattgctgaaaataggcatgtctgaaggagccccacaacactctatcctggactttactcacccagacactttctacctttctactggttctgttcttcggcaaaatgcctataataggtaccaactatacaggggtttgagctgaaaggaagtcatgctgaacattttttgtactacaaattttgaaaattcgcacaatatttttttcgtcatcactttttactatttatactgattttcatttaatttaacagcaaaaatttatgagaatgacgagttgagtcgcctttttcgtcttccaacattttttttaataccttgtataggtgttttatctaaatggacaatggatgctgatgtaacatgtaacatgttcaagttaccgagctgggcggcgtatcgaccgcgctggaaataaaccagctattctggctgctggctgcaggtcagacagatgccggtcgatgcagctgcaaaggtctcattgttctaatgttgtcttcatcatttttgctaaaacaacatttagaattgtcgttgctgatgcaacccctgagccttgcctaatgtacggctgaaccataattcgtactaaacagacgtacattttaataaaacgtcccttaattatttacgcaggtacctacttagaatttatgtagatataggcatcatgtcgttttcagaaatatttataaggtatacaaaaataacacaaacaaacgtaaactttttctgactacctgccacatgccatatgccgtggaaattcaatgaacggccatacacatcacactctgtatgtgaatttgaaacaaagtttctgaacataacatctgcgatttatcaacttgaattttcatgcttgaccgattaattcaacagagtttataaacaggcagtgaattgagcagtcttataaataggacattactcattgtaaggatctgagccctggtctcgattcttctaaggaatgaactgtggatgacattcataataataatttgaattttcattgcattaatccaattttagcgtaagatattatctaaaaacgtatgcatcttctatcaatcaataacagaaatcattatgtacttaagtacttagtactccaatggcagtttctcaaattgaaagatgtggaacgcaggtgtctgaaacattcagacaacatgactgtgtatgggcatggcattggttgaacctttattagcagacttggccccgagttgtttgaattcggaacgataacctttgcgaaggcaatttcaggtgtttacaaacagattgctgctcgtttatttcggagttttttaaactttagtgggtaaatgacctttgtccttagtggtctttcacttcacaatttattcttattatctttaagattccacgcttgttgaccttacatacaataagtaagtaaggtaagtacatagtttaaaaaaggaaacattttgtacttatgtgtataaaaattaagtacttactatgatctcagaaaatcctttaccatggtactgatacattctccctgagtgatataggcttcgcacgagaaatcaaattacaggtaagtaatgcgaatctcaatcgtataaataaattactttcatataaagttctaaaagagctagatataagataccagaaaaacttgggcaagtacacagacctacctaaaattatggaaatgtattctttttctaggtctctctattacctaagtcacgaactaacccaataataatgtatgtcctaaaaaagtacaagtaattcagttattatgtccttcacacgaaagctccagaacaaagttcccaattcctagcaccagccatcttggtgacactcaataactcggttacgatcgcaaagctcctttgggaaatttcgcaacagaaatcaaattatcctcagtatcggacagattcgggatgtcccaaattgcatattgacagcgacatgagctcatgttgaaaatgccgaacttctaaacggatttaagaataaaactgtaaaatgaatttctatagaattactcttatcaagttttagtactgaagcattcttagttaacgatactaatattgaatgaattacctacttcagtttgcatttctttaggtaggtaaatgggaaaccattttttttatttaaaaaataacattgttattccaccatggtcctacacaggtctagattgaatattgagatatgattgagaagtaaattattcacgacctactgaaaatttaaacaaaaagtacaaatatgtaactacttaatgattagaatcaatgcaaatagtagcagttcaaacacatacttttaatactttataggatgtgttcaacaacattaaactcgctgaaatagttttattgcggctttgtagattaaactatttcgactaaatccaattgaagctgccctatgttttcaaaactgcatacaaaaactataaatccatatttttagctacgttccaggtttactaattaacatttgacctaattcggtcttattgttaatcttctcagaaacagcgctaaaaataacctcagaacaaaaacaatatgctataacataaatatcctatgacatacctatcaaaagtacctccatagaggtaggtactcagtaaacattcggaatatgaacaagtttaagaaaaataaccgtaaaattattcgaaactattaaaaaatataaattccattttcaaaaagccactaacctgaacgcccttttcttctgtatcaggcatttcggctccacttttgaattaggagcgcgcgaaacttttttacttttttcttgttattttttttaataggtctggagcagcgactgcctgctgtagaggcctggagagcagtgagggccctggagcgggaagccgtactgatgagagggtgtgcgcgtattagaagcggaaaacgtttagaaacggccgacattctttcatatgtaaatataggaaaggtatatgtaaactgtatatggaatgttgttccttcggggatatgtggaattcgggatctatgtaatctttaaataaggcatcataatggtgatgaaagctatgttcatgttcgaatacacttatttcggttagagtctgtatgtgcactttgaaaatagcaagctgaaaataaaagtaggttacgtatacataaagttactcagacttcaggtaagtattagtacctacctatattggttttccaatattttcttgagttcattggattgagagatactaaattgacgtgaaacgagacgtctttcctattctatttcttaggaacttgcacttaggtagaatattctgcaaatcttgcgcgaatacatttttatacttacagtccgcagtgttatttcatttcaagtacctacttatatcggttatctttcactattttggtactataaaatgtggattcagcatttaaatgaattactttaggagtttctcagatttaacggtacttttctaaactgttcagaagttcagataaaacattagtgttgaaaagttatatacaatgtcttttgattaaattattttctcttatttttttacgaagatgtaccgaagaaggtattaaatgcagcaaggagttctagcaggaaggcggtgtaattagcggcgcggtgacccaattgccggttcaattgaatgaggtgcagcgcaaataggatccacgtctcacaaattgtgcgcgacggcgctgcaacgaggttttactgtttattggcattccatttgctgtactggccactgagaaaaacaatttgccaatattttttcaggactgtttaaattcttactggctaagaaaaacaaaattgccaatatattttttagtttaagtttgtgttgttctaaatgtttgttttatacctacataccaatagccttaccatctctattcttaagtcggaattaaaattgtcattgcttgactaatcattactgccactttaatttgatgtgagcattttcaaatagcaaatttccattgatagatactttaacaaaatacctatcaataattggtatgtaacgccacctacagttttcaggctgaatctttcagttataaatgtttcagtgcgtgtgaactatgaacataattccgtgtattaccactagacgccaccacatttccactgaagcattgggatctattttaaaactcttgtttatgtatttgtatatgaagtgaatgtaagatgccacttcatatataaatacatatgaagtgaatgtacgatgcgacatgtatttgtatatgaagtgaatgtgcattgcatattttgaaataataaagaggaacttagtttttatttatttcgtctgctaaatacctacgtttaaacttttttttattattacatttattttatttgtaggtaatacattgatactcatgtatattttgatatataggtaactactttatatgagctgacattcaacattttcaatgcatttagttagaaaatacacttaaaacagattatgaaattcataaaagtgaacgactgtataaacgtacctctaacatattggatgcaattttgtgagaatgctaattaccaatttataggagctatgtacttgtgatattgttacactaacatttacactgctgaccttgagatcaatttacgacgttgtttaccgacaatcatgtcttcaaacaatatacatgacaagtcgttgtttgagccaattttcatctggcgacgacattctagcgagggttccttctgtttttgaaatatagaagtcatgtaggccatttcagtacctatggaagcatggacttgggtaggtaaggtactgctcaatgaaaaaatagcaatgatagcgttgcattccataatttccatcctactgaaaattacgttttcagttgtaaaaccggcagtttagtacttatttcaaacacttttaattttttttgtatttatatgtggccgtacacaccgccgtaagaaactctttacattgatcattaaattaaagtcaatctcttcagtataactatatttacagatataatatgtattaaataacagtaaaagaaaataaaactaacgtttaataaagcttagattgattattattaactcacattggttacaaaatctcacttcacattataaaaagtatttatttattttctatattaattaagctatgggctgtttgagccacaaacctttgccacgtcgtcgagcgggaaaaaaagaacgaaagaaaaaaacaaaagaaaatcgggctgtgtgattttggcggcgtcggaattttttttcaaattataatttttttgtttattgttaaaatacgcaataataaaataacataaagtaaagagcgtaaacgcatgcgtcgagtaagtgtattattttgtgatttgacaatagtgcagacattgagaatacggatttgtgaaataaactagcgatcccacatacgccgctatgaagaagaactgtgcaaaccgagatttggggtgagttaagactacagagatacatatgataccttattatacccaacttctcttattgattaatcttttttttaaacacctgaggagacagctattctaccgggacatacctacctacttacttgtggttagggaatgcaatctcgtctcgccgagatctcgatctcgcgagatctcggccatattttacgagattgaatctcgtcaaattttgtacgagatctcgcgagataacgagatcgagaaatgcagcgtgacgacgtgtttttcatgcaaaatatgtgttttttgacaagccattttcagacaaataacttgcctttccgtaccttgataacttcatcttctactttaaacttattgtatttgattaatacgatctcacaacatttatttcaaacttgtgaagtaaaatttttgtttttatttataaacagtaatgttgtattactctgaaactaaagcaatacttaatatagatcatcatattgtataaacttgaacttattagctacagtagggacttataataattaggtatagacataaacaaatgttattagagttaccgaagagacgaccgaatggcgtagtggttagtgaccctgactactgagccgaaggtcccgggttcgattcccggctggggcagatatttgtttaaacatatttgtttaaatgtatttgttctcgggtcttggatgtgcccgtaaaatagcaataggcccgccccctattacattgggactaacataacactctggcgaaaagtgggtgcagcaatgcacctctgcctaccccgcaagtacaaagcgtgagtgtgtgtgtattagagttagagacaaaataataagt

SEQ ID NO: 38 - DNA, 21287 bp, unidentified
  variation 6272..6371: note = n is any nucleotide
  source 1..21287: mol_type = other DNA
  variation 11706..11870: note = n is any nucleotide
  variation 14108..15391: note = n is any nucleotide
  variation 1829..1969: note = n is any nucleotide
  variation 7484..8961: note = n is any nucleotide
  misc_feature 1..21287: note = Fanzor polypeptide
ttctatagcatccattatttttctcacaatcttattattaatgactaagtagctatatgaatcttgccagatctgcgaacacatttcgcgaaattgttgccatgtcatatcagtatttacatgctcattgtagacatgacgtaaatttatatcatcttgcttgaaaagaatgattatattagcattatcacgaattaattgttttggtattttactataagtttggttgaggtaaaaggcatctatttgtttgtgtctacccatcgcaaaatagtcacgaatattactttgactttccccagccacatcatcaaaaattataatggagttaggagaggcaacattcgggcttaaaacctcctcattatcgtgaaacttaaagtagcacaccccaggtacgcgcatcattactttttctaaaaatacataaataggctggtaaagggtttttgagtagacgtaaatattacgaaattttaatccatttgcatgtaacaacaatccgattactaaattggtttttccacaatttgatggaccacaaactaaacaacgaatcgtgttaggtaaaagctttccatgtcgaaactctttcttgaaatgctcgacacaaattttatcaagctgtaaagatgttggttgttttataaacttcatgattggatacacctataattagtgaagttgcttatttcatactgaccgttaaagtggtatgacagtcgcttttatctctgtataaaatcagtaagtaaggcatcgaaaaaaattgcttccgaatctagctttcgaccgtgcatcgttctaatgaacattgtatgattgcggcgttctagctcgctatcgatcgatcggagcggagcggcagcgcagcggagctcgatcgatagtgagttagaacgcccaattatacactactataaacaaaataattattaaaagcttgctctgaccagcaccgtattcggcctgggcaaacctgccagcaagtgcccctcgtgaagaggcgacctcttccgcacacgctgcctgttaccatggccagatgtcgacgcgctgtccgcgccagcaccagctcagccacttagtgcctgggcaactgccaggtgctgctgcttctgtcacgccgcgcgcaccgcccggctcgagcctccgcacagccgtgtcgccgcgccgcccaccacgggctaccgcaaccatgccgcggcgcgcaccgcaagtgcctcctccacgcacctccgctgagcagccccgtagccgcatccgcgacacggcccgcctccgcagacgtcttctccgcgcgtgagggttcccgcatctgcatagccaatttctttacattcatattcttatattcacacaacagttttctagtgatacattcaaaactggtcacgccacaggggctatttacgccacttagggctatataatcacgccacttgggctagtcacgccacttagggctataataattacgccaccggggctagtcacgccacttagggctatatagtcacgccacaggggctagtcacgccacttagggctataataatcacgccacaggggctagtcacgccacttagggctatatagtcacgccgcaggggctagtcacgccacttagggctattataataacgccactggggctaagtcacgccactaagggctatatagtcacgccacaagggctagtcacgccacttggggctatattaatcacgccacaggggctagtagtcacgccacttagggctatataatcacgccacaggggctattcacgccacaggggctggtaacgccacaggggctggtaacgnnnnnnnnnnnnnnnnnnnnnnnnnnnnnnnnnnnnnnnnnnnnnnnnnnnnnnnnnnnnnnnnnnnnnnnnnnnnnnnnnnnnnnnnnnnnnnnnnnnnnnnnnnnnnnnnnnnnnnnnnnnnnnnnnnnnnnnnnnnnnggtaacgccactaacgccacaggggctggtaacgccactggggctggtaacgccactggggctggtaacgccactggggctggtaacgccacagggctagtaacgccactggggctggtaacgccacaggggctggtaacgccaatggggctggtaacgccactgcactcgggctgtaacaacaattacaattatttctacaacaaaagattcagtcaactattgcacactgtcgcgcttatgaaaatggctagctaagaggagagaagagaaatgagaagccagggttcagcttgacacaaatttatttaaaggtcaacgtgtgggttaggcctacactacacgatcagtcagttcttagttggcacggatagggactcccctgattcgaagagtatcggcgtggaatcccgataacgcgaccggcgtggaagtcctcttctccagtggccaggtaggtaggcaggcaggtcacgtggccgttgcgtgcgcgtggcgtgtaggtcggctgcgcggcgtagtcagcaacacgaaggcagggggttgccgaaccagcacgtagagggcgagccgtagaaacacgtagtagttccgtgcagtaggtaaaccgtaccgtggaccccgatattggggaagacacgcacaaggcaccactggtaaagtctaggtcattcgacactttagagcgggctaggcacctagaggactgccgtgaggtagggtcacgcgcagtcgatgccgtagcccgtggacgaatgatcgagagccagtggtcaccgagtggggctgccgcgatagtggggacacgaacaaaagaccgcttcgctggctagggatgggaacgcgtcgataatttgaagaattatcgacgcgaagattaagttatcgataaagtcgatacttttaaaaagggaatttacaattaaattatgaagttatttactaatatgtaagttatttatttagaagaaataaataacgttacaacacccagctgtagcaaactgtaaatcacacatagccagaactttaataataacatcagacataaatccatcaacttaagggcaaggccttaagagccgctatccatggcaactttagagaaaaccaatcacctgcaatcactgaataataaatacaccaataatattcataaatcagaaaaccattttgattcacttgaacgttagtagcgcacaattgcaagcaaatacaaatcaataacccaaaattattcccttttaatcgctgatttctttctcctctcctcaatcagtaaacttttggtatcatatcacaataataccacacttattccgtaacacacgacacacttttacgcatttacttcacacacaggtttgtgtttggcggaggcttccccctcactcaccaagtcagtcctgtccgaatacgagcactttccattgagagccaccttacacaaatagcaattaaacatgttggttatctataatatatattattattatgcgtgtttctgtctgtccactataattattataatacatgtttcttcttctattttattgttcagtgtgtcaaattaatgtttctttctttagttctaataagtacctaccgtgtttttttttttcattttatcatcccgtgtaacttgtgcatgtactgtgttcagtaaataaacaatttatcttggaaattataaatgattctatttgatttgttataacactgcccatcaacttatggagtgatcctcccaagaaatcaggtttgcatccactccatcattcaaacatataagtcaaaagggcattacttaactctcaaagttatccaatgcaatatacatagaaccatttgctgtatgtatacaattatatatttttatgtttgaatattatacaatatacatacatgtgcacgaccatgcattcaacatttgagtattttgcatgcacccaatggaaatatttatactattttaatttccaactgctccccattttatattttattattacctgttagtgttatctagaagaaattactgtcaataatacctccgtaccctactattacattttaatttatgtaggtatctttcaaagtctacttgtgaaaaatagggttgtaatttcgaataaaggtgtattttgatttccatacatggcaaagctttctctagctctaatctaaataattttgtcaatatagcatgaactgtttaagtagtataccttacaccataaattattatgttaaaattgtctcttcatttagcactgtgagccattgtttttaaatatgaaagtaactgttcaggttcctcaaaccttcacgcgatggcgttcattctgataaatgtatcatcaatcccatgtattatacaacccacggccttcctccatgtaatagtaccaaaatattaaacaacttttttttttttgcaatagtacacagttatacaccctcaattgccacgagacaataacattgtttgtagctacagtttaatgaaaactcaacaatatagactgatggatgaaccaaataataccgcgatgtcgaatggtgacaacaccaccatctaatggaacacatatgaaattaaatcttaaaataaaacatccctgttataaatgacacagttgctttgcaagacccgataactttgccaacgcaacatgccaatctgcgtttcgttccacgattttattattattatttattttacccactcattcacttcaagtgtacatgtttcaatatttggcaagccatcactaggatcaaactaagataagtacgacatttatttaattcgttaattccctttaaatttccaagactattactaacataagaatatataataacttacaaaatacttactcaccaactaatcatctgatcttgtgcatccgattcattttcggattgcgcaaatatgatcacatttctgagtatcgagctcaattacagtggcttccaattcgccttcgccggaatactcactcaatcataatgccgcctcttatagcgattcattcgcaatgaaggcagcatgtttgtggaactccttgccagagggagtgcgacagtcaccatcaatggcaacttttaaaaaaaatgtcaggcatcactattttgaatcattaggttggcaggtaaaataggtatatatatatatatatatatatatatgtatttatatttatgtagtattatttatatataagtatgatgttatttttataagtatattttatgttgtaagtagttgtaatctatacaatgataatttaaggttaggtttaaatcataggctaagttcagtttgataattgtacctactcaaattagttaagggatctaatggcatttttctttcacccagtcgaaggttggctggaagaaattgctttttggcaataagcccgcctttgtatacgtttgtgttttttgatttgtaactgttctcttttatgtttttatttgtatgtgtacaataaagtgtataaataaataaataatcattcaacaaagatcaaaattacacaaccatactatactaataaaatccgagatcgcatgtagatattgttgctttcacatgttattccttatctatgccaatttaattcagccttaacaaacaataattgttcaaaaattcacgaaataggtactagcgaataacgatcacgatttcattgatttcaaagtagcttacgttgcgacacttacaacttacgactgacaatgattttaataaaaacgagggtaaactatcgctacttgtaggtactacgacgtcgcatagctttgattcatgtcgttatacctactcgtgatctgcttcgcctattggatcccatacctagcttcaattcaggcaattaatattttataacaactttctttcaactctcaatttagaatattaaaacacgataacagtgtaaaatgtaagtataagtaggtattaatcgagaggttgattagcaacttaaaatgaatatttacttatacctacatgcttatacttacttagcaacctaaaccataaatacctagatgggtacgttatcacgacacacaaagaacctaaaacaacacgcagtgtacctaacacgtaacgatgaacagcttataaatgaactcaaatgataaaataatggaaatgtcaaagtaacatcatgaactattttttttcttaaataattttcaggattcatgaaccctgaaccacatcacattttacacacacaaacactttttaaacgcacacgtcttggtgctctctacggtnnnnnnnnnnnnnnnnnnnnnnnnnnnnnnnnnnnnnnnnnnnnnnnnnnnnnnnnnnnnnnnnnnnnnnnnnnnnnnnnnnnnnnnnnnnnnnnnnnnncgccggcgcctccgcacggcccggccggcccccgccgcgcaccgtgaacatacctactccaagcggtcaccgaccccgcgagtaaaagcgtatggggatgttccagaatcccaaatacgagtaacttacaatctgttcagttcacttatagttgactgtaactgtatgctccgaaattaaatgtataagccttgattatgaacacaaccagtaagtaccagtgtttcgcgatcacttggtaggtattggcatcataactttcacgtcacttgtggatttacgaattaataaaaattggaacgcactgacctctagtctcacgttcagataggtattttccatggaagtaattatggagcttttcccttttcactagtcaggaccgttcgtgcgacttctgactgttgacaaatccgatagggagggtgcaccaatattaaactcacttgttaccacttacttatttattacttttacaacattttcacctgaacattccacacttaatcagaaataataataattgttttgctcgaccgcaaaacgacaacaagcgcgcatatcaagatggcggatcccggaagtaacttcctctattttaatcacagacaaaccatagacaatgggcgatcacagaacagatgtcattcccagatctcagaataataatgtaagaccaaattacaaagtaagatcattacaatggaaaagatcattacttatttaatacaattgagatcataaaatccagtttgtttacaatatgcactcacaactgtaatccccgaaggggtagtcagaggtggctcacaagcgagttttcgtagcacatttttgtactcccgtgataggttgcgaaccatatcgccgttttgggataagtacaatgcacttaggatacacatctagaatctagatgtgcaggtttcctcacgatgttgtacattgtaactgacttatttaatcaatatacgttatatcagtattccaaagcggtggttccttattttaaacaccagaaacaacagaaatataggacaaaataatacttacttacctacgcaaattaggccgctacatgctctggaccttacgagccatatatttacaagnnnnnnnnnnnnnnnnnnnnnnnnnnnnnnnnnnnnnnnnnnnnnnnnnnnnnnnnnnnnnnnnnnnnnnnnnnnnnnnnnnnnnnnnnnnnnnnnnnnnnnnnnnnnnnnnnnnnnnnnnnnnnnnnnnnnnnnnnnnnnnnnnnnnnnnnnnnnnnnnnnnnnnnnnnnnnnnnnnnnnnnnnnnnnnnnnnnnnnnnnnnnnnnnnnnnnnnnnnnnnnnnnnnnnnnnnnnnnnnnnnnnnnnnnnnnnnnnnnnnnnnnnnnnnnnnnnnnnnnnnnnnnnnnnnnnnnnnnnnnnnnnnnnnnnnnnnnnnnnnnnnnnnnnnnnnnnnnnnnnnnnnnnnnnnnnnnnnnnnnnnnnnnnnnnnnnnnnnnnnnnnnnnnnnnnnnnnnnnnnnnnnnnnnnnnnnnnnnnnnnnnnnnnnnnnnnnnnnnnnnnnnnnnnnnnnnnnnnnnnnnnnnnnnnnnnnnnnnnnnnnnnnnnnnnnnnnnnnnnnnnnnnnnnnnnnnnnnnnnnnnnnnnnnnnnnnnnnnnnnnnnnnnnnnnnnnnnnnnnnnnnnnnnnnnnnnnnnnnnnnnnnnnnnnnnnnnnnnnnnnnnnnnnnnnnnnnnnnnnnnnnnnnnnnnnnnnnnnnnnnnnnnnnnnnnnnnnnnnnnnnnnnnnnnnnnnnnnnnnnnnnnnnnnnnnnnnnnnnnnnnnnnnnnnnnnnnnnnnnnnnnnnnnnnnnnnnnnnnnnnnnnnnnnnnnnnnnnnnnnnnnnnnnnnnnnnnnnnnnnnnnnnnnnnnnnnnnnnnnnnnnnnnnnnnnnnnnnnnnnnnnnnnnnnnnnnnnnnnnnnnnnnnnnnnnnnnnnnnnnnnnnnnnnnnnnnnnnnnnnnnnnnnnnnnnnnnnnnnnnnnnnnnnnnnnnnnnnnnnnnnnnnnnnnnnnnnnnnnnnnnnnnnnnnnnnnnnnnnnnnnnnnnnnnnnnnnnnnnnnnnnnnnnnnnnnnnnnnnnnnnnnnnnnnnnnnnnnnnnnnnnnnnnnnnnnnnnnnnnnnnnnnnnnnnnnnnnnnnnnnnnnnnnnnnnnnnnnnnnnnnnnnnnnnnnnnnnnnnnnnnnnnnnnnnnnnnnnnnnnnnnnnnnnnnnnnnnnnnnnnnnnnnnnnnnnnnnnnnnnnnnnnnnnnnnnnnnnnnnnnnnnnnnnnnnnnnnnnnnnnnnnnnnnnnnnnnnnnnnnnnnnnnnnnnnnnnnnnnnnnnnnnnnnnnnnnnnnnnnnnnnnnnnnnnnnnnnnnnnnnnnnnnnnnnnnnnnnnnnnnnnnnnnnnnnnnnnnnnnnnnnnnnnnnnnnnnnnnnnnnnnnnnnnnnnnnnnnnnnnnnnnnnnnnnnnnnnnnnnnnnnnnnnnnnnnnnnnnnnnnnnnnnnnnnnnnnnnnnnnnnnnnnnnnnnnnnnnnnnnnnnnnnnnnnnnnnnnnnnnnnnnnnnnnnnnnnnnnnaggtaactgactgaatttcttccgggatccgatgtaatgtgaacactctgtccggtgtccggttttcggcagatctgccggtccggcgtagtgggaacgctgcctaaggttaaacttagcaatgacagagtcgttagggttatcccgggtccggcatttttgccgagcccggcatttctaccgaacgttttgtcactacgaattgccggtagaacgaccgggcccggagtaatgtgaacgagtttgtgccggtatctgtcccccgctcgccccgctcgtgctcccctcgccccgcccgtgttccactcacgtcattcggctcgcatgttctggtaaaagtagacgtttagcatggatattcaagcagaaactttaattacgcttgtccaagagagacctgttctgtgggataagaccgaagacgtctataaagacaaaaacttaaagttagcagcatggcgtgaagtatgtttaatactgaaaccaaacttcgatgaactggatgagggtgtacccaatgttttcttttattttgccttctattaagataccaccacaacacaacaatttcgtcgtccattgtgtgcgcaggtccaaattcaactgaagactgtctgaatttcttccgggatccgatgtaatgtgaacactctgtccggtgtccggttttcggcagatctgccggtccggcgtagtgggaacgctgccttacagttaacattttactgtaacgtgttgcaccatcaaatcgtcggtcattgttaatgttattagggttgctattcgtttgagacataattatcgccaaagttatgagccgttttccttgacagctgtcagttgagcttttgggtaagccgatagatggcgtgaaaacgcagtgtaccaactgtcaaaaattacatagagagcaaagagtactaaactcagaataagaactcactagttgtgattaaatgtcgggtggtagcgcgagccatccttccgaggctcagactgcatgtggcttgggatagtgctaagtattctgtgaatagttctacccgcgccgtcacgtagtgttcttttctctatgcgcgccgtttgaacgggtgctgcgtgcgagaactgattttctatttttgttgttgtttcatgatgatccacaattggttattgaacatctaacaaacaaattaattgaatcattagagagtagtaaaacagttagatacttgcctaaatcccaaagaacaatcaagccttggataacgccagggattctacgatgtattaaaaataggaacaagatgcaacaaaagctaaaattagacagtgaaaataatattaagataattacgtataaaagatacagaaattattgcggtaaacttataaaaaacttaaagcgtaaatatgaaaaagaacaattagacataagctcaaaaaatccaagatctctatggaaagccataaattctataacacattttaaatcaaacaatacatccaataataatttaataaatgtacaatcttctcctgatgaatccgttaactacgttaacgactttttttcctccgttgggaaaaaacttgcagaagatagcttctctactattccaacacaatttcatacacaaaattgtctgaacacaagtactcatcaactttcctcttttgttcttttggaggcagatgaccaggaagtggagaggattctaatgaatctaaaacccaatagtgccccaggatgggatggtgttccgactaagtttctaaagttggcaaaacacttagttgtcccaatcattagtcacttggctaatctctgcttccgaaccggagtttttccgtcataccttaaaaaatctatagttactccggtgcacaagggtggcaagacagacgatgtcaacaattataggccaatttctgttttaacatccatttctaaaattattgaaaaacttataaatgtacgacttttagagtatctacaaaaatttaacatattatcaaactcgcaatatggcttcaggcaaggtaggtctacagaggatgcaatattatcactcacatctttgattactgagcaactagaccaagggaaaaagtgcttaacggttttccttgacttaaaaaaagcttttgacactgtaacgagccgttaccaaaccatccaccgcacctacccacataccgaagccacaagagcgcccgcgagtcgaggtggggcaccacacaggcgactccggagaatacaaggggcgcggggcgacccgcctataaataaccgcgagccggccgtccgaccaccattcgtcacctcctgctccggcgagtgatcagtccgttcccgagatccttccccgcacctatatctatttaagtatctgttcacgcacactattctcactacaccgtcctccctacgctgtgggtcgcctactagcggatcgaggttccccggaatacacggacgcctgggtcgcctagtttaaagcggccgtgtaccgaactatacaatcgctgaacacacatcggccctcagccacacgttcttatcaacacaactacactccacaaatcctggaacaaatccacacgtaccaccggtattcgcccgacctcctgtaccctgtatttcttccccttattaagatagaaacatccgcgtaggccccttcagggcccgaccaatataaatatcaataaccgtgataagtatttgtgcatttgtgtagagtgttaatattaagtacnnnnnnnnnnnnnnnnnnnnnnnnnnnnnnnnnnnnnnnnnnnnnnnnnnnnnnnnnnnnnnnnnnnnnnnnnnnnnnnnnnnnnnnnnnnnnnnnnnnnnnnnnnnnnnnnnnnnnnnnnnnnnnnnnnnnnnnnnnnnnnnnnnnnnnnnnnnnnnnnnnnnnttaccggattgagaatcatttatttgaaatcgattaaaaaggtttgttatccctgaatttagtagcaagtgatgccatgctaaagaataaaataaagtaattaaaattaattcgatacaatggtcgtgagtcgtgattttacttaatattataaatgcgaaagtttgtgagtatgtgtgtatgtgtgtacctttgttacttcttcacgtcaaaacaactgaaccgattttaatgaaatttggaatggagatagctgacaccctggattaacacataatagcttatgtgttaatccagggaattccgcgataaaaagtagcctttttaacgcggaattcccacgggtaaactaattaagttgaagcgaagctcgtggcaacagctattatttttgtattacctacttcactcgagcaagtaaatatttagatttatgtttttctatgaaaacattaaaaaaaatattgcccttaaatggatcaaaattttaccttttttcggtgaagagcttatttagtggtatcactaatgaaatgtcagaattccgcggaattaaaaattagagtataagcatgtttttctttatatttctcagtaagttataatctcaaagttatttttactcactgtatttactcactgtattattattaaacactagattattgatataattaagtacctactagagatatgtaagagcggggcctcctgtcacaggttattacatagcctactaggttggtctcagcacttgattatagattgtgtaaaccattattgttaacgaaataaacatttttgatttttttgattttttgatttattgtatgatcctaaataagatcccaaagaaatacttacaagacaagatgagaatgtgtgccgtcgcaacttgtaaaaataaaggacatcataaatttccaaatgatgaaagccaggcgcaacaatggattaaggcgactcggataaatgtgcgaaaaattgattggaaactgcgaaaacattcatggttgtgttcggatcatttcataccaagtgattttcattcacgtaagtaagttaaatcattcgcggtaatgtaaattaaccattgttacataacatgatatattatgtaggtacctacctatctaacataagcactcaaacaggtaggtagagttgcctaacatgacccaccaagtcagggattaaattcattaaaaaggatttgagctgcatgtaggtacttatagcttttcacattttatatgcactaggttgcttgctcagtcagtacctgtacctatatttatcatataacttaatttattattaatcacttgcttttctttcttacaggtggcaaacaaatagcattaaagaaaactgcggttccttcaatattttcttggactacaccagaaaataatactacaattctacctacctacgtcactttcacatttcgttagcctcacagaataacatattgtgatctgagtgtgttctgaggttttgaaagttggtccaaccccagacaacgccatctatttctccaaaaaggaactttttttttttttaacaaacgcctcattgtgggaaacgtttttatgtaaggcaataccaaatctagctgtcggactgaagccgccacagagtacattgtagccgtcattctctgtcaaagcactcaaagtcaacatgtcataggaactaagtctgttgttcctccaaatattgaccaaaagattatcatcaatgagccgttttccttgacagctgtcagttgagcttttgggtaagaggatagatggcgtgaaaacgcagtgtatcaactgtcaaaaattacatagagagcaaagagtactaaactcagaataagaactcaaactcaaactatctcaaaagagtcactatctcaagtgcactaactctacagtatcaagggaggaggagcagatagctcaaatacaacacaattaatacaggagaaacacaaggaaactgagaaaacttgaaaagaacggctgtacgcacaatcgcactgaacgctgaagcaacagtgacatcgacatcatagagaaaataatactacaattctacctacctacgtcactttcacatttcgttagcctcacagaataacatattgtgatctgagtgtgttctgagggtgtgaaagttggtacaaccccagacaacgccatctatttctccaaaaaggaactttttttttttttaacaaacgcctcnnnnnnnnnnnnnnnnnnnnnnnnnnnnnnnnnnnnnnnnnnnnnnnnnnnnnnnnnnnnnnnnnnnnnnnnnnnnnnnnnnnnnnnnnnnnnnnnnnnnnnnnnnnnnnnnnnnnnnnnnnnnnnnnnnnnnnnnnnnnnnnnnnnnnnnnnnnnnnnnnnnnnnnnnnnnnnnnnnnnnnnnnnnnnnnnnnnnnnnnnnnnnnnnnnnnnnnnnnnnnnnnnnnnnnnnnnnnnnnnnnnnnnnnnnnnnnnnnnnnnnnnnnnnnnnnnnnnnnnnnnnnnnnnnnnnnnnnnnnnnnnnnnnnnnnnnnnnnnnnnnnnnnnnnnnnnnnnnnnnnnnnnnnnnnnnnnnnnnnnnnnnnnnnnnnnnnnnnnnnnnnnnnnnnnnnnnnnnnnnnnnnnnnnnnnnnnnnnnnnnnnnnnnnnnnnnnnnnnnnnnnnnnnnnnnnnnnnnnnnnnnnnnnnnnnnnnnnnnnnnnnnnnnnnnnnnnnnnnnnnnnnnnnnnnnnnnnnnnnnnnnnnnnnnnnnnnnnnnnnnnnnnnnnnnnnnnnnnnnnnnnnnnnnnnnnnnnnnnnnnnnnnnnnnnnnnnnnnnnnnnnnnnnnnnnnnnnnnnnnnnnnnnnnnnnnnnnnnnnnnnnnnnnnnnnnnnnnnnnnnnnnnnnnnnnnnnnnnnnnnnnnnnnnnnnnnnnnnnnnnnnnnnnnnnnnnnnnnnnnnnnnnnnnnnnnnnnnnnnnnnnnnnnnnnnnnnnnnnnnnnnnnnnnnnnnnnnnnnnnnnnnnnnnnnnnnnnnnnnnnnnnnnnnnnnnnnnnnnnnnnnnnnnnnnnnnnnnnnnnnnnnnnnnnnnnnnnnnnnnnnnnnnnnnnnnnnnnnnnnnnnnnnnnnnnnnnnnnnnnnnnnnnnnnnnnnnnnnnnnnnnnnnnnnnnnnnnnnnnnnnnnnnnnnnnnnnnnnnnnnnnnnnnnnnnnnnnnnnnnnnnnnnnnnnnnnnnnnnnnnnnnnnnnnnnnnnnnnnnnnnnnnnnnnnnnnnnnnnnnnnnnnnnnnnnnnnnnnnnnnnnnnnnnnnnnnnnnnnnnnnnnnnnnnnnnnnnnnnnnnnnnnnnnnnnnnnnnnnnnnnnnnnnnnnnnnnnnnnnnnnnnnnnnnnnnnnnnnnnnnnnnnnnnnnnnnnnnnnnnnnnnnnnnnnnnnnnnnnnnnnnnnnnnnnnnnnnnnnnnnnnnnnnnnnnnnnnnnnnnnnnnnnnnnnnnnnnnnnnnnnnnnnnnnnnnnnnnnnnnnnnngatttttcgcttaaccgatgctttgacagacgatgtgacgtttgtaatagttaaagttaaatggtgcaacgcacccttagtgtagtacgtgaaaataagttatgcactaattgcctacggttcggtcataatatagattcatgtaggttcgggccgtgtaaaataatgttcgaaaaaacataactcattaattcacagcgacgaatcagatgattgctccgtgaacttgaactccgtcgttgttcaggaaccggttcaacgcgccgccgccgccgccgccctgtcggtgcctgaaaataatgtgacgtcaccggccagtcccgctagtccatctataatcgtaaacaaagcacacatgcaagattttcacgcgcacacgaacaccatgtcttcacaacaggttctcttatctactgcgttagttgaaattattgacaaaaattgcgaaaggcaaaagtggcagccagcgatgttttgttactaaacaattatgcgattcattaaacgctataactatacagtccggtaggtaattcggtgactcaatgttcagaaacgtgtgacattgagttaaaatcgcgcatcaataagtacctaattacctacaccacgcgcatcaattgttatgtgctaccgcagataacatccaccatgccgcgtgtcttatgtaaacaaagcgtacataactacattccagacggcatcgtattagcagatcctgatttcttagactttaataggcgcagataagttttgggatctccttaacgacggtaaatttagactaaaaagcggttgttccttattttaaacaccagaaatataggacaaattcaatacgcaaattaggccgctacatgctctggtccttcgaactaaaaaccggtccttatttacagagtacaaaattaggttggataatttcaggccccatctacaattcgcacagtagtggcagaatacaatgtaattttactcaatcaatcgataggcaactaagacagttctgggagtttgaggagctgcccagagagcgacacgcgcacggacgaggagcgcgcgtgcgaggaacatttcgtcaacactacgacgagcaatagtgacggaaggttctggttctggtacgcatccctatgaaaaaaccggctacgaccttgggagacacgtattttcaggctgaacgtagatttttagcgctagaaaagcgattgcagcgctcgcctcaacataaagcgttatatagcgattttttacacgagtatgaaaggttaggtcatatgactcgcgtaaatgactacggatatccgaattacttccttacacgccacggtgtgtttcgcgagcacagcactagtacgcgattaagggtagttttcgaggctaatcaaccatcttcaactggtgcatcaataaatgatttgcagatggtcggctctacagggtgatctattctcgattttgttgcgcttcagacagcacaaatacgcgtcggtattatgaaatttaactttttcattgctcgcgtcgtcgacagctccaaactaagctactacactgctgcatactatgtcggtgagtctggtaaagaagcaataccgtaaaaaatgaacttaaatacgccatgtaagggtatgacttgacggtggtgggttgtcccccgatgatcctgttggcggggggcgcggggggtgcggggggctccctcacagtcaccgtatcctcacagcaccctgaaaacataattatatactaacctatacgtagtccatattttttatgagaacttcctgatcgcatgaaatgtatggatcgtaaattataaggttaaaattgacattaagtcaggtaaggtaatacagtatatatgtcgcaggcatctggtttaatctcctgtttgattgaaccgctagcccgttcattggatgacgctactcagttgaatgactaaagaacaactcgtcaagtggttgactgtaacgtccaacgtcttgactgaacgttattcagcgaagtcgttaaatgggatatagtatagcaactctataatgtctggttaggatgaacatgaccagacaagagtcaacaaaaagactatgtcacaaagctctcacctcacaaattaactaaacaataacaataaatgtaccttgatattgttgttcataattatccagtttcagcacatttttttctttgaaactatccgcctgcggtgtaataataggtaaatccatgttgtcacactattttaacataaataacgcactttaaagctaatttatttgcaaaaaataacaatacaagtgctttttgtgtcagctgttcgctgttagacgccatatttgttttattcaccacctgactgattttaagtccgctaactagttggacgttttgtgacgcttgtacaatcaccgttcggccttgtcatacaactgaatagcgtcatccaatgaacgggctagcggttcaatcaaacaggagattaaaccagatgcctgcgacatatatatataatgttgaagaaaaaattctcacccttttactaggggttgaccgtaccctataggtaataaagaaatagcgattcttatactttttacatagtttttgataaagtgtatacctgcctatagaaataaaaacgggcaaggttacattttttccctttaaaaaatgaagggggctaagtataaagtaccacaaagacacatatagataggtatagatatctacccaattttactttaccatacttaactaccgtaaataataaagcttaccatagtaaaatagcacagtcataattagtaacttcatactgaaaaccatcactttcctgtttatttcctgtctcaaaagtaagttaaaattgggatggccaagccatggccatcgcaattttatttattgcagctttttaacttgtctacggcgaagcaatgaggatggatataacagtacaaggtgttgcaatagtggtaaataattatagtaaaggtgaaaatctacaactctttgtgtcttatctatcatttttaacacactatattttcctacgctttgtaagttgctagttgctaggaattgtaacataagtaagtactgaactgatacagatacatcgtcgaatatgccagtaggtaaaaatatataactgtaccgtcttgctcgtttattgttaatctaaggtctgtacagtaaaatatgggaaattttattatgatttatattatcctaacttaatattataaatgcgaaattactgtgtctgtctgttactctttcacgccaaaactactgaacggatttgaatgaaatttagtatacataggtaaggtctagactctagaccctgagaaagaactaggctactttttatcccggaattcccacgggataactttttaaggcgaagcgaagctcgcgggtatagctagtacttaatataacaatgtttttttacaacaccgctgtgtaaattttatttaaagtaaatgtagctattaatggtccccttaagacccttagctttgcaagtgaactctagggcacaacaaatatgtaaaaagtctcgcatatttctacatacgtcttttaatataccttcttatgatttctatacgtaccgacatagtattaatttacaatagtgggcaaaggaaagatataaaaaatcataagttgttaaaaatacatttaatttcaataaataatgtcataatttcgaagtcatcatcaagttaaactacctgacaacagttgcacgcaatgagtctgagtcaccccttttcaggtaactatatacctaccactccggcaacatcctatatgtacctacataataataagaaaagaaaaacattataaacagaaatgtaaaacttttgtaagtacctaaaaaatcactttttaataaaaaattataaaaatatgttaaaaaactttaaattcgactgtgagaccggccattgtgccgccatctggatatatggtgccagataatgcgtctgtcgtcgctattggctgggggaggactgttgtgagtatatttttatatactttcagtcagctcaagagtagtttttatgtatgcataaatttatctttagtcgtaaaagtagtcagtaaaagtagacctttacatcagcttataggtagagccaagtagttacgtaaacagaaccaccgaccctgatctgctcttctctcttctcaggaataatttgggataaagccaatgagttcaaaaggatttagtaataagtatataagtcaatggataaagctaacattcatgtcaacctgtgtccatgtgggcatgatattgacaatatcgtgcctatccatgtccgatgctctttaatcaatgaatacctacatattcgtagcacatttgtacacacgagataggttgcgaaccatatcgccgtttttggaataagtacaatgcactttggatatgtcgcaggcaactggtttaatctcctgtttgattgaaccactagcccgttcattggatggcgctgttcagttgtatgactaggccgaacgttgattgtacaagcgtcacaaaacgtccaactagttagctgacttaaaatcagtcaggtggggaattaaacaaacatggcgtctaacagctaacagctgacacaaaaagcaccaatattgtaagttttttgcaaataaattagctttaaagtgcgttatttgtgttaaaatagtgtgacaacatggatttacttattattacgccgcgggtggatagtttcaaagaaaaaattgtggcgaaactggataattatgaacaacaatatgaaggtacgtttattgttattgtttagttcatttgtgagataagagctttgtaacatagtctttttgttgactcttgtctagtcatgttcaccctaaccagactttacaaacttgctatactaataatgtcctcctagccgaatttcgactacggcggccaatctcatttgagatcagccatctacgcaggagtagattatagtgcccaagtgtgtgcgcagtacacaggagcactctctgttccatcactctcatagcccaatgggacggattgaccgacacgactggagagagctaggcgcaggaccgactgctttacatgcccatccgacagcatggatcgtttcactgtttcggacaacaggtgatcagccttctatgtcctaaccaaacttagaaccacaatttagaaacacaaattgatggtcccacccgggaatcgaacccgggaccactgggtcatgaagcgaagcttctaccactagaccacagaggcagaccacacaaacttgctatactatatcgcattcaacgacttcgctgaatgacgttcagtcaagacgtcgaacgttacaatcaacgacttgacgagttgtcctttagtcatacaactgaatagcgccatccaatgaacggcctagtggttcaatcaaacaggagattaaaccagatgcctgcgacagatacacatctagaatctacatgtgcaggtttcctcacgatgttttccatcaccgtaagagcacgtggtattatgtgtgtacttaaactccttaattgaaaatacaattgaaagaattcattggtacaggccaggattcgaaaccacgccctctcgattgcgtggacgaggccttatccattacgccaccaccggcctattctttgatcaagttacgtatatacctaagtacctacctacctacccaccctacacccatcaagagcttaacaattccactataactttatccttatctccaggagaacatagcttcgtcagtgtcgccgagcctccgccacgtgagcgtgcgtaaagtgagccgctcagagtgcgccgctcgctacagcgcac

SEQ ID NO: 39 - DNA, 12633 bp, unidentified
  variation 10767: note = n is a, c, g, or t
  misc_feature 1..12633: note = Fanzor polypeptide
  variation 11054: note = n is a, c, g, or t
  source 1..12633: mol_type = other DNA
gcggttctttagcccgttcggcatggtcgacaaaggtgacagcaatccactcaccacaggcagagtcatacacgacctctctcatccagaagacggctccgtgaacacacatacaatccaggacgaagtctccaagacatcgttcgaacattgcttcagtatcgcgtgagaagtgtgtcatgccgttgcgcctaccccaggcacgacgtcaaactcacgtccagcgacgttgtcacagcatatcgcaacgcgtgcacacacagtggatgcgtctacatgtccgccagccacactctagaagataaaggacgccgcccaccgttgacaccgtgagtgctatcaccactgcacaaccgcgtgacgcttccccgtcccctagagcgcaaccaacatactttaaccgcgggaagcctggtcatatcaaacgctactgtaagcagccatcgaaggaggaagtaattgttgctctaccttttagaacgacaccaaatggagtgagtctgagaaagtggaaacttgacagcggctctagccgtcatgttatcgtgaaccgcaacatactgagagatgcagtcatgtgtgacgatggtcaatgtgctgtacccaataacagcactctggttatgacttggaaaggcacgacgacgctgacaactttggttaatggtgtaccttgagacgtgaatctaactaacgtgtattacgcataccctagaatgtgatatcatttcggaaactcgatcgccttggctgcgaacttcgttatcgccgcggcgcccgcgtcatggttcgcgtctcggatggtttggaaattttcgaagctgatctcgaatcgaataactttcttgttgtccgtggttcaccaggcagcaaagaacaggctctacttggtgcaatcactgcggcatactctacgcctcctgatgaaccacaacgcggatcgttgacgcactttcacgaacgttttgaccacctcgattttcgcactatcctgcccatggcggccagccccgagtccggtattgtgcttgcggaccgccaccaggaggcgtgtagaacttgagcggaaaccaaacaaactcggaatcctcagcctcaacgcgactccggccttcacgctccgattgatcgtgttagcgccgtcatctgcagtgacattaaatgccacatcacacctcgtgatcgtcgaggaacccgatacatcatcgatttcattgatcatcaatcaaacaactgtcgcattttcgttgctaaaacgaaggatgctgccgcccgcatgtttaagacttttatcctctggtttgataaccgctttgattgtcacgtgtattacttacggaccgacggtggttgtgaatattgcacagttgacatcctctgccagaataatggcgtcgctcgacagatcagtgaagccgacaaccaggcttcgaatgaaaaggcagagagattacatcaaaccgtgatgaatatggtgcgagctatgatttttggttctggtttgcccttttacttctggggaatgctgtcgaaaacgcatcctatgttttgaatcgcagccacacgaaaagcaacccgaaccgtgcgtctcctctcgaagtgctcactggcacgaagccgacctttacggacattatcgtgtttcggtccgcgtgcacagtttctgcagcccaaagaaaaactcgctgaagctcgcgctgaatcaggcaagattattggcaagtccgaggagactaaagactaccccattttctttccgaagtcgctcgccgtgtaaacgatccaacacgtccagaacatcacgactctctcttcgtctgccagtgatgcctttctcgaccgccgtcgctccgagactgatagtgcgtcgccatgtaccccctgcgacggcaccaatgtgcaacaggagccgtctgccctacggagaccgctgctctggaggcgacttaatttcgagaggaaactagcgctcggaaggagcctgaagtctgtgtcacaccgctcacacgtgcatcacccaacccctccgatgcggttgattcacagccttcgcctccttcaacacgtcgcacccgtctcagccgccgtggtcgtcgcggactgaagcccaatcgcacaacagggggaggtgatcatagcgacgctaatagtgaagtgttattgccagccaacccgctcactaccagaatggtgacccagtacggcggaaagaagattccacctcgacaaatagtggcccttctatacgaagcagatcctcgaaactgccgcgaggctatgcgcagtagcaaacgcgaagattggcgtatagcgacgaacaaagagctcgcgacactagaatacaatgaaacctgggaagtcgtcttgaagacccccgatatgaagcctttacagaccaagtgggtgtacaagacgaagaaggatgccaacggtgacaatgaacgtggcaagacacgggtggtcgcgtgtggaaacgagcaagagcaaggtatcaactacacattaaccttctccgccgtgatagatatgaccactggcaaggcgattctcgttctagctcgcatctgggacgtacccgcacgtcacggggacgtaccaaatgcgtacgtcgaggcagccactgaaaacgacctagaaatctgccaatacgttcctcaaggaatgcatattgattcttcaatcctgttacaactgggagctcgcagtccacgcgaagttgttcttcggcttaagaaaagcttgtacgccctcaagcaggccggtcgcttgtgtaataaacggttacacacaacactgctcaagaaaggcttccagcaatgcctcaccgactcgtgtctctattgctgccgtgatagcaatggcatgacggtgattggcgtgtacgtagacgacctactggttactgctactagcacagagcgggttgatcgtgttttcaacatgctggggtgtctatctatcaaatatttgggcctcgtcagcaagttcctcgggatgcgggtccaatacgacgaagcagacaggtatcatctagaccaagcccctacaattgaggtgctacttcataagcacggattacatgacgcacaccctacacgcactccgatcgaaaccaactacgacgaccaagacgaagacgatgatgaatcctacctacatgggataacgaaggcaccccatcgcaacctacagtccgacgtttctagtcactagttagtagcttgctattgcttgctcgttgcactcgcccggacatcggttacgcagttcacaaagcatctcaacgcacgcatgcacccacattacgagattggcgagtagcaaaacgaattgccaagtatcttaaaggatctgcggatgtcaaactgaaggggagtcctgcagcacacacggtccccttagagctttgcagctacagtgacgctgactatgctggcgataacaaggacagaaaatcgattacaggagcaaccttcttggtcaacggcatgacagtcgggtgcgtatgcaaaaacaaacggtagtagtgctctctacaatggaagcggagtttctggcagcctcccaccccggccaagaactgctagggcttcgagatctctttggggagctgggattgaatgttaaacacctcatcacgatgttaatggacaactaggcagccatcaaacagcatcaaagcgaggagagctccggccgggccaggcatatcgacgtgaagctcaagtttggcattgactacgcgaagaagggcctgttgctgccgagctacgtgtcaacgttgatgatgcaagccgacattttgacgaaagcctttcctgcaccgcgcctcaacgagttacgagagctgtgtcgcctcgccaacgatcatggcgatgcgcgcacgtgaggaaggagtgtcggaacggcaagtgtctgttgtagatactgacgtcactgtgcgcaacgtcgcatgtgcgatgtttaccatatcatatgtgtgctgtgcgcaacatcacatttgacggtaacgaccgaagaatcctcagggagcaggctgcatcttaatgcacttctctttattcctcttatcgctaaacatcgttctaacgtcattgatttggccgccgcgttcgggtggacaggaagtgccggaacttacggaattatcggaagtgcagtcgcatttttacacggttcttccaccaacgccgaccacgccgacgatttttataactaccactgggttgacgaccatatcaccgtgacctccgacagaggcacgaagtgcgcggacgtcgctcgatcattacggtgggcgatggctaccgtaatgggccccgctgccaccagttcacataatggagaacacgcctgaaagttctcggtttgatctttgacacccaatgctgaacggttgctatgccccctaccagaatcgcaaaagccaaactacttgtagagcatgccttcaaggcactctgccgcaaagagtaccgttccctcctgggatccctttgccacgtggccacaagcatatgggatatccacacattccaccagcgcctgcgatcctctgagctcaccatccccagagtccgacgaatcgaagtatcgctggacatgtgcgatgatcttctttggtggcggcgcattctagaatcacgcgcccttaccggagtgtcactcgaacatttcgaagccaggcctgagcacgacatcgccgtctttacagacgcatccgacgaagtcatctgcgctgtcgttccatcgtcacaactgtgcatcacttactgattatttgctccctcagaataggagcttatcgaggcgtaccaccgaggcgcgcccaacgagttcgacatcaactaccgggagctgttggcatgcgcgttcgcaagtcaggtgtgggaccacctgtggtaccagctccgacaccaggcaagtcctatccatgttcacttccgcattgacaacaccactgcggtatcctggcaatccacaatgtcattgtgcaactccggggcccagctactgatacggctcctcagcacgtgggaagtcgagttcggcctgcggttctcctcatcccacatacctggcgccgagaacatcctcgctgacacattgtcccggcggtgggggaaagaacagcacgggcattcattcacgaaactaataaacggttggtcacaggcaacgactccggcatcgatcgcaaacctcgaggatgtatggcacaacgtctccacgagccttctgttgcagtctcctccttcaagacatacaaacgagcgttcgacttcagtaaaggatggaccgcccgccaaggaatctgctggcacctcaacaccacgctagccgaacaattacaacatgtctcagacgtcatcatccatggtcatcaacgcggattcggctccaacctgcccatacagatccccacgatcagaatcgcgctacacggcatcctccacatcctacaagcagtgggctacgatttccattccattcatccacgtattcgcatggtcgtacgcggggttggacgactggatagaccaccccgacaaacggatccagtctccgtctccctcatagaagaatgcttcaattccctcgaccttcatgaccccgtcgaccaagctctctggggggttctgcgtctggccttcttcttcatgctacggaggtccgaaatcatgtcaacaacggcttcattattgcgttgattcgccctcaaggccaccgacatcatactaatcgacgcagtgggagatccgaccacatacccatgccgcattgtcgccgcatgcctcctcatccgttccaaaacagaccagagaggtgctccgaccacccggatgttgtcccgctcaggacacccattcgtgtgcccgttttcggggaattgctgctccaacactcgcgaggaaccctgccggcagaagtaccagtcgctgtattactcgacacccgaggcgttccaagaagtgtatcctccgtttgagtcgcaagtgcaatccagctcgcagcgcgcgtagcaggaatggacccacgcggatacagcacacagtcgcgcagagcaggcggcgccaccaacgtgtaccgcgcgggagttgacgctctgaccatccaatcccacggccggtgggcatcagacgtgtttaagctgtacactaggctgtataccgagtctgtcggcagcgacgcggtaaagatggtcagcgaggcagcgaacacaacagcactgcagtaacgtgctactaccacccgaacaaggggcacagcccgatctcacggtcaagctgtggcgcgatagctacacgttccataatctgtaactatgtctaatttgtccccaactctgtgcaaatttaaggaggaaatcgaggggttattgtcggcggtgagagtgctcgacagcacatctgtcgtagcgtggttactcacagcacctattccatgtttacggtgcgcgcggacgaggtcccgagctttttccgaagtgacattagaaaactgaaaaaccgaatatgtgggatccccacacttgaaaacttttctgtccggcggcgagttcgtggcaagtttcttggattattcaagtaatttgggagtaaactacgattgtggccgcggtagtggtggcgagttcttctgatgtcctccccgaggcttagcccctgtttgttctgaggtcgatctgtaattccctgcgtatccattaccactgccaccctatggactcggtttctgagggtaaaactgcttcaaagtaacagaagacctgcaccttgggtgtcagccaattgagaaagtttgaacaggcttgtttctggtcttcttcaactcagtgaagatggttgatttcagagctggggtctaagtccaatacagaggacttcactgaggtcttaggctcgtcaaacgggaagtcgtccatgccttccgcgtccagttccaaatgcaagtcggccaccaaccgggtcacacgagattcagcaaccaacagagtcgtatccatcgcgagactcttcatagcagtcgcaagacgggcgtaatccttggtattactgcgtctgacattaagaaagtaggtcttccacaactcctgagtcacctcgtgctccggtcgttgtagctggtaatcgcaaatgcgcataagtatcttgtgctcgtatattaacgccaggtccgtgccctaaacgacggtagtcgcggtattgggcagctcagaatgatgcctctcagctcgtgaattgagatagatagctgtccatgaaggccttcgtctcctgacgggaactgctgcgatagggcgggggagtgggcatgtatgcacccatatccaaggtcagacgaggcatgctgttttcgctggcctcagagtcatccacccgacagctgagccatcgcttcaacttggcgatcccgctcttcttgcagctgccggttttcttgaagagattgttgcagcgaaaaagttgatgtccgacgtgacagcgtcagctgttgctcaattaccgcatcctgcgccttctacccgatggacgagcgccgactcctcataagagaggccatcctgcagcacgactcctactaaagtattatttgttgtgtcgaacctgtgactcagactcccaaatgaaaaacactttaatcaaagaagtgagaagcataaaatctgcctgcttgctcagacggcctccctgtcgctgttctccacgacccgagtcaaatggaatcctagcagcgaatccgcaatcttccagtcttatcacgaggcagcagcacccattcaccaggcgccacgtgcttctaatcgccttgtcaccctcgtcaacggctagaagatgatggatgtcgtcagcagtttctgccacatgtacgacacgtagtttccttcagcgctggtcgccaactttcgcatctcacaccctcagtgtgtgaccagcatgatggtggtatgcaccaccctcgacagggatgaaccgaataccccacaggagcgcgagcttcgtgagtagctgggcgtggttcctagggagtgggcagtgcgtcagaacctcccacacgttatcatgaaggtgtacgacatgctttgctggatggagacatttgtggagacgcacccgaagacgaagggagctcgattatactctctcctaccgttctccagctcgttcgttactacacacatcacgattaatatgacatcactctttcatgtcttccaacggatctacaaagtcccagaagtaaataagtacgtggacgacgagctgcagacgggatgccgtacatcagaccgacaaatgttgacacagaatcgagactcaagtttttgcaagttgttcaagtagacgggatggagaccgctccctgattcgcactccaaataacgatagacgggtatgcggcttcagtgatgttgtggcgaagcgcgtggacaaattcgtggcgtcccacgtggcgtcccaagtcgtgtcgcaagtgtaatatttacggcgagcgtgatcattctggtgagcgcaatcattccgatgagccgatcccgatcaggtcgacatgtggtgcaatcattttgatatccctgcgtgtgaatgtcgatcccagcgaccgctgattagatcgacagtgagcaatcatttcggtacgcgatctacacccgattgacgcggtatcatcattatggcacggggcgatcgcatatattgtgggtacagcggagcgatcttttcgctacgggtaccacgatcttggtacaagggatcctgttcgagctacggtgtgatgcgcaatcgggatagggagagatctttagggcctttaccttttgggttaaatagattctgatttaccttgcaagacacaagtggcgtccatactttccggggaaggaactacattggcctacccgacgaaggactcaccaggtcaaccaaggacacgaatagcttggccggggtgcgatcgcatactctcatctcaactcaagatcccgccaagaggaggcggcaagcaacggaaagggccataacagcacaccccaacgacaaccccacgcgatcgacttgtcctaaggcccgatcgcagaccaccgatgaatacccgcgtggccgtcacccacccgctcccctgaaggagcagtccagctccatatttagtcttggtcaccaccgcacgtcttcccgtgaacatcggaagagcggaacccgccccgccgtagggtacacaaggtgactacaaggttacgatcacgcctgatcaacggagtaccccctccgatagtcggcagtccgggcgtaccgctggcaagcttgggtcgcatcatcgatttttgtgatcccactccgccacactgttgcgtcgtcaatttcttgacgtggcagacaccgtccatgaagacacggaaacggccccaaggtggaagaaacataagaacaacgcagggacagccgtcgacccaccagcctccgtgacaaagtgcgtcttcgacttggcatttgaaaagctgctcagtggatacgctcccgtgatcatgatcggtaccgaccctcgcatgatgaacctgtgcactgcggcgtgtgtcagccatctttcaactcgccggcagcaccggcaacacaaccgacaccgcaagtactacaacaagggcaagcataagcgcaagagtcgtcacggccaactgattgtggagattacaacgagagaatactaccatctggtcaagttagacaaacaacgattctggagccgcaagttgagaaagcgcgagaccaggtaccgcgagctgcttacagcgataccatccttcaaaaccgcggactacgacgtctacgtggatcgcttgctgtgctttctgcagtcctcgggcttcctgctattcattatggaccaacactcgttctgcaagtggcaattccttacgtacggcatgaagatgacgaccctgagtgtattggccaagcgtatcgtaccgacttgaagagcacaagttttgtgttgcgattagagattgaagctgccaagaggtctccggggaaatccgcacgggccgtataaggcgttcaggaaggaacttgagcggcgaggtatggtcctgtccatggatgagtttcggacgagtaagttgagctcctgcagtcatgagcgcctctaccaagcacagctgctgacgaaggtgaacgacaaggactccgagggggtcaagttcgtcatgaaggggaatagaaacgttttgcgctgtttgaacagtcattgcaatgccaacttctggaaccgggacgtcaacgccgcaagaaatattctggagcttttgaagtgcaaattactcagactggagaggctggcagcattcaagtggtggcaacccggtcggaaatgtgattgggaaggctgttgcactggcgtacgcagcgggcgtatcgcggtgcaacggggacccatacccaatcacacggtgtgaaggagcaaaattccgaggacagatgtaacgggatacacggatgtgtacccatgttacataaagagtgacgagatgtccctctttagtgtccatggtacgtggtaccggttggctgcgagccaaccattggacacttctatagcttttactatagttgacttagagtttgtatgattcaagcttggctcacctataaaatatattcagtctttaacctaccgtctacgtcgtagtctgttcccttaggccgggaactgtgaactagttgttcaccgagagcttccgctctctagcacttcctctgtgcaaggtgctgnattggacacttgtttatcttttactatagttgacttagagtttgtatgattcaagtttggctcacctataaaatatattcagtctttaacctaccgtctacgtcgtagtctgttcccttaggccgggaactgtgaactagttgttcaccgagagcttccgctctctagcacttcctctgtgcaaggtgctgtgtgccccatcacacttggtagcactcgtagtcaatctcgcgcctacgcgggtagattgaactacctgaatcctctgtggtctcaaagactgagcngtttgtatgattcaagcttggctcacctataaaatatattcagtctttaacctaccgtctacgtcgtagtctgttcccttaggccgggaactgtgaactagttgttcaccgagagcttccgctctctagcacttcctctgtgcaaggtgctgtgtgccccgtcacatatgcggtggcacgaagtgctacgcaacacacggctgagcgcgtggctaccttcttaatggaggatgtagttttgaagttcggtgcttttcgcgagctgctcacagatggagcacctgaaatgacagggcgagtgattgagcagttagtgacaacgttgcaagcaaagcagatgaaccctgtaccgtatcgcccgcagatgatcgggctggcagaacgttttcaccgttcctggaaggattgcgtaacaactttcatgagcgatgaacaacagaatgactggaccgaatgggtgcagcgtgcggtgtactcgtacaactccgcgcagcattccacggctgctttaagcccgaacgaattgatgatgggacggcgcttgcgtcctcctaacgaattgctgaggaggacttaacaaacagaagccggtgagctgatggagtaccatcgaagattgctgtctgcaatgaaacgaagccatgaatgtgccgagcgcgctcgcaagaaggagcaagccaggcaagctcggtattacaaccgaaaagtacgacaacgacgaacgtttggggctggtgataaagtatgggtgcacaacccaccgcgtggaccaaaagccaccaaattcgttcaccagtggatggggccgatgcgggtgattgagtctgccggttatgaaaattttgtactaaagcgagagggcaagaacgaacagctggagacgatgatagttcatgtctcatttatggtgagatatcagtcctcaacctccttgctgcaacaagcagccaacgacattaacaagcagttagaatatgaagatgcaagctaatcggcggacgatgtcgagacgacaagagcgactgcatacgcagcggcggctgttgatgacaagagcgacagcaagctctagaaaacgaggtcgcaatgcaatggcaggtacggacaacaagcgtgaagcccaccctgagctggtggagcttcaacgaagaagacgtcgcaaccgagttggccagtacatattgcaacacgaactctgaccaactggcgccggatggacacgtacggcggatggagaacggtggacgacgaaggacggacgatgggtcacgcgctgggtggacaataacgagtacgagcagctgtacgagggcggtagggtcgtggaagacccctgctttaaggaagtcgtgtaacatgatggctaacatgccaggccaccatgcggtacacgatggacggacggaggagagtgagcgagacgatcggacacgacaacgcgtcgaggcagaccaatagggccacggatggaaagatctcgactcagataaagggaacaggggacgaaaacgaagactgactgcagggttagctctagaatggatcatatacggaacggatcaggtttctgaacagacac

SEQ ID NO: 40 - DNA, 10692 bp, Phytophthora sp.
  variation 9194..9219: note = n is a, c, g, or t
  source 1..10692: mol_type = other DNA
ccgttcggcatggtcgacaaaggtgacagcaatccactcaccacaggcagagtcatacacgacctctctcatccagaagacggctccgtgaacacacatacaatccaggacgaagtctccaagacatcgttcgaacattgcttcagtatcgcgtgagaagtgtgtcatgccgttgcgcctaccccaggcacgacgtcaaactcacgtccagcgacgttgtcacagcatatcgcaacgcgtgcacacacagtggatgcgtctacatgtccgccagccacactctagaagataaaggacgccgcccaccgttgacaccgtgagtgctatcaccactgcacaaccgcgtgacgcttccccgtcccctagagcgcaaccaacatactttaaccgcgggaagcctggtcatatcaaacgctactgtaagcagccatcgaaggaggaagtaattgttgctctaccttttagaacgacaccaaatggagtgagtctgagaaagtggaaacttgacagcggctctagccgtcatgttatcgtgaaccgcaacatactgagagatgcagtcatgtgtgacgatggtcaatgtgctgtacccaataacagcactctggttatgacttggaaaggcacgacgacgctgacaactttggttaatggtgtaccttgagacgtgaatctaactaacgtgtattacgcataccctagaatgtgatatcatttcggaaactcgatcgccttggctgcgaacttcgttatcgccgcggcgcccgcgtcatggttcgcgtctcggatggtttggaaattttcgaagctgatctcgaatcgaataactttcttgttgtccgtggttcaccaggcagcaaagaacaggctctacttggtgcaatcactgcggcatactctacgcctcctgatgaaccacaacgcggatcgttgacgcactttcacgaacgttttgaccacctcgattttcgcactatcctgcccatggcggccagccccgagtccggtattgtgcttgcggaccgccaccaggaggcgtgtagaacttgagcggaaaccaaacaaactcggaatcctcagcctcaacgcgactccggccttcacgctccgattgatcgtgttagcgccgtcatctgcagtgacattaaatgccacatcacacctcgtgatcgtcgaggaacccgatacatcatcgatttcattgatcatcaatcaaacaactgtcgcattttcgttgctaaaacgaaggatgctgccgcccgcatgtttaagacttttatcctctggtttgataaccgctttgattgtcacgtgtattacttacggaccgacggtggttgtgaatattgcacagttgacatcctctgccagaataatggcgtcgctcgacagatcagtgaagccgacaaccaggcttcgaatgaaaaggcagagagattacatcaaaccgtgatgaatatggtgcgagctatgatttttggttctggtttgcccttttacttctggggaatgctgtcgaaaacgcatcctatgttttgaatcgcagccacacgaaaagcaacccgaaccgtgcgtctcctctcgaagtgctcactggcacgaagccgacctttacggacattatcgtgtttcggtccgcgtgcacagtttctgcagcccaaagaaaaactcgctgaagctcgcgctgaatcaggcaagattattggcaagtccgaggagactaaagactaccccattttctttccgaagtcgctcgccgtgtaaacgatccaacacgtccagaacatcacgactctctcttcgtctgccagtgatgcctttctcgaccgccgtcgctccgagactgatagtgcgtcgccatgtaccccctgcgacggcaccaatgtgcaacaggagccgtctgccctacggagaccgctgctctggaggcgacttaatttcgagaggaaactagcgctcggaaggagcctgaagtctgtgtcacaccgctcacacgtgcatcacccaacccctccgacgcggttgattcacagccttcgcctccttcaacacgtcgcacccgtctcagccgccgtggtcgtcgcggactgaagcccaatcgcacaacagggggaggtgatcatagcgacgctaatagtgaagtgttattgccagccaacccgctcactaccagaatggtgacccagtacggcggaaagaagattccacctcgacaaatagtggcccttctatacgaagcagatcctcgaaactgccgcgaggctatgcgcagtagcaaacgcgaagattggcgtatagcgacgaacaaagagctcgcgacactagaatacaatgaaacctgggaagtcgtcttgaagacccccgatatgaagcctttacagaccaagtgggtgtacaagacgaagaaggatgccaacggtgacaatgaacgtggcaagacacgggtggtcgcgtgtggaaacgagcaagagcaaggtatcaactacacattaaccttctccgccgtgatagatatgaccactggcaaggcgattctcgttctagctcgcatctgggacgtacccgcacgtcacggggacgtaccaaatgcgtacgtcgaggcagccactgaaaacgacctagaaatctgccaatacgttcctcaaggaatgcatattgattcttcaatcctgttacaactgggagctcgcagtacacgccaagttgttcttcggcttaagaaaagcttatacggcctcaagcaggccggtcgcttgtggaataaactgttacacacaacactgctcaagaaaggcttccagcaatgcctcaccgactcgtgtctctattgctgccgtgatagcaatggcatgacggtgattggcgtgtacgtagacgacctactggttactgctactagcacagagcgggttgatcgtgttttcaacatgctggggtgtctatctatcaaatatttgggcctcgtcagcaagttcctcgggatgcgggtccaatacgacgaagcagacaggtatcatctagaccaagcccctacaattgaggtgctacttcataagcacggattacatgacgcacaccctacacgcactccgatcgaaaccaactacgacgaccaagacgaagacgatgatgaatcctacctacatgggataacgaaggcaccccatcgcaacctacagtccgacgtttctagtcactagttagtagcttgctattgcttgctcgttgcactcgcccggacatcggttacgcagttcacaaagcatctcaacgcacgcatgcacccacattacgagattggcgagtagcaaaacgaattgccaagtatcttaaaggatctgcggatgtcaaactgaaggggagtcctgcagcacacacggtccccttagagctttgcagctacagtgacgctgactatgctggcgataacaaggacagaaaatcgattacaggagcaaccttcttggtcaacggcatgacagtcgggtgcgtatgcaaaaacaaacggtagtagtgctctctacaatggaagcggagtttctggcagcctcccaccccggccaagaactgctagggcttcgagatctctttggggagctgggattgaatgttaaacacctcatcacgatgttaatggacaactaggcagccatcaaacagcatcaaagcgaggagagctccggccgggccaggcatatcgacgtgaagctcaagtttggcattgactacgcgaagaagggcctgttgctgccgagctacgtgtcaacgttgatgatgcaagccgacattttgacgaaagcctttcctgcaccgcgcctcaacgagttacgagagctgtgtcgcctcgccaacgatcatggcgatgcgcgcacgtgaggaaggagtgtcggaacggcaagtgtctgttgtagatactgacgtcactgtgcgcaacgtcgcatgtgcgatgtttaccatatcatatgtgtgctgtgcgcaacatcacatttgacggtaacgaccgaagaatcctcagggagcaggctgcatcttaatgcacttctctttattcctcttatcgctaaacatcgttctaacgtcattgatttggccgccgcgttcgggtggacaggaagtgccggaacttacggaattatcggaagtgcagtcgcatttttacacggttcttccaccaacgccgaccacgccgacgatttttataactaccactgggttgacgaccatatcaccgtgacctccgacagaggcacgaagtgcgcggacgtcgctcgatcattacggtgggcgatggctaccgtaatgggccccgctgccaccagttcacataatggagaacacgcctgaaagttctcggtttgatctttgacacccaatgctgaacggttgctatgccccctaccagaatcgcaaaagccaaactacttgtagagcatgccttcaaggcactctgccgcaaagagtaccgttccctcctgggatccctttgccacgtggccacaagcatatgggatatccacacattccaccagcgcctgcgatcctctgagctcaccatccccagagtccgacgaatcgaagtatcgctggacatgtgcgatgatcttctttggtggcggcgcattctagaatcacgcgcccttaccggagtgtcactcgaacatttcgaagccaggcctgagcacgacatcgccgtctttacagacgcatccgacgaagtcatctgcgctgtcgttccatcgtcacaactgtgcatcacttactgattatttgctccctcagaataggagcttatcgaggcgtaccaccgaggcgcgcccaacgagttcgacatcaactaccgggagctgttggcatgcgcgttcgcaagtcaggtgtgggaccacctgtggtaccagctccgacaccaggcaagtcctatccatgttcacttccgcattgacaacaccactgcggtatcctggcaatccacaatgtcattgtgcaactccggggcccagctactgatacggctcctcagcacgtgggaagtcgagttcggcctgcggttctcctcatcccacatacctggcgccgagaacatcgtcgctgacacattgtcccggcggtgggggaaagaacagcacgggcattcattcacgaaactaataaacggttggtcacaggcaacgactccggcatcgatcgcaaacctcgaggatgtatggcacaacgtctccacgagccttctgttgcagtctcctccttcaagacatacaaacgagcgttcgacttcagtaaaggatggaccgcccgccaaggaatctgctggcacctcaacaccacgctagccgaacaattacaacatgtctcagacgtcatcatccatggtcatcaacgcggattcggctccaacctgcccatacagatccccacgatcagaatcgcgctacacggcatcctccacatcctacaagcagtgggctacgatttccattccattcatccacgtattcgcatggtcgtacgcggggttggacgactggatagaccaccccgacaaacggatccagtctccgtctccctcatagaagaatgcttcaattccctcgaccttcatgaccccgtcgaccaagctctctggggggttctgcgtctggccttcttcttcatgctacggaggtccgaaatcatgtcaacaacggcttcattattgcgttgattcgccctcaaggccaccgacatcatactaatcgacgcagtgggagatccgaccacatacccatgccgcattgtcgccgcatgcctcctcatccgttccaaaacagaccagagaggtgctccgaccacccggatgttgtcccgctcaggacacccattcgtgtgcccgttttcggggaattgctgctccaacactcgcgaggaaccctgccggcagaagtaccagtcgctgtattactcgacacccgaggcgttccaagaagtgtatcctccgtttgagtcgcaagtgcaatccagctcgcagcgcgcgtagcaggaatggacccacgcggatacagcacacagtcgcgcagagcaggcggcgccaccaacgtgtaccgcgcgggagttgacgctctgaccatccaatcccacggccggtgggcatcagacgtgtttaagctgtacactaggctgtataccgagtctgtcggcagcgacgcggtaaagatggtcagcgaggcagcgaacacaacagcactgcagtaacgtgctactaccacccgaacaaggggcacagcccgatctcacggtcaagctgtggcgcgatagctacacgttccataatctgtaactatgtctaatttgtccccaactctgtgcaaatttaaggaggaaatcgaggggttattgtcggcggtgagagtgctcgacagcacatctgtcgtagcgtggttactcacagcacctattccatgtttacggtgcgcgcggacgaggtcccgagctttttccgaagtgacattagaaaactgaaaaaccgaatatgtgggatccccacacttgaaaacttttctgtccggcggcgagttcgtggcaagtttcttggattattcaagtaatttgggagtaaactacgattgtggccgcggtagtggtggcgagttcttctgatgtcctccccgaggcttagcccctgtttgttctgaggtcgatctgtaattccctgcgtatccattaccactgccaccctatggactcggtttctgagggtaaaactgcttcaaagtaacagaagacctgcaccttgggtgtcagccaattgagaaagtttgaacaggcttgtttctggtcttcttcaactcagtgaagatggttgatttcagagctggggtctaagtccaatacagaggacttcactgaggtcttaggctcgtcaaacgggaagtcgtccatgccttccgcgtccagttccaaatgcaagtcggccaccaaccgggtcacacgagattcagcaaccaacagagtcgtatccatcgcgagactcttcatagcagtcgcaagacgggcgtaatccttggtattactgcgtctgacattaagaaagtaggtcttccacaactcctgagtcacctcgtgctccggtcgttgtagctggtaatcgcaaatgcgcataagtatcttgtgctcgtatattaacgccaggtccgtgccctaaacgacggtagtcgcggtattgggcagctcagaatgatgcctctcagctcgtgaattgagatagatagctgtccatgaaggccttcgtctcctgacgggaactgctgcgatagggcgggggagtgggcatgtatgcacccatatccaaggtcagacgaggcatgctgttttcgctggcctcagagtcatccacccgacagctgagccatcgcttcaacttggcgatcccgctcttcttgcagctgccggttttcttgaagagattgttgcagcgaaaaagttgatgtccgacgtgacagcgtcagctgttgctcaattaccgcatcctgcgccttctacccgatggacgagcgccgactcctcataagagaggccatcctgcagcacgactcctactaaagtattatttgttgtgtcgaacctgtgactcagactcccaaatgaaaaacactttaatcaaagaagtgagaagcataaaatctgcctgcttgctcagacggcctccctgtcgctgttctccacgacccgagtcaaatggaatcctagcagcgaatccgcaatcttccagtcttatcacgaggcagcagcacccattcaccaggcgccacgtgcttctaatcgccttgtcaccctcgtcaacggctagaagatgatggatgtcgtcagcagtttctgccacatgtacgacacgtagtttccttcagcgctggtcgccaactttcgcatctcacaccctcagtgtgtgaccagcatgatggtggtatgcaccaccctcgacagggatgaaccgaataccccacaggagcgcgagcttcgtgagtagctgggcgtggttcctagggagtgggcagtgcgtcagaacctcccacacgttatcatgaaggtgtacgacatgctttgctggatggagacatttgtggagacgcacccgaagacgaagggagctcgattatactctctcctaccgttctccagctcgttcgttactacacacatcacgattaatatgacatcactctttcatgtcttccaacggatctacaaagtcccagaagtaaataagtacgtggacgacgagctgcagacgggatgccgtacatcagaccgacaaatgttgacacagaatcgagactcaagtttttgcaagttgttcaagtagacgggatggagaccgctccctgattcgcactccaaataacgatagacgggtatgcggcttcagtgatgttgtggcgaagcgcgtggacaaattcgtggcgtcccacgtggcgtcccaagtcgtgtcgcaagtgtaatatttacggcgagcgtgatcattctggtgagcgcaatcattccgatgagccgatcccgatcaggtcgacatgtggtgcaatcattttgatatccctgcgtgtgaatgtcgatcccagcgaccgctgattagatcgacagtgagcaatcatttcggtacgcgatctacacccgattgacgcggtatcatcattatggcacggggcgatcgcatatattgtgggtacagcggagcgatcttttcgctacgggtaccacgatcttggtacaagggatcctgttcgagctacggtgtgatgcgcaatcgggatagggagagatctttagggcctttaccttttgggttaaatagattctgatttgccttgcaagacacaagtggcgtccatactttccggggaaggaactacattggcctacccgacgaaggactcaccaagtcaaccaaggacacgaatagcttggccggggtgcgatcgcatactctcatctcaactcaagatcccgccaagaggaggcggcaagcaacggaaagggccataacagcacaccccaacgacaaccccacgcgatcgacttgtcctaaggcccgatcgcagaccaccgatgaatacccgcgtggccgtcacccacccgctcccctgaaggagcagtccagctccatatttagtcttggtcaccaccgcacgtcttcccgtgaacatcggaagagcgtaacccgccccgcnnnnnnnnnnnnnnnnnnnnnnnnnnacaaggtgactacaaggttccgatcacgcctgatcaacggagtaccccctccgatagtcggcagtccgggcgtaccgctggcaagcttgggtcgcatcatcgatttttgtgatcccactccgccacactgttgcgtcgtcaatttcttgacgtggcagacaccgtccatgaagacacggaaacggccccaaggtggaagaaacataagaacaacgcagggacagccgtcgacccaccagcctccgtgacaaagtgcgtcttcgacttggcatttgaaaagctgctcagtggatacgctcccgtgatcatgatcggtaccgaccctcgcatgatgaacctgtgcactgcggcgtgtgtcagccatctttcaactcgccggcagcaccggcaacacaaccgacaccgcaagtactacaacaagggcaagcataagcgcaagagtcgtcacggccaactgattgtggagattacaacgagagaatactaccatctggtcaagttagacaaacaacgattctggagccgcaagttgagaaagcgcgagaccaggtaccgcgagctgcttacagcgataccatccttcaaaaccgcggactacgacgtctacgtggatcgcttgctgtgctttctgcagtcctcgggcttcctgctattcattatggaccaacactcgttctgcaagtggcaattccttacgtacggcatgaagatgacgaccctgagtgtattggccaagcgtatcgtaccgacttgaagagcacaagttttgtgttgcgattagagattgaagctgccaagaggtctccggggaaatccgcacgggccgtataaggcgttcaggaaggaacttgagcggcgaggtatggtcctgtccatggatgagtttcggacgagtaagttgagctcctgcagtcatgagcgcctctaccaagcacagctgctgacgaaggtgaacgacaaggactccgagggggtcaagttcgtcatgaaggggaatagaaacgttttgcgctgtttgaacagtcattgcaatgccaacttctggaaccgggacgtcaacgccgcaagaaatattctggagcttttgaagtgcaaattactcagactggagaggctggcagcattcaagtggtggcaacccggtcggaaatgtgattgggaaggctgttgcactggcgtacgcagcgggcgtatcgcggtgcaacggggacccatacccaatcacacggtgtgaaggagcaaaattccgaggacagatgtaacgggatacacggatgtgtacccatgttacataaagagtgacgagatgtccctctttagtgtccatggtacgtggtaccggttggctgcgagccaaccattggacacttctatagcttttactatagttgacttagagtttgtatgattcaagcttggctcacctataaaatatattcagtctttaacctaccgtctacgtcgtagtctgtt

SEQ ID NO: 41 - DNA, 21221 bp, unidentified
  variation 20956: note = n is a, c, g, or t
  variation 10007: note = n is a, c, g, or t
  misc_feature 1..21221: note = Fanzor polypeptide
  source 1..21221: mol_type = other DNA
tcacaatcaatgacgtgacacaaatcaatttgatccaccaatcacgtttcgagcagttgatcaatgactgcaagtcgacagaagaacttgacgaggtctacacaaaaatgacgagtcgcttgtaccgctagtagtcagacagactcgacatccgggtccgggtttgcttgggtacctgcttggagttttgttgttcgccgcgttcatcaaaataaatgacgccaactgtagacacggtgctcagattatattatttacaggttcgagtcttgctgctccgcttcgcatccctcatcccccccatcctcgtcaggtagcttcggtgccaggtagtacctcaacaccgagcccgatgaggtaatgttaaactcgatgcacagcggcatgttttcttcgaatttcaacgtgacctcctctgcaaggcagcaggccctcgtcatcgagaccaggtgcttcagagagtaccctgtgttgacatgcgtcaacgtcgcatcatgcgtcaacgtcgtggagcgagcacttttgaagcgcatgctgccacgtccaatgctcccctcgcacgacatcgtgagctgcagcatgtcctccagctcctgaacctcaaacatgacgctgtcccccaagctggcgaaatctttcatcgcttttgaaaaaagggtgctggccattcgaaagtccaccgtgttgccgctgtctggtacaaccatcctgtccgtgtcgatgagcatgagcttcaactcgaagtcggcgcttcttgcggccccagcatcttccgtgctggtgaagcggacggacatgatatcgccttccgttgtgaggagcgcgcggtcatctggccccgaacatttcatcacacggatgagattcgggatgttgaccccgagcgttgcacatgtcgcatcttgacacgcatacttgtcaaacatggcctggtcacttgagggcagggccagcgacaccaagcatacatgactggggtccatggactgcacgtagatgccgtccgatgtcgcgtcgatgttcacctcctgcaggatctccccgagggcctctacaagcgacctcagctgctttgcgctcgcaaatgtaaacatggttcggttatgaagtcatcttcttggagtttatttatattgtcgttgaatttgtatctcccgccgagtcaactgtttttaaaaaagacgggctgcaagtttgggtatgggacttgatgacaaaccagccacggtatcggaccggtcctccctcccaagacaaaaatgaatccactataaaggtacaaatgtcaattctacaaatcatcatcatcctcatcatcattatcatgagtactttgataatcggtaccttgtacgtgatccggtcgagagcgagtccagatcaatttacgtccatggcccaggataagtacgatgtcctctcggttctgcatgtgcgcccatctagctccaccccactctgcatgactggcatccccgatgaactcctggccaccatcagggccctgcagccctccgggattgacctcgtaagctgtgactcagattcagagacttcagatgcgatccatattcgtaattcgatggacttgcaagctccgagttcaaaaccgtatcaggtcatcttcaccacctccaagccacggatgttcgtgatggtgggtcgatcggatcgattcggatcggttcggatgaaggatcttctcgttaaaaaaagattcgtgtgcacatcgtatggtgcgtacgtaatgctagggttggttgcgtcggcccatggtgtggacatgcggtctgtacagttcatcatgagcgacaaaccagaagaggatgatgtccagtgcagcataacacgtcctcctttacaagggcggagtgcgactcgagatatcctgtacaagtatagcacccctgcattgaaagatcttctcacgatcaaggcaccctatgcacgggccaagggagtccttattcgggacatcctacccgaatatccttcgcaccagtccatcctggaattggttgtcgcaaacgacctcctggtatccccgtcagggttagccaagcagccgttggtctccatgctaggtgaacgtctcatcggtgatgcagataatgaaagcatcgcccgcaacacgatgtactcgctttactttccatacacacgggcatcaatgacagcccttaaagccgcatcgacacggatccggatccggacatcaactccagagtcctatgtcaactctacggaagacgacacggtttcacagttgcacgtcgagcatgctattgaggggacgtttgacctggatcatggcggtagggttcgcaaattcacgctttcgcctggtcatatcgacggcattccgctccatgtcggcgaccgcgtgcatctctccaagcagcagaggttggctgaaaatggtctgtacatcgtgagtacccgagggttgaatcaaaatgacgaaatcacgatgacttcccctcccatcgtggactttgtgggtaaacaagcggccgtgcgactcctcccagacgctgagtgcaagatagtccaggcgaagccgggcacaacttttaccgatgttacagatcaacatctgaaagccggggatatcgtgtacatgccccccctggacttgttcggcaccctctggtcctcaagtcgtatccttacccattgtagggatcctcaattgcaaaaggatgtcacgaaatttcacgagaaggcgatgtgcatgacggacccattggtgcccatcaaggagctctgcgaatccgcacgtgatttcgcgggtcaacccaagccggttggcgtgtgggacaggccgtgtgaggcagactcggagtgcccatttttcaagacgaacaggaggtatgacaacatccgcggggggtgcatggactccgggtactgcgaaatgccgctgggcgttcaacaggtgtcctaccggaagttcacaggaaagccatggtgtcacggctgccctcaagactacagcgcggattgctgtaccgaacaagccgtgcccaactacgcattccgattcgaccaattcaacgtactgtcgtgatctcgaacctcaaacagacatgtgcgctcgtatcgaggggtggtgcatgtatccgatgagctcgaagtcggcttcgttgagctcggcccaatctttatccttgacgacagggcttacccgaaccatgggaggcggcagaggtgggcgggagagctgcagcgtcacctgttccacatggtttgaatacacgtgggtgtcaccggtgctaataatgagttccttgggcagcagcccacactttgtcgcaaggatgttggtcaacagagcgtacgatggtatgttggcggccaagcccaggaaacaatccacggaacgctggtacatgtgacacgacaggtgcccttggtccacgtagaactgaatgaagcacgaatggcagggcgggagagccatgcgaccgagcgccgcggggttccatcccgtcatgcaaatgcggcgagaatgcggatcttccttgatcaaccgtaccacctcgttgagctgatccactccgtggcctgtgtaatcatcgtgacatgttccataggtggcaccgaaatgtcgccattggaaaccgtagcctgcacccatgtcgccggtgggcaggtcggtgagccccctcgcgtcaaggaagtctcgggtggtgtttccatcccaaatcttgatgccctgtaccgacagctccctcgtatccgtggagcctttcatgaaccacaacaactcgaggaggaccattcgaaaagacgtgaaccgcgttgtgaccatcggcagcttgccattggtcaaatcaaacttgagctgtcgaccgaagaccgcgagtgtgcccatcgttgtccggtcatctctcgagtgtccggtggtcaggatgtcttgcatcaggttcaggtacatccgctcgtcgctctcactcgtgatccgcgtgtagtccacaaatctatacgacatgccgctcgtcgtgtcggacatgagtgccgatgcacgtgtgatctcaaagtgggacagaaactgatgcgggaagaaggtatcgcattcgagtgatccttccacgaacgtcacgtacatggacgtcacactgcgcttttccaagaaatgctggtacacggagacaccaccgatgacgtgccaagaaagatgatcatgctgtccaacgacggcatccagctcgtcaaaggatgagacaaagatgatgtttgggtccggtgttgcagacatgaggtccgctgacgatctggtcaataccacgttgagcctacccttcagcggtcggtgctcctccggaatcgaatcgaacgtcgttcgccccatgatcaccccacctccagccgtaatgcttctgaaccgctgcatgtcagcttggagtggtgaccatggaagcacaccgttacggcctattacggcctatcccaaagcgcttgcacatggccaccacgatggccaccattttgttttctattcaccttcaagagcaccacttcactttatgtgccaaccaaactgacttaaaggtctggaggcttgactcagcatcatggctctcgattggatacgttacaaacgtggcgactacatggtcctgtatgcctccaagcttgccgcatgtgccggcatgcatcgatacacaccgcaggtccaactcaagaatgagtttctgcggatgatggggtgcaccaccggatacatcacgcccgccgaacaaggttgcaaggacatcgctagccttcctgaagttgagaagaagaaagtcatggaggtcatgcaatcatcctattcaaatgcaaccgaagtccaaacggcactgacatccattttaagtgacgcaacattgactccagcagcagcggatgcggttcgaagcactctctacacgcagcatggcaaggagcaggaagacagtgtgcggcgctccgtctccgccaaaataaaccgtcgcatcgagaccagtgatacattcaagatctccgccgaacccctcatgaccatccaagggatcgaagtctacgtgggtgggcgccacgacggcaccatcaactcgaaaatcgtggagatcaaaactcgccaacgacggtttctcgggaccccattgtacgagctggtgcagctgcacgcgtatatgcacatgcacaacacacgcaacggctgcatcgtcgaaagtttcaatggcttggaggagatccacgacatcgaattcgatgatgccctatgggggcgtgtccagtcggccatcgcggaattcgtcgatgacatcctgacctcctcccaacatcagccccttttcatttgattttgatgtaaatttatgcaccatgcagtccgacgaggcgttgcaccggtcgttgcatcctcgcttggatctgatatctctccaagctggggcgctggtcaagttcatgaatgaaggaacgcttcggagcacacatcatgggcaccaccatcgccgatgagatcgatgagactacttggagtcgttctgtgtcagtaggactcaatgcgctgcgcttcacaatgtagaggtgattgggtagcgctaatgtgccaatgttgtccgccatgtctgccgtggttgaaaacgagagcttgtactgaacagacttgtcggatacccggtagccaaagacatcgacgatcaatcggtttcgaatttcgttccagtcccatggccccgggctatccaagcgaagcaccctccgctgcttctcacagcggatccggtagtagaagttgcaggattgcatattttgttgcagaaatcctaaaccctaaatcctctcacagatggaaagaaagaggactagaagacaagtcctatgaacggataaaggacaccggataaacgccttatatgccaggagtactgcagtcgtaccaagagtattttagtattttttgcagctttttaaaggaaatatcactttaaaaaggatgtctccggtatggtggtgggtcatcgttgtctccacgatcttcgtcccggtcttaattttcctttgggttcgagcaaagggggatgccattgtgtcttcgatcatgacatcgacatggtccgttcacctcttcctggttagcatgctcttcatcgtgatcttgatcttgatctggttgaaatctctcaaatcagagttccttgcacggcgttcacgcatgtttcagcaagatggaacaaccattccgagccggagcacgtttccgttgcacgccatccatgcgtaccacctcatcatcgacatgtcaaaaagctcttctcttgacaacacatgtgcgtccatccatgtgttcctgaacaagggggacggcagagacttctacggtcggctgtcgagcatgaagaattcgctcatgcaagatcaacaggtgtacatcatcctgttgaactcggtgtcggttgtcaggtcaatctcacgatcatcggacggcgagtatgttgtcgtgggcattgatgatccagggcaggtgaccatgcctggcgtgagacccctcgcagggggctcatcggcatgtgcaatgttcgggggtcgcacgaatgtcgtcattgccggcgcaatgtcgtggtgttatgtggcatgatttggtcaatatagatgtggataaattcatacgtcaaaggtaagaacatgggccacttccaggcgttggtggtcagcagcaaagaccagtacgctcgcacgccggagaccttgctgcgcatactccacgagctctacggagtcccggtattcttcgacccgtgtcccgtgaaccccacaaaagatggactgctcatcccctggaaaccacacaactatgtaaatcctccgttcaatgacattctgagctgggccaccaaagccatccacgaagccgttgcgcgtcaggcacataccatcctcctcgttccattccgttccgcgacgcgctacacccacaatataatcttgccaaaagccaagtccatcaccatctggctcaaccgtgtgaagtttgtcccctacccgaaagcgttccctgggcccctcgtgacttacgaattcggagttgccagcgcactgaacgcccggaaacgtagcagcgatctgcgtctctttccggtttccgttcgcagttgggtgctgagccccaagcagtcttccaaaatcgacttttacacgactgtcctgttgccgcgactgcaaatggcgtttggacccctgaagtccgactcataccaatgctctctccaaaccctgactcgtgatattcccaggataccacacctgagcccccgaggccggcactttgtgtgcgtcacgcagggtccggacatcacgcttcgccacatcgcccaatactgcgacacgaacccagaatgtaccgtggtcgcaatgatcatccccctgaacttcccaacggcctacatgcgcgcggtggcgcattgcatccgtgatgtcatactgatctgccctcccctaacatttggagatgatggtcatgcatcgttctggggctccgtgctgctcatcatggggaaatccatcaaggatgaaacggggtctcctcgacgacgtggttacttggcatgctggagggacggcgctttcattggcgatgctccaaggcaatcctgaaatcgttgcttgctcaacatgtttattccttgtttcagagtttgctgaagtcggtcccctggtgatgtcctaccaacgcagctcaaaggttcttgatgtatgcgtgccagaatatcgccaccaccccagccgcagtggcaagcgatacggcctcgtacgggtgcaatacacacgccttgaaaaagcaatacaccaggaatggcaccattgcaaaaaacaggatgatgatgatcatggtcacgaggatgcgcatccagcccgggaacgcttcgaagatctgtttgatcgtggcatacttgaagttgatcatttcatgcggggcatacgtgaggattgcgcggtgactttgcaggaactgtcgctgttcgaccgtgtcagcctggaaaacaatcgggtccaccaattcaggagtgctgagagtggtgaggagcttgatctgctcatctgttacatggacgggaagcgttggcgggatgtatccgttcaggtttgcaatcgaggacatgtcgtcggtctgggttttcttctcatcgaggtgccatcgcaccgcctcgtcatcgagcttccgtatggtttcatcatccgcacgtttgatggcatcctcctcacgcctgagctgctcgtttccagcttgctgacgacgcagctcgtcctggtatttcttctcacgttctcgctgtgtgtcgtccatgtactttgttcgatcagcattcgcgatctggagttcgttgagagcctcacgttggggctgttcacctaagagtttaatccgttcggcctccgcgagttcaacttccgcaagtctaatccgttcggcctccgcaagtcgaatccgttcagcctctgcctgacaattttttttctgaaattcctgccacttcagatcctcagcctcctcaacgcactgattggcatgatacgctgtccactttttgttttgttcttctgcatacttggctctggcaggggcattttgttcgttctctagttgcatataatcctgaattccgttgttgaatattcttgccatagccttttgagcatccgaatactctatcggaaccccgtctgggtcctgttttgctttgacgctctgtctcaagcttgtagataattcctgtagtgactttgatgctgacttcacaccctgctttgcaagtcgtgaaagggacttgacaagggttctcatgatagtgacttaacgagaatgccaaataaaagatggtattcataacgtggtgtgaacgctgtcattcggtgcaaagttaaacaacatacagttggtgccaaattaaaatgggacactggaattagactggaaatgaccatcgctcttgaaacccgacaccgttccgtgattcactacaagtattacctcaagagcgttcgaaaagtgagtaagctgtacggcatctcgaaatcatccttgcaccgctggctgaagctcgccaatattgccgttaaaccaaaacgcaggaagacgtcagtggtgtccgccattcgcgggtgcatccaggaggtcctcatacgcaaccctttttgtacagtcgcggagctggcagccatggtctccaagagctgcaacctctccatttccccccgcagcatgaatcgacacgtcaaggcggcccgctttacctataaaaaagcctatcgccacgtgattccgttgcggtccgctgacacccttcggtcattctgctcagagtacttgtcaacccccgatgagcgcatcgtctgcgtggacgaggtcgggttctatctcgatgattacccgcgtcgggggtgggcacctcgtgggaaacgagtggctctctcgggggccccaaccttgcgacgctctcggatctcggtcatcgttgccatcggaaccaccggggtcctgcattacacgatactggaggggaattgccacaaacacgagttcattcagttcgtgcaagagctggcgcagcttgtccctcctgattcgacgcttcttctcgacaacatcagtttccaccattgtgcagaggtccgctcaatttgcgccaagcacaacctgcggctactgtttacacccccgtattccccaaaactcaactcaattgagctcttcttcggggtcttgaaggcacgctaccggcgagcgtgcattgctgaactcccccgccagcacgagaagcacacggctcgttccttcgaggacttgtacattgaactcttcgaaaccgtactggcaagcatgggtctcctcgacacgggcgctttcttgcgcaaaacgcgggtggaagtcgcggcgtcgtcggcgagcatcgagtcggggacgttctgcgggtacgatgcatgatacgaaagggacctaaggaactgactcgcggtgtattcagtgagatgcatgnttgaccattcccttgtacatcaagatgctccaagagatcgaggaggcgcgagcagcagcagcagccaccaatctcaccgcgggaaagacggtgcgaggacgcgtgttgcccggaacgaagctcttcacgctgctcccacagaaagcgggcttcacgatctcgcacattccgatctcgtccatgacgctgttggatctcctgaagcgcgcaagcctctcgagtcaccgcggagatgggcgcgacgaggatcatggggccctctggcgaaagcacttcgcggtgaaccgggtggaaacccggcggcgcctctttggaaaccgcatcgtcacggacgggtgcgcggtgtcggtgatgatgcaggagatggtgcccctcatcgcctcgtaccgtcagccgctatcggacgccgagctggcccgcgcgcgggccacgtccggtgggaccgtggtcggggttgatcccggggtcaccgacgtcgcaacggtcgcgaccctcgaaggcgagaccaggcggtacagctcggctcgatactacgagcggagcaagatcaacctcagcaaccaccgcacgcgcaagtggaacgccgaaaaacgggaacgcgtggagggccttccgagcgcaaggaccgcctcgatcgcggagtacgccgacttcgtgcagcggtacctggtcctcctgccggagctcctccagcatcgggccacgaagggctaccgcaacatgcggttccttcgatacgtccaccgtcaagagtcgatccacgagatctgtgaggtcatcgcgccgcgggagggaggcctggttgtggtgggcttcggggactggcggggcgtcgggaccacccccatccgccggcgctgttccggcccgctgcaggacatcaagaagcacctccagaagcaggcccatgtccggctcgtgatcatcgacgaatacctgacctcccggggctgccacgggtgtctgaaccggctgacgaacatgagagccgcgccccacacccacgggccggggaaagaaagggtgcagggggcgacgacccaggtacacaaggtactccactgccgaccaagcagtcaggcagctgctcgcagctgttgcggaaccacgtggaaccgggacgtcaacgcctccaaaaacatcctcttgctgacgatgcttcgcttgaaggggtaccaacgtcccccggaactgagcagaggtcaccagcaatgatgcaaccattctcgaagaggcccgatcgaacaagcggagcgggaggtgtcctgagttcaagatgccgccctgttgatgttcgatactgccgaaaagtaggtcaccttcgaagcgggtgacgggttatcccgagagccctctcccacccacggacactggtggggagaggaaatgcagtccgtcaatccaattgatccgaggtgtcccaaaataattggcaacggctgtagcaaggggaaaaaacctcgcatgccaaatatacacccccaaatgtcatgcttatggaattcggcaggaaaaatggtgtactctagaggcccttctgtagtggagccattcgaggacagtgtccaaccacgactgacatccgccaactcggaggaaaactatttatcgccaggcgagtcactgtacagctttaaccagaagtacatgttgacataccaggaggatggcaaccttgttgtgcatccagttgtgtgggcatcgaattcccctaatgaaaacccaggcaaggcaattctgcaaggtgatggtaactttgtgatggtggatgccactggtgctccttacacagcatcacattctggtgcgccatatcgaaagtcttgtcaccaaaaatgggacccaacgacccaaaaatatgagtacaccagtagtaaccttgacccctacactccaggtgtccaatgtaggtatgacgatgttcgggcaagtcgcattccgataacagtcgcaaattatccgggaaatgcgggccccccaccatacacgatggtcatgcaagatgatggtaacctgctcatatatgacggaagtaaattaccgatttggtcatcaggatgggatcaaaactgggctgggattggaacttccggatacatagataccggaggtgagtagatatatcacaacgtatcagtaaatggggatgcaattgtgcatatgggcagcgaatggaacattggcgtgtcccgagacatcacgagttgtggaaggttttggggaacctctcaatggaagagtaaccgacactcttgatagcgcgcatgacttcttattaccaggtgaggcattggtcagcaagaatgggaatttcatggccaccttcaaggcatctggcaacttagttgtgcagcgtagagtcccaatatgggatgctgggacatccagtaccaaacccttgaaagttgagatactcgctgatggcaatctggtggcttacaacacgtcaaacattgcatactggtcaagcaaatctgccggtagaggagcaggaccgtacaatgtcatcatggcggatgatgggtttgtgaaggtcattgatggtggcgggaaatggatttggacggctagtaaaccagtttgtcctccttaaatcatttgaaaccctggattgcgctttcattggcgatgcactcctgaaatgaagatctgcgtatttttatccagaaaacaggcctctctcattattagtttgcaacgacgacatgaccgccgatagctacttcatctccatacctggtaaaacctccagggtcatccgttcgcatgcaccgatcgcacatgtccaaaccgtgtactcctccatccataaaaagaacgtatcggtgtgcaataacgtgatacccagatgcatgctaagaaatgccgccatgcaaccttgtgtgtggtatcagtgctgttatcaatatatcgcgtcaaatacccttgttcaaataccatgtttgtttgtagcgtcaacacatgatgtgatacgtgggcttaccaagcgaacgaaaaccaacctcataatattacaccaacgataccgaaacctcgtacgagcaatcaacgtcaataacgagaacgtagcgggaaaacatgaggttccatcaggagatccatgtagacttgaagatccatgtagacttgaagatccatctagacgtgaagaacctttgggtgaagatccaccaggagcgaaacttgaagatcatttgggtaactatcctttagaagcaaaacttgaagatccaggcgatgctccattgggcgaagattcattgggtcacgatatattagcagctaaacttgaagaggatacgctgatcaacgctgatacgctgatcaacgctgatacgctgatcaaccgcttggtaaaaaaaggtgtatttcgtttggaaaccggcccatctgcagttttttacgatcggtgggcggacgaagaaccgcgcgtgacgatgcgatcagagatcgcaagagcgtggcaaggagtggaggaatgcgtggtggttttttattatatgggtgaccgacatgacatcactgtgctggataaagaatttacggacatcgtgctggatttgccatgcattgggatgcacgatgatgaggtcagggtcactgggattgcgatggcgccccgagcatcgttccatgaccttgacaacttggcgaactacatgcaggcaatgcggcacattcgagccagtatccctgtgtcagcatcttttagcgacaagcacagctcgaagctttggagtatcatggagtttttgtattccaattatgagttttcaggagcaacaatgcaaaaacagatcatgcctttattcggacaggccgtagctgaatccaaggtagacttgatgatgatgggatccataaggagatctttcattacagcccctactggaactcccactagaactcccacttttcctgcggtgacattggagacatcaaagctttatgaggtgcgagatggtgtgagcctcgaagacctgtatcgtcactacacgcaatgtaacatctcgaagtattacttcacgatgaacatcatggtcgatcatgagatgttccttacatgcatggagtacctgtgcatcccatctctacacggtcgattcatgctcaaagccaaggatgttgtcaacttcaaatgggaatgctcagaaaaggtggaatgcaaaaaaggtggagcgcacaccgggtgtcgctctgaaccacccatccctctggcgatcactggcccgtcctacctgaactcaaacttggagaagcaggtattgagcgcttgaccattgacagattgaccgcttggtcattgagtagtacacatcacgtcacacaggaattggctgagtgagtaccaacaacgtaaatcgtatacctatatccacgataaacatgtcactgtacgaagtatagtacaacatggtcatcaaatcgaaactaaaactaaaactaaaatcgaaatcgaaatcgaaatcgaaactaaaatcaaaagcgaaagcgaaatcaaaacgaggaaaaaagacagctgtcacatctcggaagtcaaagatggtgctttgtcagcgcgtgcgccgtacacccgcgctcatccggtcgcgacgtcctgtgcaaagaccgtcgggggcaaaaaagaagacccatgctgttagatctcgtctcgtgcttcgtacgcgcgtggtccgggcacccatgcgcaacagggcgcgacgtcctactgtgcaacgacagtcaggtggggaaaagaagtcgattcgtgagcgattgtcgcctactatcaaggccataaagggtttcttcaccaggacaccacgcccctcaacagtcgcaatgacaaacaaattgacacagctcccccccacacagtcatcttctactacatcttctactacatcttctactacatcttctatcatatctccaaatccaggacttaactcacttactcaacatggtacttacgagactggctctcagggttcctttaccaggaacacacgtgatggaaccacaaaacgcccctcaacatttgtcacgacacggctgccaaccatacaggcatcatctattgtatcttctactacacctactacactttctaccatatctccaaatccagggcttcactcacttactcaacatgctactaaggatgctggctcgcagggtttatttactaggaacgatgtaaccacaaatttgggcacgacaaacaactggacacggttgccaatgaatgatgcgccccccatagggcgaaacaaaggacaaacagatgaatggtctgtcgggtctgtcacgtctgtcgaagtggtacagaatcccgtaatgggacaactatgggaggaaagtggtgatcaggtgctggaagaagtcaacaatatcattatcaagcgtaacatggatttgaaaatggatgcaagcaaatgcgaaattctgtgtatagacttggcaaaattgagtcttgatgtgcagacagcgtacaagaacttgcgcgaaagtaaaggtaccaccttgaaaccacgcgataaggtccccatcccaagggacctgtcgatatattgcttcttcaacacggactgtcacattgaacctacaagagttggcacctacaggagttttgctgagctggtgctggttcaggtcatgctgtgctcaacgtgctcgacagtggaagatctcttcatcaaaaaatatgtgtatattaaactgcacgaatctgaggggtttgacaagatgctcgcgcgacttaagagcgttccgtatcatagtgatcgtacgtacatcagggcagtgatcgacaacagaaacaaagaaaaccccatcgaatctttcgatatgaagatccgtgattttaaacccagtccattgcctaagctttataaggagacttttgaagttgtgaagtctagattcgaagcttatttgaacaactccgacggcacgatacaaaataggagtagcatagatgaaaatatccgtcagaacatggagggcgtcttacaaattgtccaaacatttcctttcaaacagatcctttatttcgctgtcacgattggaatcatcaacgatgaatcggacgcgggcaagaaagtgggcaagaataccaacagcagcaacgaagactcgaaagtatacaagcatgccaacatcatcaggtttaaaaaagtaaatgacaacaagatcgatgtctatgcttttgatccccatggtggacgtcaagatcttatgagccattaccttgagctgttctccttgtacgcatctcacagatccgaactaaaaatcaacgttatacccttgacttgtcctaaaatgcagaacgaattgcccttctgcacagcatacacgtattactggacaatcctccaactctttcttcccccaaaaaaattatataaccgagctggctcgtgttctacgggacaaaatgattcagagacaaaggattacacgattctgaatgttgtgcagaatggatcacatcgggagctcgtagatcacatgtgtttgtttgacattgtgtcgctgattttcatcatggcatacggggtggtgacggtgcaggagagcaacgagaacccaaataccgatcagccaaaaactcgtacgggtacatggttatgaggcgcgatgtgcgaggacaactcaaacttgaagctcaacgtcggtcatcagatgttggcccgacaatatttccagcgacaactgccaaaacgacagatgcgaccgccgatgcgactgtttctcctgcgaccagccaggcggttgtcgaatcccgtttacgccatcgatccaccgggaagaagacccgttgcttcacatcgatgtccatctcacttccctttcttcaatagtatatagaaagatactcataatactttatgtattgcaagcttgcaaaaaagcttgacaaaacgagactcctggaattgtactatacattgacgggatctacgcccattgcacagaccggacgatgatggggatcagcgtccggcggaccatggccaggcgtcgagcgcggcatcgctgtttgtaagcaagccacgcccacttgatggtgtctgcagccttatccttcgtctttagatcgaatgttacgcacttcagcagcctgaagcagtccacagcgaccggaaatatcatgtcatttgttttgtcatagatatagtatgagttgtcatcctgggcgatgacgaccaacaatctgccaacgtcgtcatcgtagccccagaagccgtcgcaatcgaagattaatgagcatgttgactctttgatacctgctgattgtttgaacttcgcatacttctcataacaccacattggcaggtgacaccctgtcgcgcaatcccctaggaccttgtagtcactgccccaatcactatgtttagtgttgaggtgcttgaccacttccgcatactcgtcatgagacatgatagatgatagatgatagatgaatgtccaggtgacggcgtgaaaccctcaatcgtggaaatcgtgtatgcctgtacgtaaatcagataagagcattcaattttatgtcaatttgacatttaagtagggtttagggcttgcatcggtcggctatcttgtttggatttgcatgaaagtggtgaaagggggcccattacacagtgaaaaaggaccagtccacgcaacatttctcattcgttcttctgtctgtcagtcaccgcgtcacgttcacctaattgattccaggtgcagattagtagtagatggagcattcatcaaagctattgcggctcattgccaaggcgctgtggatgccacctgacgctgtggaacatgctttggcaacactgggcatcatggtcatggtgccgtcgaacgccaagcgcgtccctgtccacggatggcaccgcgagctgcgacacggcgaccacatcattgtgcgttcggcgggcagttccaccatgccatttacatcgggccgtacgtcccacccggccaggacgaggaaaaggactacgtggtggacatgttgggtgacggccagctgagtctgcggctaaggacaatgtcgaagttcctcgatacgttcgtcgatacacggggtcgatatgagcttgcggtgctggagtacagcaaagacacgcaagcagctcgggatttcactgcgcgcctggcgctgctggcccaagcgcgactcgatgacgtcgaggacctctacaaccttctgggctgcaactgtgaccactttgcatcctggtgccgcactctgaggtttgattctgaattgcttgccgccgccatcacaagcatgcctcctcttcctcgctctcccgaacgtacatggaaatagtaatagatcacgtggacgtgggtttatgagaatgcaacgaaaatgtatcactgatgtccattgatttgtcgaggagcatcctgcaagcgagcccgttgttaggcaccactttcttgccaccctcctttgattcagcccagcaactagatgggatcttcatgccgttgtatggatcgaacggcaatgcctcgacatccgcattcaatgctgcttcagtttttaccttgacactctccatgaacgagtaaaatttttcatacgagaagcgacggtgatgatcatgcgattcagggtcgagagtcgcgacatctgcaaatttgtcttgcgattggctatgagcaagctgcatcgtacgccacacaacttgagtgtcggtgtccccaaacgtgatgcacggaacatggagcgtcgaggtgtagacatcccatttcgtgttgcccgcgttttgcaggttgtccaccagcaggatttgtaatcctttctgggtacccacgaggtttcgctcgtacatggagccgttcactttgttgtgacccatcaccacatgtgtgatcccggcggatgccagccggtcattgacctccttgtaatagccgtcatacgtcagtggcgccaccctacacgatctgccggcttgaaaacccgcgaccatacagttggtgccaaattaaaatgggacactggaattagactgggaatgaccatcgctcttgaaacccgacaccgttccgtgattcactacaagtattacctcaagagcgttcgaaaagtgagtaagctgtacggcatctcgaaatcatccttgcaccgctggctgaagctcgccaatattgccgtcaaaccaaaacgcaggaagacgtcagtggtgtccgccattcgcgggtgcatccaggaggtcctcatacgcaaccctttttgtacagtcgcggagctggcagccaatggtctccaagagctgcaacctctccatttccccccgcagcatgaatcgacacgtcaaggcggcccgctttacctataaaaaagcctatcgccacgtgattccgttgcggtccgctgacacccttcggtcattctgctcagagtacttgtcaacccccgatgagcgcatcgtctgcgtggacgaggtcgggttctatctcgatgattacccgcgtcgggggtgggcacctcgtgggaaacgagtggctctctcgggggccccaaccttgcgacgctctcggatctcggtcatcgttgccatcggaaccaccggggtcctgcattacacgatactggaggggaattgccacaaacacgagttcattcagttcgtgcaagagctggcgcagcttgtccctcctgattcgacgcttcttctcgacaacatcagtttccaccattgtgcagaggtccgctcaatttgcgccaagcacaacctgcggctactgtttacacccccgtattccccaaaactcaactcaattgagctcttcttcggggtcctgaaggcacgctaccggcgagcgtgcattgctgtactcccctgccagcacgagaagcatacagctcgttcttttgaggacttgtacatcgaactcttcgaatccgtactggcgagcatgggtctccttgacactggcgcttttttgcgcaaaacgcgggcggaagtcgcggcatcgtcggcgagcatcgagttggggacgttttgcgggtacgattcatgacacgaaaaccggcctaaggaaatgacttgtggtgtattcaaggagatgcgggcgggggccaccggcgccaaagaggccgagcaggaggccttggaggagctggagttcgaactgctggcggcggccgccagcaccacgacggttgcggacgatgccacaatcaccgccgtgaagatgaaactgaacagcttctgcaaggacagcccccggcttcgctctcagatccaggcattggtcctgagcatgaaccgcctcctcggcgaggcgtacgcgttcgctacgttccacatcctccacttgcacgactgcggcatgtaccccgccatcgaccgcaacttcttctaccgctgcctcgtcgccgtcagcgccaataacagtcgcccggccacgcttggtcccgaactcgtcaattctcgcgatgtatatcacgcgcttcgccccctgcaaggctccggcagccagccggtcaacacagtcgggtacgctcaggtcctggcggacctctccatcgtcatggcaacgatggccgggaaccacctctgggaaaacctggagaagcgtatcttcaactacttgaaaatgaagtaccccggccagctgatgggggaccccctgcgcaagaaggtcgtcgaagcattggtacgaaaacccctggtgtgcacggcggacctcttccagctctctccgtcggttcccccggactcagcggcggccgagcggctcaggcacgctcgggccgttgcagacgagttgcgcgtcctcctgccgctccccagcggggaccactaccagacccgggcgcacttgaccattcccttgtacatcaagatgctccaagagatcgaggaggcgcgagcagcagcagcagcagcagcagcagccgccaccaatctcaccgcgggaaagacggtgcgaggacgcgtgtngatgatgcaggagatggtgcccctcatcgcctcgtaccgtcagccgctatcggacgccgagctggcccgcgcgcgagccacgtccggtgggaccgtggtcggggttgatcccggggtcaccgacgtcgcaacggtcgcgaccctcgaaggcgagaccaggcggtacagctcggctcgatactacgagcggagcaagatcaacctcagcaaccaccgcacgcgcaagtggaacgccgaaacgcgggaacgcgtggagggccttccg

SEQ ID NO: 42 - DNA, 22016 bp, unidentified
  source 1..22016: mol_type = other DNA
  misc_feature 1..22016: note = Fanzor polypeptide
gataatctcgaggacttcccagaccttgcggacgtgcagggcagcatgcaacgcaccatggcacgaggctgttgtccaggcagcgtggaggtctacctgcagagcggctcgctaagggatcgccaggacttgcggtaagagtctaggatcgagctaggatcgtaatgaatcgcataattttgccctctatcgtggacagggatgtgctgtttcgcgaaattggcaagattccacgtgagcggcggccgagcaacatcactatgagtggctcgctgctcagtcgcaacatcattgatgcgcttcccaacctcaccggactcacgctcaacttacagcggggagacgcagtgcacgaggacctgcagcactgcatgcgtgcgttgtcaaggctgacacggctggaactcagttacgatggaagaagaacagggtgtcctgatacaggatcagttaatggaggatcagggtatacgattaccacgtcatgccttgcggccatgacccggctacaggacctaaccctggagaatcttgagcttggggcctaaaccctaaaatctagggccctgacgggcctgagggagctagacgtattttgtgaaggattcgatgacgaggtggataatgagtacggcaacgatgacgatgacgaggtggataacgagtacgggaaggagttgagacctctggccccatcaaacatgctgaccgacctagtatcgctgcggcgcctgaagctgagcacgctgacgatgaaggaggatgatctatgcaagctgactagcctgacaagccttcacctgttgggcatcatctctgggcgcgatgatcaacagccatggcgactaccaccgctgttgaaggacgtgacgctggggacaaccgtttaccggaacatcggaaaatgaggataaatataagctgtaaaatatctaatcatgatgtatgaacatgaacatgaacatcatcattctcgacacgggtgacaactacatcctggcgacccggacctacgcgtacgatgttgcattgtcattgtacgcgatgatgtccatcaccatcaacacgatcacaacggacatccaagtgcaacaggaggaggcagactttttggtgaccaacttgggccgcatattttcttacggattcaacgacaccgatgccatcacgcgtcttgacatccctgctaaacttgttaaagatgtgaggagcatgcttgagttctacaggatcaaaaagttctgggcggggatcgtgctcaaatcccgcgcaactgtcgttgatgatgagaaatcggacaccgcaaaaatgctcaatgaaattaaaaaattagataacaagatttgcgacctgaaatggcagcaggatgccttcaacacgcacattcagacacctcgcgagatggaccctcccaaacgcacgttcctcctcttcaataccgtttacgagttggccctggtggccagcatcccgcaaattgaagaggtgacctcgtccttccccgagtttgtcatgatccatgatctggataagttagatgaggccattctgacaaagctgcgatcgcatttcaacatgatctccttcacaggcgtaccagatgttcgtaagaaattggaggccttcaaagagctgtacaacattgagaaaaccgaacattccgagaaaatgatggtccgagcatgcatggatacgcacttcatcatctccagtgatcaggacaagcgcatcaaggcgaacgacgtgtacaatgaactcatcaatcacctgcgcatcccgatgcatgatgtttcgatcttcaagaagcggctggcgggctacctgaacgaattccacctgcagaagaagcgcttcagcgatgcctactattaccacggcattgtaaaaaaagaggttgacatcgcagcaatcgagcagcagcgagatgccctgcgaaatgactggtacaatggcaaagacatcattcgaacgttcgaggaggtacacggacttgtcaaatgacttcaaatgaattcaaatgaaatgatttattttgccgtctaatgctatctaatgctacctgatgctgggtgtggtcgtctccatcagcagcaacgaaggacagttccttcaaccacagcttcaagagctgttaaaatgcgcggatcatgtcgtgttcagcgttgggtcgcatctgtacgacacgcgcccagaggatgccatcggtattcgaatgaagttgcaagctctgctccaagatgtgcatctaccaaaggtacaactggtgcaatacgatgttcacgaggatgtcaggaccgacccacggaagtatcacaacctcgctcgggcggcaggttgcgcagcgctgcctgatggcatccagtgggttctgctgctcgatgcagatgagatccccgagggccttcgattcaggagctggtacatggacagcatcaaattcttaaagcctacgctagcgtacaagctatcttgcttttggtattttctgaaacccacctggcgggccaatgtcattgaagacagcatcgtccttgtgcacaagagccggctgagcaaggatgccctgacggatgccagcgagcgtgatgggatcgtgcggcattgtccaggaggctgcatgcggtcgttggtgcaccgtgatggggaaccgatgttccatcacttctcgtgggttcgaagcaaggctcaaatccttcacaaagttcaaacttgggggcaccgcgacgatcgtgactggacagcgctggtcgaggagatgtggagtcacgcacatccaccgccccgggattttgtgcatgggtacgagtacgtgctcgtggagaacacgtttgacattgagtaaaaattgaatccaacccatgaattcgtcatcaatgctcgatcggaccatcatgtacgccttcaacgcacagaggagaccggtaacccgcgacattcaagcggtgctgcggtgctttggaagttgcatcgaagatgccacggagttgatgctcgcggtggctcagggtgacatcctcactgtccagctcatccttgacacgatgtcgcaatgcaaaacatgctctagttcgacgatcaacatgaccacctcgaaaggctttacagcgctgcggatcgcaatcatattgggtgaaactcaaatcgctcggttgctcatcttgggcggcaacaaatgctgctgctgcaagtttaccaattctacaggcactcaaacggacaagtctctgacaagtacgaagatcatgcctcctccccaggccactatgcgctcatacaaagatgatgatgtatttacactgccatgcccccccgcatctagcagacccttgaaacacccttgaaagcctttgcagagctttgatttttatgtggtctaaatttatatcgttttgagtagaaatgctgaatagtgtacttggagagaccctcgggagttttttcttcgtgtctgtcgtgttggcaaccaccaccaaaggaaacatcgagaccttggcaccctttctgatcggtttggcgctgtcgatgtccatctatttctgttcaaaggcctgcctcggtgcgctgaacccaatcgtggcgttggtcttgtttttgagaggcgatatacgcttgcagacgatgttctggtacattcttgcggaatgcataggggcactcctggcattcgcttggtggaaagcaactctgggcatagccacatctaacagttacacgacaccggtatgataggaatcaatcaaagaaaaggatgggttcagaaactgctctcggttcacaaacgtactctgcacatttgcgtgccagggtcatcatgtcctcgtctacgaggcggatgctgtggaacgatgcgaggcgcacgctgtccagatgcatgccctcgagccacatgtgtccacttgtaccggcgacgggtaggagcactgcactttcatcgacgttgtagtatgtgaaccttagctgctcatgggtgcccactttcgtcagcgcccggagcgcatcgtgcaggagggatgcggtggcggcgaggagttcatgtgtttccggattcgtgtgaaccgggtagatctcgaatacgaccttcacgtccatggaacggagccctggcggcatccgccacaacgcgaagtcctggaaggggatcgtgttccacaaggtgattttttgcaactttggaggcagcatccagggtgatgaacggcatggtggtcggatgtcgtccaggttgaggcgggtcaggtgggtcagtttcgcgagggcatccatgtcaattgaatcctttgtcagggtcaagtgccgcagcgacgagaggtggctcagccaggaggatgtcgtcacatcggtgccgcggtcaatgtcgatgtcgaggtccaggtgcgtcaggcgggtcaggccgccgatcgcgcggtagagctgcgatgtcaggtcgggggtccagtactcggagccgcttcccagggtgagcgtgtcgagttgcgtgaggtggcccaggtgctccgttccaaaacccggctccacgttccagagctgtaggttgcgtagccggtcgatgcccgcgatggaatcaagaaacgtcgcggtgaaggtcgacaccgactccaggtcataccagagggggggtacgtgggcgcgttggaataccagggaattccttggactgccggtgtcgaaggtcaggatgagcttggtcagatctgatgccgtgttgaagtggctcatgtctcgagcattagcgacatcatcgaggctccgtgaaacgatcaaggtgaggacgtcgaggttcgggagcgtgtcgatgatggtcgtgtccagcatggagccgttcaggaccaggtggaacggtcgatgctcttgcgggatcttccggatttcgtgatacaccgcatcccgcaaggcacggcgctcctccagcgatccgcgccgcaggtccaccttcaacagggccggtcggcagccgttgttcaaggcgcgctgcatgcttgcccttcagggcgttctttggatcttgggcatgatcttgttcttgatcttgagaaactcgttcgtgatcttggatgatgaggcgcctcatgtgctgatcgtagaccttgcacacgactgagtttatcgaccgtgcggatcgcctcgttgctgaatcaaggaaggaaagcacatgtgcaaggagctcctgcgattcgaacgggctcatcgtttttttagttgggctagggtttagggtttacagctggtcctgcattgcgtctaccatctacacatttatgtgcagacatctccatcatttgaaggacatttttcgacacttctcatactccttcttggttcgattacaaatagcaggcctggaccggcgtccataaataaacccacaaagtagcctctcacaatcatcgggcccagaaagctgccgtatatatagtacgaaaaggtaccatgaaaaagtattcggaaaaaattgattgttgtgacaagataaagcttcagctcatccagacctacatttacaaccggaccagaccatcaagcatggacgcaaccaagcaggttatcaagctgatgacatcggattcacagatgtttgaggtggacgaggaggtggcgttcctttcccagaccgtgaggaacctggtggaggatgctggcagcgatggcgtcattccactcccaaatgtctccgggaagattttggcatccgtgattgaatactgcaagtaccacgctcaagccgagaagaagggcgaggatggccagcctatccctaagaacgaggccgatgtgaagctgtgggacgacgagtttgccaaagtggaccaggagacgctgtttggcatcatcctggccgccaactacatgaacatcaaggggttgttggacctgacttgcaagacggtggcaaacatgatcaagggaaaggatgtcgaggagatccgcaagatcttcaacatcaagaatgacttcacacccgaggaggaggaggaagtccgtcgcgagaaccagtgggcattcgaatgaattatttctttgaaatcatgtaacaaaccacataaggccttcttgagttgaatactataacgaaatatgggtatctacacagatcatggtgtggaatacatgctggagcatgatggtaagcgccataccatcgctcacacaaaggacacagatgatcgcctggttgcaagtcattactataaagtaagggaggacacttggcttgattggaggggggatcacattacagccatcactgatgatgttgatatcgccttgaataacgtagaaaaaagtcggctcaacattttactaatggactaccccaccgcaaaccacggatggtatgatgttgtactgaccagttgcacgcattgaaactcttcacagacacgacaagacttctgtgagggcccgaaaataagataataggagacaatacgcttcgacagagaatcgaactctggttgatcggttaacagccgatttttctaccattgaaataccgaagcagtttttgttttaccccttctccccccaatctatgtggacaaaaaaaactccggatccaaacgcgatctcctgaatcaagcagataccacgcaactgtctgggtacggatagaagatcgcaccccacgcccgctccatgtagtggccggcttccggattagaatggctgtccacgtactggattaactgttgatagtaagccagcggatgctgcacgatgtgctcccgcgcaactgcgaagatcgcttggtagcaaataatgtttatagggggcaggttggggaaattcgtgtcgtaccagaccccgaacggacgaagcgggcacggcagcaatttgctctcaccattcgttgctttgtttttgtcgttcgtcgcgacccacttgtcaagctgaaacccgtactgttccccccggacggatttagtgaggtgaccttggaggacggtgttcctcgtcgagagcgctcgtttcaggaggttgtacgtgttcatgattttgtgcgggtccatgcatgagcctggaaggaacacagtcacatctgccaaattgtcgtaattgttcacgatgtggtagaggtacgtgtggtcgcacctgcccacatttggcacgttctcgaccgtgcaatggcttcgattgtaggtgatgtttttaggacctttgttataacatgttatgctgagaccagaccatggtccaaaatcaaaccactcaacgttctcggcatagcgtgccaccacgatctcgacactccgctgtgacaacaagacacgatcgatgtccgattggtgcacgtgataggcatacgtggtcgccagtagaaggacggtgaccgcgatgaccacgtatgctaacgtggtggacaacagcgggacggtggtcattttgtattcagtttattgattgagctcaaaaaaacgtgatgtcgtgtctagactacgaagtcctagagactagacttgatgcaatcaaatgtcgcggagtccatctcgatgagcgcccgctccgcaccacgtattttgatgatcgggggtagtagagaggaggtagagagtagagatgcgcagaggctttggagagcgcctgagctgttccacccatggtccgcgagatgcttgaacggcccatcctcagccttgaggaggcagatgctgttgaaggtatccggatcgatcctatgctgaagcacaaactgcgcggccacatggatcgccaggtaggtggggctatcaatacgttgaaggtccgtgaattgaacatcttcgacccagcgaacatactcagcgacggtgtcgaagttgtccatggccatgaatgcctcacaccattgatgaacaaagacattgtttgcagtgcacgcaaagaaccaactctcgatgacaggatacctcatgttggtcgtgaatccgtcgaggtaatagcccaagaacgtgcactttgacaaccgcatatgatccagcagccagtccaagctttgcgtcatgaagatggaagcgtccgaccacacacctccgtactttgccaggatgttcaagcggatgtaatcggacacgcgctgttggctgtcagtatgcctgaatgcatcgacatcgacgaatttgttgaggttttccttgtgcaagaaattaatcgtccagtccgggttgtatcgtttccacgtctccaaggcaaagtacacaacgcgaggcacctcaaggctgttgtcccaatacgtccaaaggatccgggggatgacagcatacacaggatccttcggaggaaggacgacgaacccttcttcagtcgaacatcgacaacggggcagcagcaacaggactgtcacgatcaacagtgtgatcacgaggatgatgccgcaaacaatgtagtaaatctggacatttgacatttgacatttgacagttgacatttacagcttgtctagaatattgatttgtatctaagggtactccataatgatcacttcacatatcaaatgttccctgtgccgccgacctatgatgtggtggtatacctcgcgcaagtgcactcaggatactacccctccaagtatatgtgtcacctatgcatcgatagacctaatccacaacatacgcttgcgcgcggaaggtacaccgggctaggacgtacagcagaggatgcgatcgcagactggcagcagcgcacgagagagtggctagaggagaacccggactgcaccacctggccagaaccggttcctctgagtcccgagggcgacgcccaaattttgaaacggttcacatggcatccccatccgcaatcaagaaacagtttggtttgatctgatatcaccctcagggtccttttgcaatttgcaaaggcccactttcatacaaatccaaacttggataactttatgaatgcctaaatcctatctaaatgatgaccttacataaaaagttgaacgttattttctgatattctctgacatacagttggtgccaaattaaaatgggacactggaattagactggaaatgaccatcgctcttgaaacccgacaccgttccgtgattcactacaagtattacctcaagagcgttcgaaaagtgagtaagctgtacggcatctcgaaatcatccttgcaccgctggctgaagctcgccaatattgccgttaaaccaaaacgcaggaagacgtcagtggtgtccgccattcgcgggtgcatccaggaggtcctcatacgcaaccctttttgtacagtcgcggagctggcagccaatggtctccaagagctgcaacctctccatttccccccgcagcatgaatcgacacgtcaaggcggcccgctttacctataaaaaagcctatcgccacgtgattccgttgcggtccgctgacacccttcggtcattctgctcagagtacttgtcaacccccgatgagcgcatcgtctgcgtggacgaggtcgggttctatctcgatgattacccgcgtcgggggtgggcacctcgtgggaaacgagtggctctctcgggggccccaaccttgcgacgctctcggatctcggtcatcgttgccatcggaaccaccggggtcctgcattacacgatactggaggggaattgccacaaacacgagttcattcagttcgtgcaagagctggcgcagcttgtccctcctgattcgacgcttcttctcgacaacatcagtttccaccattgtgcagaggtccgctcaatttgcgccaagcacaacctgcggctactgtttacacccccgtattccccaaaactcaactcaattgagctcttcttcggggtcctgaaggcacgctaccggcgagcgtgcattgctgtactcccctgccagcacgagaagcatacagctcgttcttttgaggacttgtacatcgaactcttcgaatccgtactggcgagcatgggtctccttgacactggcgcttttttgcgcaaaacgcgggcggaagtcgcggcatcgtcggcgagcatcgagttggggacgttttgcgggtacgattcatgacacgaaaaccggcctaaggaaatgacttgtggtgtattcaaggagatgcgggcgggggccaccggcgccaaagaggccgagcaggaggccttggaggagctggagttcgaactgctggcggcggccgccagcaccacgacggttgcggacgatgccacaatcaccgccgtgaagatgaaactgaacagcttctgcaaggacagcccccggcttcgctctcagatccaggcattggtcctgagcatgaaccgcctcctcggcgaggcgtacgcgttcgctacgttccacatcctccacttgcacgactgcggcatgtaccccgccatcgaccgcaacttcttctaccgctgcctcgtcgccgtcagcgccaataacagtcgcccggccacgcttggtcccgaactcgtcaattctcgcgatgtatatcacgcgcttcgccccctgcaaggccccggcagccagccggtcaacacagtcgggtacgctcaggtcctggcggacctctccatcgtcatggcaacgatggccgggaaccacctctgggaaaacctggagaagcgtatcttcaactacttgaaaatgaagtaccccggccagctgatgggggaccccctgcgcaagaaggtcgtcgaagcattggtacgaaaacccctggtgtgcacggcggacctcttccagctctctccgtcggttcccccggactcagcggcggccgagcggctcaggcacgctcgggccgttgcagacgagttgcgcgtcctcctgccgctccccagcggggaccactaccagacccgggcgcacttgatcattcccttgtacatcaagatgctccaagagatcgaggaggcgcgagcagcagcagcagccaccaatctcaccgcgggaaagacggtgcgaggacgcgtgttgcccggaacgaagctcttcacgctgctcccacagaaagcgggcttcacgatctcgcacattccgatctcgtccatgacgctgttggatctcctgaagcgcgcaagcctctcgagtcaccgcggagatgggcgcgacgaggatcatggggccctctggcgaaagcacttcgcggtgaaccgggtggaaacccggcggcgcctctttggaaaccgcatcgtcacggacgggtgcgcggtgtcggtgatgatgcaggagatggtgcccctcatcgcctcgtaccgtcagccgctatcggacgccgagctggcccgcgcgcgagccacgtccggtgggaccgtggtcggggttgatcccggggtcaccgacgtcgcaacggtcgcgaccctcgaaggcgagaccaggcggtacagctcggctcgatactacgagcggagcaagatcaacctcagcaaccaccgcacgcgcaagtggaacgccgaaacgcgggaacgcgtggagggccttccgagcgcaaggaccgcctcggtcgcggagtacgccgactttgtgcagcggtacctggtcgtcctgccggagctcctccagcatcgggccgcgaagggctaccgcaacatgcggttccttcgatacgtccaccgccaagagtcgatccacgagatctgtgaggtcatcgcgccgcgggagggaggcctggttgtggtgggcttcggggactggcggggcgtcgggaccacccccatccgccggcgctgttccggcccgctgcaggacatcaagaagcacctccagaagcaggcccatgtccggctcgtgatcatcgacgaatacctgacctcccggggctgccacgggtgtctgaaccggctgacgaacatgagagccgcgccccacacccacgggccggggaaagaaagggtgcagggggcgacgacccaggtacacaaggtactccactgccgaccaagcagtcaggcagctgctcgcagctgttgcggaaccacgtggaaccgggacgtcaacgcctccaaaaacatcctcttgctgacgatgcttcgcttgaaggggtaccaacgtcccccggaactgagcagaggtcaccagcaatgatgcaaccattctcgaagaggcccgatcgaacaagcggagcgggaggtgtcctgagttcaagatgccgccctgttgatgttcgatactgccgaaaagtaggtcaccttcgaagcgggtgacgggttatcccgagagccctctcccacccacggacactggtggggagaggaaatgcagtccgtcaagccaattgatccgaggtgtcccaaaataattggcaacggctgtatgtcacaggcacacgcgatcattccatcgccgtcacctgcacattcatctatcatgtctcatgatgagtatgccgacgtggtaaagcacctcaacactgcacctaaacatgcctataactgggattacaaggtcttgggggattgcgcgacagggtgtcacctgccaatgtggtgttacgagaagtatgcgaagtccaaacaaccagcatatatcaaagagtcaacctgccaatttgtcttcgattgcttaagctttcacatgggctgtgactatgaagacgccgtaagcttgttggtcgtcatcgcccaggatgacaactcttaccatatctataacaaaacatctgacttgctatttccggtcgctaaggactgtttcaggctgcggaagtgcgtaacttttgatcgaaagatgaaggataaggctgcagacaccatcaagcgggcgtggcttgcttacaagcggcggtgccgcgctcgacgcctggccatggtccgcctgacgctgatccccatcatcgtccggtctgtgcaatgggcgtagataccattgcaatttttttcgcagtacaattccagggtagagctttacttcttgatcacctgcaggatgagcctcttgaagcaactggaatcttgcccacgttcctcctgtctcgtggccaacatctggcaatgcccgatcaactgcacccagctacgagaggcgactctgattggcattcatggtactgggtactcgtgggcattccccgatcattttgtttcaaaaactttattcgaagtaatttaacatttacaagttacgcgcgcaggacacacctgcatactgggcaagtcggtcgctcctgggcggcctggcagttctggatccatgtgagcacgcatcctgtgcagatcgcgtgtgcgcagccctttacgtaataggtgctgttgaacgccatttcatcgtagcaaatgggacacgacttgtggtcctcatcaagttgagcaaatcggactttcttgaagatgcattcgacgatgccgtggacctccgtttccatgtttgcatccataattgccttttttggggcaaacactcctgctatatccgcatcttgcgccccggcagcgtatattgcgtacatgagatcggtcgggttcaggttcaggtaacgggttcgaactaatgcagtgatccggatgccatcggcgacatcaggtgtcaggagcttctcaaggttgtcaacgcgtccgtgactggccgcaaagtagattgcgttctctttgacgtgatcaggaaggcgcttgtaccccatgagcaagtcaaacgtcatctgagtgtgtcgtgactggttgtcgttggatatggccaccacagcgtccaggaccaactgcaaatcacgcgaatggatgggtttatccgctttgagaagtgcgaccacgaagtccgtcaagccatgattgaacgcgtagacgaaggccgtggagtgtttcggcatctggtcggggtggcagaggaggaggatcgcctttacgatctccagctttccttcgatggtcgcgcgaagcagagcgaaggacacgtcgaagaggggtccataacgcatgatatccatgaccttagccaggttatcttcctcaatcgctttgcacagtgtgctttccctgttatcatcaacatcgtcatcttcatcacgcttcctcttcttggagacatggtctgccatcatcaagtctgagtcgctcatctaattgaatatatatagtgttcactcgacagcgtaattcaatttttattctctctatatgcatgctctctgacccggtacattcttataccatccaccacctttgatgagcgttgtacgtgaggatgttttctttggggatagttgtttgcttgcatgggttctcatcaagtcttcggcgaaacaatcgtcacacccttaaatccatttgcaatttgtaaggcccccttataccactttttcatgaactcttgatcgtcacgatcatcttataaagctcctgatcgtcacgatcatctcatgaacctccttgatcgtcacgatcatctcataaagctcctgatcagcaagatcatctcataaagctccttgatcgtcacgatcagcaagatcatctcataaagctccttgatcgtcacgatcagcaagatcatctcataaagctccttgatcgtcacaatcagcaagatcatcccatgaacctccttgatcgtcacgatcattccatgaactcttgatcattctgatgatcatctcttgatcatctcatgaacttcctgatcgtcacgatcatctcatgaactcttgatcatcctgatgatcatctcataaacctcctgatcgtcacgatcgtctcaggacaagatctactcgcggtccagcaacggccccgtcgtcctgctcacacgccagccggcggaggggcgcgcccgggacggcagcctccggctgggcgagatggagatggagtgccagtggagccacggcatgctgcactttttgaaggagcgcttcatggagtgcagcgacagctacaacgtcttcacgtgccgcaagtgcggcatgatcgccgtctgcaaccccgacaagaagatcttttcgtgccgcatctgcaagaacatcacctcgttcgccgaggtccggctgccctacgcctgcaaactcctcctccaggagatccagaccatgggcacaaaatgtaggtacccttctcgtctggggtgactcttgttcattctgatgatcatctcataaacctcctgatcgtcacgatcctcccatgaactcttgatcatctcatgaactcttgatcatctcatgaactcttgatcatctcataaacctcctgacaaaaaatacgtatagcgttctcatacccgatgtactcattccttccaggcgatcttgcgggccttgatgaaccggtgtatggcgatgccagtccatggggtgactgacattcggagtgcagaggggcgccagatgcacgcgctggggacgtcccagtttacgtaccactggggtctgaagtctgctccgggagagggcacatggcacacaaacagccctgcccagtgtctccggacgtcatcccagcggatggtgcactgttctgtactgtactcacggtgaaacatcatcgcatgcgctcggctggtcaggaccagtatgcgtgtcccgttcctggtaggtcgtcccctcgggtcgtccagtgcagtcaggtcggaatctcggagagtcacggtgtgaatcttgacgtgaccgaagcctgcagatccagtgtaggatgcgcgtgctttgggtttgaagcggtgcacaaggtcgatccacgatgccccgaccgcgaaccagaacccatgaggcttttgtgttgcgctgtcatccgcatggatatccatcaagttggcactcgacggaagtacgcggtcagagcagtgcaggaaaagggtgcgagaagtcggcatcaggttcgtgcagtgagacgtgctagatttcaattttttgaaacagctatctttggcaccttttgcaaaatatccctctcatttcttcaaagcagccagtccaaccacaaaagttgccacactccagacggcggtgaagttcatctctgcagtatcgattgcagtaagatgttatacgtatattctcgtacatgctcgtacatttttaaaatataaataccatacaaggctgcctcgtttacctcgtttaccttgtttaccttgtttaccttgtttacctcgatacctcatacctcatttattacgagaatggagcaggacggtagcacggcggtccggcgtggccccatggatgagatgcgccagcttgtccgcatcttgaccaggctcatgcccgcttcaagcagtttcattgggaagctggggcacggcagccggataaacgaagcggacatccggtcctacctcgcacaagtcttgggggagtgcgaccagacctcagacgatgcccctccccacccggaatggggcctacccagcggatggtcggtctacatcagcagtgagttcgtttcatcatttttcgcgatatttgtaacattttgtcgattcttggtcgcagccctcttctcgtgggcctgctgcacccccatcaccttggagcagaccctcctgtgcgcccagcgactgcccgggcggagttgggagacgtacgacggggagctggcgaagctaggtaagaattggttgagattgggttagaatgtatggatctcgattttgtcattgatatctatcgaccttcaacacacacagggctgttcccccaaaagtgggcgctccccctgcgcaaggctgaggtgcgagccgtccaggcacggtttgcggccgagggccccacgtacaagcacggtgcgaaacagtggtgccagccggttgtgacggcgcagcggaaaaggcacctagctgaagactttggctccaaaagcgagctggagctgtggcacatcgcgaggaacgcgcttcaggtcgcgctcaacaagcgcggcacaacgcccgccaacaaaatggaggacctgcaggtgaggttgagttgagatttaggtatcttcgcgttagattgagttttttcgcatcaagtcatcgcatcctcgtttccacagatcacgcagggcacggtgcagaacctggtgctcaactgcatgcagtcgacagctcagcagctcagggacaactcggggggtcaggtcactatccagcaaccgctcgccttccagcagcaatacgctctccagctccagctccaacagcagtacgctctccagttccagctccagcagcagtacgctctccagttccaactccagcagcagtacgcactcgagcagcagtatgctctccagttccagctccagccccagaactcgatgacaggtaaagttcttcttcttattattattattattattcgcaagttcatgttcatgttcaaatcgtttgtcttcaggacaaagcagcggattggattcgctggcggctgcagcggtcatcgtcgagaactcctgccccgtagttccgtaccccacaatgttccaggtgtacaacatgtagatctacaaggtcaaaaatcagatcagcccgatgacttcgctgaccaccccgtactgcaagcagtcggctggggtcaggacaaacttttctttttcgatgttgtcgatcatggacgctgggagggacgtccttgcgcgaaggatcgttttgatcatacgcaccaccagcatggtgttgtcatacatgtcctgcagcgagggtccgtactgcgtatcatagacgatgttcatgatcagtgttgcgttgtcgtacatgatacgtttggtgcaaaagaggagagggatgatcgagtacaggtctagataggtgtcgatgacagcgatggtcggaacatggatcgagttgattcgggccacgagcggaaagcaaaacgttgggctcgagcagtggtaggtgctggtacggaagatgatgggtttgacctccagcgcatcagccgtgaagagcatggaatccattcgcttcatcacttccggagagtagggcgcggtcggagggagcccgcactcaatgttgatttggttgatgtttgtcttctggagcataactttcgttgtaaggttcagctcgggatggcgtgcagcgtgtttggagggattcaccttgatgtttaggatgcgatcaaaaatcccaaactccttgcattgtgccgccccaagaagaacgtcccgtttcatgaggcgtgcgacatcacccttcgtgagttttgtcctcttttcatagaggtcgtacatgtacttgctgatgtacgcaagtgactcgatgctgaatttgaggtcctcctcttttccccattggtaattcgaatattggtggatcaaacatgtcgagaacgtgtttgcaatgcggtaaggtgcgcctatggacagaaatgtcgcagccgatgcggaaataccatccaccatcaccgcgatgggcacacgtgattcctgcaagatgctcatggaggataacccggcttccagacttccacctggcgagttgatgtgaaccaggatcggcttggggctgtgacgcacgcctttgacgtccggggctggtgcgcatgccgcggcgacatctgctttcagctgtcgtacgctctctatgctcacatccccgtagtagtagatgtgggtcaccttgtcagagaagaggtcgtcatctgtcatgtcatggaagatgctgcgttttttatgagtagacttgtcaatggacttttttgatttccgtcgtggcgtagccatgtcctgctgatctatccatatgttttacaatagtgctgatgacaaatgcgccgatcagacccagcaccatgcctaccaggacctgtaacaacgtgtggcacccacggtaatagcgggacgcgcacatgaggaggacgaggatgatggccacaatgcctggaagcaaccgctgtccgcccgtgagccacagagttgccaatacatacgtcgttatcaagacgtgacccgacggcataccgatgcgaccttcataggatcccccacggttgaacaggtcgcaatttcgcgcacctgccggccttaactgcaacgggtgccaaaccggcagcatgcgagtgattttgagaaatagctggaggatcacccctcccagaatgatgatgatgtaagaatgccgagaccgtacgttgtccaccctgtatggatgtgccacccacaagaccaccggaagcgcgcaaaaaacaaggaggaggagggagatgacatcccatacgaccatgatagtcatcgttcctgtatataggaaccactagaagattgtatttttttgatatcccgaataaaattgaggacaagctgtaaacaaaaaaagggcgagcatgtcgcgtgtcgcaagtcgaagagagtaccgtttcacgacggactggttctccaacaacctgacacgatggaacaccattgtggcaccgtacttgcggaaattgcggcaccccattaaaagcttggaggtgggtgtgtacgaaggacgaagcgccctatggactctcgagaacttgttgcgtcacccgcaaagccaaatatggctggtcgatgattggtcacggcttgagaactacaaagcaagccagcagtggaagaacttgctgcacaacctcaccgtctacaagcgaaagtttcctgatgctccctacgataaaatcatgatcgcggatggggcgattgataaagtcctcaagagcatcgaactgacatcggtagcgtttgacttcatgtacattgatgtgaccggtgactcaaaagatctcatcgaacaaacaatcctggcatggtccttgctgaagcccggcggaatgatggtcatcgatgactacaccagcaatcgagagcatgacgggtcctgtaacaagcaggggatcgacgctttcatggaattattcgccccagatctccaagtgctgcacatcagctggcaggtcatccttttaaaacgcaaggttccgctcaaaacacgtcgactctgtaaaagcgagtattacacggtgtagatcggcgggaacatgatgtcgatatcgaaggatcatctcgtgtcgccaaggcgcgatccaggatgttgaggttcccccccattccaccgtgtcatttcaaactgttccaggaaggaatagagttgtccctgtcaactttttgcaacattttctgtcctaagtacaaaagtcatgcggggcatcagcttccttagcaagtgcatgatgacagcgtggggcggggtggagtgcgatgatagtagcgaacatttcacggatgggcggagcggtggaggcggacggggaggcggtggaggcggacggggaggcggtggaggcggacggggaggcgggggaagggggcgggcaagggggcgagcaagggggcagggacaagacgggggcgggcaatggggtgatgatggtagcgaatatttcgcggtgcgcgcgacgacctagttgacggtcaagttcaccagccgattaattacatacggtgctgcggggctttagtagagtagacctcctctcttgcgatgtacattgtacaaaaaaagtatatttaaatctatgtagatgatcatcacgcaactcaagttcaagcatccttgatcttcttgatctcccccgcaatggccctcatgagctcatccttggatgattcatcgacctcatcatccagcatcgacaggagcaggtccttgaattctttaaggagatcctccttgcttgccgtatccatctcctccttagctgtctcatctgggttgttggtcttgaagcatgtaaagtatgacaagtatcggttcgagaggaagacttgactcaagaccaggattgagaggaggagttgactcaagaccatgatgtcgatgccaagacccaggtgccaagacccagtgcgttggtacaccgtgtaccgcaagttcaacaggtagggtcggtcacacacgatccatgtgagcaagatgcagcagttgatgctcacgtgactcgagagcaggagatagatgcgaagttgtgacattgcgctgtagagacgggacaagtatagagctatgaggacgtacgtgaatgagatgctgccggcgaggacccacattatcggctgcgggtacacaaaggattgcatgtccatagcgatgatctagggatgtgatgatccttttcaatttttttatgtatttatctatatctttgatctagaggatcccccctctaccactcatcgccagagttggcttgcttggacgatccacggtagtcaccgcttgtcccgatgggtttgtttttcccatcccttttctcgccgcgtattgataccccacatgcaaggtttcgaaagagtccgcgtagcacgtcatgaagccgtcgatgccaagtttgggatagtccggggatgttggatctcctcccatgtaatcatcaaaaatgacgaccccaccaggcttcagcagtctgtacgtaagaaccgcatcctccattgcgctgcgcgactgatggtcaccgtcgatgtacacgatgtcgaagtgctcctccttttgggtggcccatggttgctgcttcagcatgtcgtacgagaaacctttgaggaggttgactttgcttgcatgctcgcggatgttgaacatgaaacgggagtggagatcctcgacctgggactctgagtgctcccccggtgtgccggcaaaggtgtcgcagcaccatatctcggattccgggtgcgtgagcacgttttgcagcgcccacagcgcactgcggccttggaaggacccaatctccaacatgctggtgcggatccctttgtacggcgcgagtaacttttcccaaaccgggatgttgacagagaaccaatcttcggtgaacttgtatgcctgcatttgactctttacattagtctaacacttaggttggttcggatcgatcggcgatgatgatcacagtttgaatgccagtttgaacgatccttaaaaagttatttgcattcagtgattcatacacggggcctgaaggctatcatgaacccaaccaccatgtaggtggggtgccgtgacccaggcagggtgaccgtggcgccacccaacactcgggtcgctgcctgcgcccactccagggtcatgtggtgggcaatggtggccgcacgctcattggacactgacggcccacacgaaaatgctgccagattcagctctgccagctctgtctcgcca

SEQ ID NO: 43 - DNA, 20783 bp, unidentified
  variation 5583..5719: note = n is any nucleotide
  source 1..20783: mol_type = other DNA
  misc_feature 1..20783: note = Fanzor polypeptide
  variation 10106: note = n is any nucleotide
ctcgggctcgcttgcctacccacctcgtccacgttcttgcttccttgacggactgcagcgcctgctgcgccaacaccttataagccctttcggaaccctccctcccacccaccccgcttacctccagtgcctcaccgctcgccaccgaccgtgctgactgctgacccccctccccccccgccttctcccgaccgcgcctccagcgccagcacctctgctgcgttgccccgcaccacgtcgggccgccaccgggcggtggtccgcaccggcacagcactgcaacccaccgcgttcagccagggtagccccagctccacagcctgcgcccggcgcggggtgggggggtgggggggtcgaaggcccggtgccacaagagcagggtcagtagctgaggggtagggcggggtgaggcgcgcagagcgtgcgcgctgaatgtgtgcgcgaaggaatatgcgtggcaagccgcatgaatgaggggccatgggcgaaagccgcaagcaaagcggggcggggaacgctgggggggggcggcggggtcgttggggaaggagcgtttgcgcaagcacatcagttcttgggactgggcaagcagtgccgggaaagctggacgaggacccccagcagtcgcggttgctcctccgggaagcgctggtccccgcacacatgaacggctggtccccccacacatgaacggcactggacaggcgagtgcagaaaacccctgcgaccgggtgccgccgctgcacggttcccccttcgcttcccgcctccctttccacgccccgccggcccccgcccgccttgcttcaaacgggcttttgagtcatacgcagctgtctttgttctttacccacccccccttttctccctcgccccgcaccatggctggcgagcagcccgccgctagcagcacgttggccatgacgcccatggacacgaagttggtgatgcggcggacgagcgggcgcttggcgcgcacggccatgccacaccgcgccgagcatgaggccgatgtcgttttgagctggagctcgccaaggagcagcctgatgagtgggggtctgcggaggcgggaccctgccagcgcttgggggagggggaaaagtataaaaagcaggggggggacgcaatcgaacgaaccatgccctcctgaccccagcccccacgccttccacgccctaccagccagcctctcccgcagaagtgcagctccagggccccagagctgcccgcagcggggtctcaacacccgacctgtcgcggtcccgacgagcagacgtcgtaccacgtctggagaaccctaaagccctgccatgcacaaagcccgccatgcaagcccactcatgcccactcacgcctgttcgcccaagtatgcatgtgctagctaacggcaaattgtcatttgcgttgtgtagttcggtagttcagacctaggacagcagacataggtagatgagcaatttaggcgtagcctgcctacaagcggcgtacgaggtatggtgggagggacgacggcgaaagaaggctaggcgagctcggaatgccgctgccagctgcgctgccggccatcaatgagctagaaaccctgatttgccaagtgtctcccatgcgtcacccccctccccccccccatcacgcccgcttccgggcacgccccttcacactctctccctccctcgtgccacgccatgatctctgcctgcagcccagcggcgctcttgaccccatgtggtccccgctggccattgtgcggggacgtcccagctgccctgcaggacaagggtcccagcaggaaccgcagccagcctcgtccccgtcacccgatccctcgagcatctggctgccggagatagtgcagcgctttgccgactcactaccgcccaacgaggtgccattcggcttgcgcctggtcaacaaggccgctgccgcgcagttccgcgggccgcaacacagcaccatgcgcctgtcgcagcccgtgccgcaccacgcgtttgtgtggcgctgggccggccctggtgcaatgcggcgcctgacagcgagggaccggagggccctgccgcagctgacggcatgcagcggcagcatcgccaacctggaggtgctgcttgcgcgggatgacctgagcttggacccgcgcaacaagcgagactcgcttttcgaatccgctgcggaagtggggcagctggacgtgtgcgtgtggctccggcagcggggctctcccgtgggaatgtacctgctggatgcggcagccatcggtgggcagcaggcggtgtatgagtggctgcttgccaacggctgcccaaagggagacgaggtggaggcagctcacttagctggaacggaggggcatgtgggcatgatggactggctcctgctgggcgccaccgccccggaggagacgtcccttgatgagtcggcgaccctcctgagagccgcggcggccagctgcgacctgcccacgctgcagcgcctgcaccacacctacctcgatcgcctcggcagggagctgccggatgcactgcggcagggggtggtggccaatgcggccagatgtcccacagcggactggcgggccaaggtggagtggctggaggcgcggggctaccctcaggacgtacgagcttgctggcaggcagcagcaaagcctgacgcgcttccccggctgcaatggctgcggcagcggggctaccccttcagccaggaagtggctcacagcgctgccggggggggcaacatggaggcgctgcagtacgtgctggtgcagggcggggtcaactatgctgacgggggcttgatggacagtgccgcccagggcggccacgtggccatcatggaggtgctgcacgcgcgtggcgtccctgcaggcagccgtgcgattgagagagcagtgggcggaggtcacctgccggcggtggcctggctggtggagaggctgggcgctgacacagccctgacagtgggtgtgtttaaagatgcggttgaggcgggtagcatggcgctaatggtgtggctgcgggagcgcggctgcccgtgggatgcggccgtctttgccgcagctgctcggcatggcagcgaggagcagctggagtggctggcagagcagggctgccctatgggggtaagctcgggtgcacaccactgtgtcgctgatggagggcggggccgccaattgccttttcgatctcggcttagtgccgtacgtctccatgtggtcctcacggatgtccttctggagctgctgttgtacgtttaatcgtgaatggggtaggctttcagcacccctgctggcccgtcctcgtgtttcgcaaccataccctcatcgctacctctccttaaacttctgtaaatgcctgcctgcaggacaatggcctgccgtacggggaggccgtctgtgctggggacctagccatcctgcgttgcctgcgacgcctgggctgcccgtggagaactgacggaagcaccttcacatcgatactcaagtggctgaattacgacctggaggaccatgtgaagtgcgcgctgtgctggctgctggaccagggctgcccggtggactgggaccaggtagaggcaacagcagcagagggccaaagaattgacaagcagctggagtggctgcgaaggcagaggcaagagcgggcctctcctggagccctggagtagcacaatcacacatgcctgtaggtctggcgttgggcagcatgttacgcgcgcgctgtgctggctgcgggaccagggctgctggctgggacgaggttggcagaggcggccgcagcaggttcgagtgtaggaagcagctgtgcacatacaactgcagcaaggatgctgggtccgcggcagtgggcggccattgcgcatggggattggggaaagggcaggggggcgcgagcacggagagtgggcactgggttgtgcgcggctgttgaacgcctattcgtttatgtggtgacggggaatgtcggctgctcggacggtgtcggctgccggggtggcggcgccggcgtgctaaattgcgctaaaccctaaatgcaaaaccacaatgcgcctgcggctgttgtgcactcggacgccgcgccagaaccagcatcactggctggcgaggtccgctcgagcgtgtcgcgtgtgttcactggcgggttggtacggccggggccggaggatgaagatggaggaggtgacggagcggtggggtgtggcggcagcggtggccgtggtgctggttacggtgccagtgccaggaggggcagcccctctttgggtggaaagcagcagcagcattgaggacgcgcggcatgcgatggcggcagcctcgctgcgcgctgcgcctcggactcggacgggagcctcatcagcagctcagccgagggcgccacgcgcgccgccaccaccgccgccaccaccaccatatgccccctcatgggatctgggctggcagcggctgcctggagtgcccagcccagcaggtgggtggtctggcggtggcgggcgagcattgcggtggctgagttgggggcagcagccgctgcagcgtcccccggggggcacacccggcaggggtggcgcccgcaacggcggcgacggcagaagctactgacgagctgcccagcgggggcgtcggcggtggggctggcggcagcagcggcagcggctgcgggcagtgcggcgaagagcgcagacttcgggtgctggtggagtacgtgttcgagctgtggcagctggtgccactgggtgagtggctgggcgctgggcgcggttggacgagcatgcaggcagggccggaggcagcgggcaggggggccgggcggggcgggggctggaggattttgcgaggtcaggtcatgtacccagctcccaccccaactcaccccccacggcgcttgtcgcgcttgcacgctgtgccttcacccgtccacaccttcccccgcaccccgcacccctttcctcgttcgcggccttgttttcaacgggctcttgcatttgcgcagctgtctgtgtcttttagccccgcaccccacaacccgcagacccccgcacccgctgcacggctggctggtgaacctggccgtgctgctgctggcacccgatcggccagccttacacgctggcagcggccctgccaccggcaccgcagcctgcaccgcggacccctccaccagcagttgcggtggcgcgggcagctgcccgccacggcggcgcagccgcaccgcgacaggcagcagcatgggtgcgggcgggtgcttggccgctgcggcggcggcagggtcggcagcggcggcatctgccgggggcggcgagggcggccgcgaggcggctctggaggtcaatgcggcggatgagaagcaggcgctgatgcggtgagcagggctggcaggcggtgcggtacaggtgcgctgttcgggcctccagcctgcatagtgccgcgtttgcggccccgtttccaaaagcttttgcgcttgcccaactgtctacgtcttctttctagcccccatacacatgctcctcagttgccgcgttctgggcgagtcttgtgccctgggcttgctcctcttgttcgtctgtatgcgccccccccccctcctcggnnnnnnnnnnnnnnnnnnnnnnnnnnnnnnnnnnnnnnnnnnnnnnnnnnnnnnnnnnnnnnnnnnnnnnnnnnnnnnnnnnnnnnnnnnnnnnnnnnnnnnnnnnnnnnnnnnnnnnnnnnnnnnnnnnnnnnnnncctcggtcccccccccctttccccttcaggcagtgccgcgcacacacgcaatcccgcgcgagagctcgtgctgcgtcaaaggcttgtgcaccgcgcttgcgtttactgtcctcctacccaccccactcacccataccagccacactcatccacacacactcccacctgcccccaggtatggattatggttgcccagcgccccgtttgcgttcttgtcgcccaaatggactggtgcgctttcgcccaggtctttgttctaggaatcttcccccactccgcacgcccaggtggctgctgggcagcggcagcatcgtgcagccgcttgctgctgctggcagcctggacaccgagctgacggacgaggactacctcgaagcggcggtggcggtggtggcggccagggtggtggcgggcgcgggctgcggaggctgaggaggcgggggacggcgggggaggggggtcggcaagggtgggccgatgacggctgcggcagcagcagcggcgctgttggatcttggccccgcgccgggcttcttgccggggatgctggcgttactgttcgggcaggtgggccgggggagagagtgggggcggttttgaggttgttggatggctggggtggtgagggacgaggatgaggcgatggcggcggtgagggggagggggagcacgcccacacaagcatgcgggtctggtgttgggcagcatgtgacacgtgtgatgtgctggctgctggagcaaggctgccggtgacggatgagacggagacggccgcagcagcaggatcgggtagtggaagcagcgcgtgaacagccgcagcaaggaggctaggcccgcagtggtgggcggcctcggcgcctggggaagggacaggagggcgcgagcacggggagtgggcgctaggctgcgcgctgctgttgaacgtgctttgatatgcggtgacgggaaatgcgtccgcgcaagtgtttcaagtcccaagggccccgggcaccagctgcgaggacgaagggatggatgatcatccccttccttgttgtgccctgccgctctcagcgcgcaaggcaaggggcggagtgcaggcggcgacctgcaaattgaagagggttgggggctgtgccagtggtggtgtaaacaggctagatagcgcgtgggcagggtagctgttctgcagggccctgggggacggggaggaggatgcacgccatcacggatagctggagatggtggggccagcaacagcgcgctcacgtcggtggccccagatctagtcggcggctccagatctagttgcggccccagcagcttcgtacggtcacaggggacgcgtggcacgtggctaggacagcgcctctgcggggtcctgcctctagtggtgtgttggacgaaacctcccggccatgcgggctgccggccctgcaatgaaggggcgcgtgctttcaatgcctaaccgcgtactgcaccagattgtaacgctgtggagggcccgggttcatcctgtgcgccaactgcgggggcgtggggcacatttaccgggtctgcaactacccgatctgctctttcggggtgatctgttgcaggttgacatacgacaccaccgcctgcatgctggtgcccgagtacctcatggtgcagcggaaggattcgttgtgctacgtggagttcatacacgccaagtggtcgccacagaatcgacagtacgtcctgaagctcttcgcgtcgatgacgccggtggagcgggaccgcatcgcctccgccccggacttcgacacactctggtacggcttctggcataacgacacgtatcggagctacatgcgcgagtaccagcaggcgcgggaccagttcaaccagctcaaggcgggcttcaacttgcgctgcgcggtcatcgccttctcgctcgcgtacatcctggcgaacaccaaggccgagtacgacgaggcggagtgggggtggcccaagggacggcgcaacatcaacgagacggacgtgcgatgcgccatgcgcgagttttccgaagagaccggggtgtcccctaaggacatctcgatgttgacaaacatgaaacccgcaggtgaccgccaggtcgctgcaggcgcaggaaatcggccaggtctcgtggtgcaactacggcacggtcttgtcgaacatccgcgaccacaacgtggagcgacgcgagcttttcaagcgcgtgcaccagctcgtcaagaacaacctcttcaacatcatgctcatcgcaggcaagtaaggtaaaatacgtcttgagccctccttgaggtccagcgagcaccttgtttagaaacaggaaaaacgatccttacttgctaatgcgcgtcgtgtccttggaggcggcgacacgggtacagcgcatcccgacgacctcctttgctgctcgcttttgctgcaggctcggtacacatacagttggtgccaaattaaaatgggacgctggaattagactggaaatgaccatcgcccttgaaacccggcaccgttccgtgattcactaaaagtattacctcaagagcgttcgaaaagtgagtaagctgtacggcatctcgaaatcatccttgcaccgctggctgaagctcgccaatattgccgtaaaaccaaaacgcagaaggacgtcggttgtgtccgccattcgcgggtgcatccaggaggttcctcatacgcaatcctttttgtacagtcgcggagctggcagccatggtctccaagagctgcaacctctccatttccccccgcagcatgaatcgacacgtcaaggcggcccgctttacctataaaaaagcctatcgccacgtggttctgttgcggtccgctgacacccttcggtcattctgctcagagtacttgtcaacccccgatgagcgcatcgtctgcgtggacgaggtcgggttctatctcgatgattacccgcgtcgggggtgggcacctcgtgggaaacgagtggctctctcgggggccccaaccttacgacgctctcggatctcggtcatcgttgccatcggcaccaccggggtcctgcattacacgattctggaggggaattgccacaaacacgagttcatccagttcgtgcaagagctggcgcagcttgtccctcctgattcgacgcttcttctcgacaacatcagtttccaccattgtgcagaggtccgctcaatttgtgccaagcacaacctacggctactgtttacacccccgtattccccaaaactcaactcaattgagctcttcttcggggtcttgaaggcacgctaccggcgagcgtgtattgctgtactcccctgccagcacgagaagcatacggctcgttcctttgaggacttgtacatcgaactcttcgaatccgtactggcaagcatgggcctccttgacacgggcgctttcttgcgcaaaacgcgggcggaagtcgcgtcgtcgtcagcgagcatcgagttggggacgttttgcgggtaagattcatgacacgaaaaccgacctaaggaaatgacccgcggtgtattcagtgagatgcgggcgggggccaccggcgcagaagaggccgggcaggatgccttggaggagctggagttcgaactgctggcggcggccgccagcaccacgacggttgcggacgatgccacaatcaccgccgtgaagatgaaactgaacagcttctgcaaggacagcccccggcttcgctctcagatccaggcattggtgctgagcatgaaccggctcctcggcgaggcgtacgcgttcgccacgttccacattctcaacttgcacgactgcggcacgtaccccgccatcgaccgcaacttcttctaccgctgcctcgtcgccgtcagcgccaataacagtcgcccggccacgcttggtcccgaactcgtcaattctcgcgatgtatatcacgcgcttcgccccctgcaaggccccggcagccagccggtcaacacagtcgggtacgctcaggtcctggcggacctctccatcgtcatggcaacgatggccgggaaccacctctgggaaaacctggagaagcgtatcttcaactacttgaaaatgaagtaccccggccagctgatgggggaccccctgcgcaagaaggtcgtcgaagcattggtacgaaaacccctggtgtgcacggcggacctcttccagctctctccgtcggttcccccggactcagcggcggccgagcggctcaggcacgctcgggccgttgcagacgagttgcgcgtcgtcctgccgctccccagcggggaccactaccagacccgggcgcacttgaccattcccttgtacatcaagatgctccaagagatcgaggaggcgcgagcagcagcagcagccaccaatctcaccgcgggaaagacggtgcgaggacgcgtgttgcccncggagcaagatcaacctcagcaaccaccgcacgcgcaagtggaacgccgaaacgcgggaacgcgtggagggccttccgagcgcaaggaccgcctcgatcgcggagtacgccgacttcgtgcagcggtacctggtcctcctgccggagctcctccagcatcgggccgcgaagggctaccgcaacatgcggttccttcgatacgtccaccgccaagagtcgatccacgagatctgcgaggtcatcgcgccgcgggagggaggcctggttgtggtgggcttcggggactggcggggcgtcgggaccacccccatccgccggcgctgttccggcccgctgcaggacatcaagaagcacctccagaagcaggcccatgtccggctcgtgatcatcgacgaatacctgacctcccggggctgccacgggtgtctgaaccggctgaccaacatgagagccgcgccccacacccacgggccggggaaagaaagggtgcagggggcgacgacccaggtacacaaggtactccactgccgaccaagcagtcaggcagctgctcgcagctgttgcggaaccacgtggaaccgggacgtcaacgcctccaaaaacatcctcttgctgacgatgcttcgcttgaaggggtaccaacgtcccccggaactgagcagaggtcaccagcaatgatgcaaccattctctaagaggcccgatcaaacaagcggagcgggaggtgtcctgagttcaagatgccgccctggtgatgttcgatactgccgaaaagcaggtcaccttcgaagcgggtgacgggttatcccgagagccctctcccacccacggacactggtggggagaggaaatgcagtccgtcaagccaattgatccgaggtgtcccaaaataattggcaacggctgtaccaccggacccgtactcctactattatccgagccgtacacgttgcactacgaaccccgtcctcgcccaggttcttctcggaagatgtacgtcgtcgcacatggtcgaaagaaggagctgcgcaaggaggattacgtcgccctcatgcgtcgcgttgggaagcagcgtgggttcgcgccgttgaagagcaaagtcctggtcccccgtctttgaatctcgtaaatttaactattctctcttatgaaatgacagcacgtgacctcgagaaaaagtaccccaagctggccaagaattacgacatctgtggccattttgggacgcttcaagggcccgacggcttgccgttcatcaacgacaggtgggaggtgtggtgcgacgtcagcggtgtcgtcctcgatcgaaaacccgtcagcatttgcgacttcttgacgcagacggatgaccgacgctccaggtactggatgaagatcgcgaccaacgcggcagcctctgaggatgtgcgcttcatcaagatgtcatctttcgatcccagacgtcccggacaagcctatgtcctgttcaagagaaggaacttcttggcggctgtcttgatcggctacatgcactggttggaccgagacacgctgggccttggaattccatcggacggtgccgttcaaaattacgtcatcggtcgtgcgttcggttatccggtcaaagacatccgcattatgagcttggcccaggcgttgctgggtgttgggtggggtaagatgagcaaggtcgctcagcggaggggcttggacaagtccagccaaccttacaaagtcgcagtcgccgcgttccacagagtgcaacgggaaggggacgccgtttggaagcgtttggaagcgtttggcgagcacagaattcaagagcttcgccgccggcatgttgaagcacgtccaaaaagtcgagcgggctccatgactaattccaacctccgccgcctctggcggtggactttggcgcgctgctagactcggccggcgccaccgcggacccgcgcaccgagctgtactgtccgcgcggtgcgcgttcttccacacggtcttctacggcggcatcggtgcgcccgtcgagctcaacggggaggttgctgtgggcgacagcgacagcgcagcctttggggtctccgggatgtctccgagtatgcgcgactcttgtacgtttggtttacatacaattcatcgagttacgcgggtcgtgtcgccatcatcacggatagctcttcaaccacatggtggtggagaccggcatgtctccgcgagtataccttcaacacacctgagacaaccaacaccgggtcgtacacgaccaagggcgggtgtgagccgagccccatcgacgtgaacgtgcggtacctcgtgtccgatccgacggtgaacgcgccacaatccgagtacgacgcgcacctgatgctcatgacctgcggtgtattgacgtggttcttcgcgacgttcgttcattttttgaactaccgcgcaacgcgcattgatcgtggtagtgcgtggtcatcgcaaatgtaacggtcaaataataaaagtataatgtgagaaaagaggggatgggtagacgatcgagcaagtccccggcaactcgcaccgtaactcgcaaatccacggagcagccgcgcctccgtgccgcgagtgcatcggcgcaggcccggctgaaccggaagctagagaagaaaggcagggtgatcaagactgtcacggccaacggcgggcatccgtacacagtcatcgtcaccccagtcgaagacacgggactcctcgacgtggtcgttgtgaccgtcgcaaactacgacaccgaggagtgggtgttcggcaagacactggtactcaagggcgtcgatgcggtctggatggggtgcgggacttacgataacctcaacgacagggcagttggcaacaccgtattgatcgtcaaagggcggcagtgtgtgtctgttgcatcgcgtgtcgacacaatgacgcttcaaccgaatgagaaagtcacgcgatacgtgtctacgattcagaacagctcggtgccgtacggctggctggagaccgaccgaggcatctacgcgtttccgggatgcaattgcgtcgataaggtctctttcatccctaaagcagccgccaaggatatcgaccaacgagattgctgggacaaggaaaaaggcagcgtcactgtgaccaacgcccggcgcctcatgtacaagtgagaagaggccttcctcaggcgcgactctcgtgtctttgagtttacatgcttgtctcacatcctcaaatacagccgttgccaattattttgggacacctcggatcaattggcttgacggactgcatttcctcttcccaccagtgtccgtgggtgggagagggctctcgtcacccgcttcgaaggtgacctgcctttcggcagtatcgaacatcaccagggcggcatcttgaactcaggaacctctgagagaatggtgacctcggctcagttccggggacggtggtaccccttcaagcgaagcatcgtcagcattccgtggaggcctaaggacggggcttatcgaccagccaaccttacacgtccttccactcgtccgcccctcgacctcttcctttgtcgacgcgaggggtccagcggatacatgaaaattgatttccgtatctaggtgtaacacaattcatttggcggactgtaactccctgacctctcctcgagacgacgacgacgacgcaggtgtccccaaaagtctattttatggtaactcccctgactctcctcgagacgacgacgacgccgtcgatgtccacaaaagtaatttggtatgtcccctgatttctcctcaggacgacgccgccggtgtcctcaacagtaatttggtactctcacatctcctttggtactctcacaagatcctctcgctagattttctcgcaacatcatcccgagtgatcgtaatgccgcagttgtcccaaacgacgataccgctccccgaccagtgacccaccggggtcacatcgagtttgatcgtcccggggatgttgattccattccaaaagctcgacatcgcgtcgtccaggtggatgtcatcaaagaacatgacacctcggaacccagcattcacaaacgcgtccaacatctcacgctcctgcacgccatcatggggatccacgtcgatcatgaggaacttgctcccgtccgcgatctccttagcatcattcatacagttcccgatgcggaactcgaggttgggtgcttccttccggaacacctgcatcgcagaatccgggatgcacttggcgatgtcgtacgttatgacgctgacgtctgggttgtatgtcatcgccaggctgctgaacccccgatacgttccgatgtcgtacatacgcgagccagcgggcatcttgctcgcgatgtatgccaacaaacgatagtgctcctgcccagcaggtttattaaagtactgcgtgcctgcctcgtgccagtggaccgcccgcatgtgcgccaggctgcactggtcaatcgcatctttggatagatcgatgttgaggatggggaccatcctataataagacctagtcgtatcacatgtgaacgactcttaagtcacttagtagtcaaaatctacgtgaaagtacctccttgcttggctaaaaaacgagaagtcaaaatctacgtgaaagtaccctccttgcttggctcgattttacggcggtacgctgcagcggcggcggactcggaggctgagccaccgggcttggtcgtgctggagctcacagcctcgggttcgctgcttggggcagcaaagggtacccgaatattacagtactttccggaggtccaggacgaagtccacgttctcctcgcagccgctgcgcgccacgatcgcgccgggcgcgccgaacttctttgcgaactccggaggtggcacatattgtgagaggtgaatgatccgctgctggaccttaacctcaatcggactgagcagccgccactaaacccatcacctcctcgctgatctcgtggcgctgtgcgaacagcgcccagtcaaggcccggcagcggctccgccttgtggtcaagaatccatttgacggcatccagcttgtcgggagaccgcagctgtcgagcacggctgcggctgtccagcacggccataacggtgtgcatgtccacgaggatgccggtgtcgtacaggagctccatcatgtcggggtggtccaacgcgcctaagtagtactgcgatgcagagcattggctgtgaacgcccttgccggccagccaccggacctgctgcaggctccccgtccgcacggctcgcacgaagtcatcgttgccgaacgggtaccccctggcttccaggacgagcagcggctccatgcggccgcacgggatgccgtcgaggccgtagcggtggtttggccgacgagcctgattggacagtagaaactccaccatccgctcatccccaacgtccagcgcgtgcctcaggtactccgccttgaagtgtcgcttcccgaggctcctgagggtcgtgaggacctcgacgctgcccgcccattcggtgtcactaagagggtcgaacgggtagcaggccgccgtgtaccgcagcgcggcgtcgttgccctgtcggaccgcccgcttcagcaccttgtcgtcgatcgggtactccagcgagcgcaggatgtcgagccgcgccttccagtcaggcgtttccaccgcgccggcgcaggggtccgaggttttgactccatcacctccaccggaggagaaggcgtctcggtcggaagtgaaggacttgaccttgtccagccagtcggtggtggggctggagcccgccgcgaggaggagattgccgcggtaggtcgacggtacccacgatccgatgagccgcgtcattaggggcaggtcgcagcccttcgcagcggcgcacgcgaaccctagagacttgaaccgagactggcccgtctctttcccgcggtacatgaggatttcgtccaggagttcggggtggccacaagcgacggcgacaatggcggccccgcgtaagtcgtacgtatcgtacgcatcgtcgtctcggtttagcagctccctgcagagctccgcgctccctccccgtgcagcggcgtaaaggatgctgtcgaccgcgtccagtggaggctgcatgagcttccgggcgagcgccacgtggcccgcctccaaggcacccttgaggatctcctccttcgtgatgcccggcgcgtgcttccggagggacagaacgacgtccacgttctcctcgcagccgctgcgcgccacgaggcgggcgaatttggactgctgacgtcgggaatagacgtccatcgcgctgggcgcgccaaacttcttggcgaactccgtcggtggcacgtattgtgagaggcgaatgatccgagagctgaaggcgagacttgcagccttgcagtatagccgcgcgcaggcgatgaagttgggcgcgagcttgccgatgaccaggagctgtacgtccaagtccatcgtcgccatgagatcgtccgccatgatgtcactcatgtcactcaaaaatgtcactcatgatgtgggtcatgagcctttacagccgttctcacaacgcttccggacaggccgggtgacttgacaataccttctgttttgtttgtttatcacaagaatgtgcaagaaatatgagtcgtacgacagtagtacgagttacaacttagccttagtcacggctcaatactgacttctacttcttctccgcgcgccgcatccgcttcgcgagcttgtcgtggagccgtttcttcacagtctgcaagtccttgcgatcgaggcctccatcatcggcattctccatgaacctctgcaggatggagttgcactgctggcacacgtagaacccgtcctccaagagcacggacgcggtcttgcatgtgctgcaaacgtcctctcctacctcaccttcagactccggccccacgacgtcctcatgccctcccctgacagcgatgcatgccccgacgacgtccgtttcaaacgcatcaggggcttcgaattccaggtcaatatctgccatttctttgattctcgatttttaactttttttatgttgaacgttcaatgttcagatggacctcaccgccgtgctcaacatcgtcctgggcgtgttctacgtgctcctgaccctttggctgctcttgtacttgaaccggctggaatcgatgggctgcgaatgcgccgcggatccacggcgccccttcatcatggcgtggctcttgggctccatgctgctcgcgatcgcgtcggtcttcggcttccaggtgcccttcatcgcgaccgtcatcgtcgtcctgccgctgcagtccctgtccgcggtgctcacgttgcagtacgtccagcggctgcgcaaatcaaagtgcgcctgctcgcaagccctggctcgcgacgtcctcctcatcgtggcggcggtggacctgcttgtgacatgcctctttgccgtgatggccctgtggatcgcgctccggctgtccagttacgtactgcgataattagaaagagactcctctcgggggaacaccaggcggaacgcgttggggtccgctccaaacatgcttgcatgcgccatgcgctcctggactggctccgtgatgaagtgctgcactgactccaccgtgttgacgacgaccaagtccgctggcggtcgtgtcagcgtttcccgcatccgcgcagtcaggaactcgtccgtatccttttcgatgtccatgtcgtcgaagtatgtgagggctaccaggaccgtcatcttggtgaccgagcagcggtacttgccgtagtcgacgaggtcgtcgacgcgccacggtttgcccaacagcacgggtgttgtcaaggtgaggggctgcgccgactcttcgatgaagctatagtttcgtgtcgggcagtttttcaagcgcatcaatgcattctccatgaccgcccacttcacagcgcccttcacgcccttgacccccttgacgtagaacagcccgttgacgtgcaccatcttgaactcaaacttcaagacgttgatgcacacgatactggctcggtccgtcggcggaagctccttgaggacgtccttcatgatgccgttgaatatcggcagcagcacctcctccatgaacaggttcgaataggaccatggccggtacgtcgggtcctccttgattttttcaacggtcctgacgtaggagtccacgggcttgacttcgatcttccgcatcatgtccccgcattcccagttcagcgtcccaaccttggtctcgacgctgtgcgcgacgacgctgaaatcgaggaagatgtccatgttgcgaagactcgcgaagactcgtgacatttgaggacccccttatttcgttacaaaatctgaatccaacgctgaatccaaagctgaatccaacgacagctcagagcctccgtccgaccgacggacatcattttttgtccggccgacatcaaccgacccgccaagtgtggctgcacgagatgcacgtgatgatgatggtggcgggctcgtccgcggagcgcagctgcagctcctggtagacgcactctcgcttcttgcaccgcttgcaccggtactggtcggtcatcgccacgggtttgaccgtggtggcgtactcgtccttctggaccttgagctcgacgacctcgcgccaacgctccgggaagatctcctgcggcttcatgaagggcagctcgtgcggcttgacctcgtccgcgaggacgcgcccgatgagctccgtgttgcccacataggacgccgggtccaggttgttcagcatcgcacaggtcttggcgcagtagatgtccgtgaactttgcgttcgtccacgctttggggatgcggaacgcgtcggcttgctgaatggcccagttgaagatcccgacttcgaggtccttggcatgcgagtcatccagcccggtcgtgtctttgaccaactgaaccgcccgctcgcgcaacgagccctccgacgtcgacatcgacatcgacatcgaatcacgtttgaagtcgctaacgtcactttaagttgaaatgacggatctcgttgaacaatgaaggatctcgttggagcaatggaggatctcgttgtacaaagtacgcatcacaaaaaagctagaccagactgtaactcacgcaatgaacgtaaaaccactgaacgccgttgatctctttgcaggaatcggaggcttctcactggcactgcggcccatgtcaaggacagttgcctattgcgagagcaatccccagtgtcaggttgtgctccgcgccaacatggcacggggatggttggacgaggcgccaatctttgacgacatcacgcgccttcacggggcctcgtctggcatatcgtgcgcttggtgcgcgagctccccagcgtgcgctacgtcctcttggagaactcgccacagatcttgcgtcggggtgtctatgcgctgctgagggttttcgaggccgagggcttcgcatgggcctggagcacatttgaagctcaggaggtgggagcaccgcatgtgaggcgccgttggatttgtctcctctggcgccgagatggcccgctgcctcccgttcatccactcatacagttgccatacacaccgaactggtcgcgggaccctcctatcacccgccggacaacgcctgtcaaggccggcatctacattcggcacgctctacttggcaacagtgtcatgccgcaggtggtgcacgtcgctgtgcgcaccctggctgtcgcagcacgccttgaagcaaccactgcatcaatcgtcaagcaaaaaacacccagcctgcacagctacattcacctgaccgctgatcggctactgtccaaggcagacatcgcacaccattcggttgttgcgtacgtgccggccagaccgcgccggcttgtgttcccatcggcgacgggccccgtcatacggactcgttgggcgacacccctgcacgggcgggttgacttttaccacaacctggcggaggccagcggcgtgaagcacaagcgcatgctacagtcgctcgtcacacagatcatgagcgaggaggttacccgccgctcgacaactgcccgtctcaccgcaagccctcgatttgtcgaatggctcatggggtaccctccaacatggacgatggcctagcttacatcatgccagctgtttccgggcagcggccacggccaccatcctggcggcgtcctctttgaccttccagcccttgctctgaatggcctgctcaatgagcgagtcattgccgttcttgaagttgttctccttcctggtcttgaccatctgcgcccacgcccctcgagcacccgggatgtccaagtcgtccaacaggtcaccaaacttcaccttcgaaggcgcgactgcccccggcttcatgcacgcccacaatccgagcaccaactgcgtaaagatggacgagctcttcgatttggttgcgacaagctgcgatagcgccgcctgcatcagctggatgtcagcctccagcgagtgttctgccgcatcggcatcctccatctcctcctccatcgccgccgcctccatcgccgcctgggccgcgtcctggaaccgggcgctgctcaaagactcgcggatgcccttgccgatgcgccccgtggcgtgcggccgcgtcgtctgcaggatgccggcgaagtgcgccgcgtacgtcttggacttccatgcgtccacgtccttgacgtcgcccgtcgccgacgccttcagcgcgtcgctcgtgaagtcgt

SEQ ID NO: 44 - DNA, 21746 bp, Spodoptera sp.
  source 1..21746: mol_type = other DNA
acaactcgagccttcgaacaaacctgcagcaccagatcgagtggaataataactttgttacatgtagcagcaactgagcaacttattgtagattatttaaagagttttttgattgtcgataccgcaaatataatattatggcatactctaaaaaattttaattaaacaccttgtgacatgttgcggcaatttattgtagattatttaaagagtttcttgattgtcgataccgcagatataatattatggcatactctaaaaaatattaattaatcaacttgtgacatgtcgcggcaatttattgtagattatttaaagagtttcttgaatggctcttgtgcgccttcaatgtaataatatttgatggtgatggttttgcaataaaattacttttacataatatgtgtagtatcattttcaaacaacgtcacaccttttatatccgaagggctaggcagatctctgtctttacctgtgcatctgcacattacaccatgtaatgccgctatacaatgctcacttttcaccgtaatagggggtgagccaattgccatatactggacattttctagatcattgccggcagtcgcacttgcgaccactcgatcaacgaggcagtcgttcagtttcgcctttggcgaaatgaggataaataaatagattttgatatggaattaaaaataaaactttattataagtaattttattagtaaatcaataaaacctacggctgaacattaaacgagaaacttcgcattcgagaaccggagtaggcccgaaagtagtagtatcgaaacttccgtgtccgataagcacctgcgtcaggcggtaggtgacgtagcactcgtctagctacgacgtagcactcgtctagctacgaagtagcactcgtcttgctacgactttgtacgaatctagctgcggtgtcattactgtctgactgacacttgaatatagaatcatttcataattcatccagaatctggcaatcgatctatgagcttagtatctacttggcaaaaatatacactcatcatgcgttgcgtatgtcctcatatcttactaggtaacatttgccgcgcaagcaacacgtgaaattcactcacaaattagcacagatagtaatttccaaccttcaaatgttcggcatcatcgcccaccagccaggatcatctggcctgatcgaaggattttcacttttctaatcttggttcaataaccagttaatccaataagatatataagaataagttaacccaataatagggtgtgccattgtcagttttaactgtaaatcgataaaaagatcaattgattgtgttagaaaactgtgttgctcggcggatatagtagccctacaagagacctggctatttccctatgacataccgatattgggcacaatcgaccaggactttgcgtacacaggcacatcagcggtggatctttcaaccggtgtttttaaaggacgaccttacggcggtgtggcaatattgtggcgtaaaagtgtgttcaaagaggtaactgttattgagtgcaataatccgcgtatcagtgcaataaaagtgtctttaggagatcgtgcattccttgtgtttagtatttacatgccgacaaatggaatagacaatttggaggagtttacgacatgttttggcgaggtatgtgcgatagttgaccattactctatagaatctgtgtacttactaggagattttaatgctcatccgggagaattgttcggtaacgaattaattaatttatgtatggatcaacaatggtcctgtgtggatatagatgtactaggaagtgtagcaaataattatacatttataagcgaggctcacgggtgtgtgaggtggctcgatcactgtgttactagtcaatctgccaaacaaactgttaagaatgtatatgttaattatgatatgttttggtcagatcatttgcccatagtcattgagtgtgagttaagtgcaattatatgtaaaaataaccattgtagtattaatagaataaataaagctgtatggggctatagaactaaggagcagataaaaagttataccaaattgtgcaatagtaaacttaaattaatagattttcctgtagagttaaggcaatgtagttgtgatatttgtaattgtaaggaacatagaatatatttagataaactatataaggatataataagggcaataacagactcagctattatcacctgtaatactcagtctcataagcgtaagaaaaagcatgtgataggctggaataagtatgtatgtgaagctcacagggaagctagaagtaaatttttatactgggtttctcaaaataggccacaatctggtactgtatatgaggaaatgtgtgaaagtcgcaaattgtttaaaaagagattaaagtggtgttacaacaataaagaacagttaaaaatggaaataatttcagaatgtcgtgcctctaaaaactttagtgatttttggaaagcaacaaatagtttaaaccataagactggccttccagtgagtgtggggggtgcgagtgatagcagagatatagctgaactctttagagaacattttaccaccaagtctcctctggggccgtgttctgcagatcctgggtctagcgtgaccggtgaattgtataacgtgtctgctaaacaagttcgtcaaattgtgagcagcatgtctaggggaaagtcgccgggtcatgatggactcagtatcgagcatttaaaatacgctggtgttcatttaccacgcgtgctcgcgatgttttataccttatgtctgaatcactcgtacttgcctccagatcttatgaaaacaatcatagtaccaattgttaaaaataaaactggcgatttgtccgataagaacaactaccggccgatttcgacagtgtgctcgactcagaacttgataaacatcttaatatcgtcatcatgacgcacagttcggttttcgagcaggactttccactgaaagcgcaattctgagcctgaagcacacggttcaatattacacgaaaagaaatacacctgtgtatgcatgctttcttgacctctccaaagcattcgaccttgtgtcgtatgacttgttatgggagaaactcaggaaaactggcgtgcctacacaggtgcaacgtatttttcatttctggtaccgaaaccagaataattatgtaagatgggcaaacaccttctcagacacgtacaggttgaagtgcggagtgagacaaggtggtttgagttctcctaagctcttcaacctgtacgttaacgagcttatagttgggctcagcagcactcgagtaggatgctggatcgacaacgtttgtatgaacaactttagttacgcggacgacatggtgctgctgaccccaactgtaaatgctatgagacagttgctcacaatatgtcaaacatatagccttcagcatggtttaaaatacaacgctgacaagagtgtgtatatggtcttcagggcccctggtaagtgtagattaaatgtgcccgcaataaagctaagtggcattgaactcaagcgggtagaaaagtttaaatatctaggacactacgttactgaggaccttgaagacaacgttgacattgagagggaacggagggcactggcggttagaagcaatatgctggcccgcaggtttgtgcgttgtagtgaacaagttaaagtcacactgtttagagcctactgccaaactttctacacgtgcaacctgtggttcaggtatacgcagaggacgcttagtgccctgcgtgtccaatataacaacggatttaggatgttgttggggctgccccgattttgcagtgcttccagtatgtttgcggaagccagggtagatggctttcatgccatagtacgcaaacgcctcgcgtcgttactgagcagagtaaggagtagcactaacagcatcctaagagtgattgcggaaaaacatgatgcaaatatcctgcaagcatttttacgtgctcaagtgttgtaaattatttaatgtgtaatttctcttctttgtaaccatttttaattgtgttttgtcattgtgtgtataatttctgtatggacatttgttctgaaataaatatttattattattatgtatgttctttacataatcacgggaccacagggtcccggacctttggaaggcgtacgaggggccgaagccaactcgcagaggcccgttgaacaattttaatctaaatgtaaggggacatcatccggcgattatccctgtatgcactatggaagtacaccaaaggacaatccccggttgatgcaggactattgtgagatatggtaaaaggaaatgatagggatatgggtgtgggtggctgtggaatagttaaccggttaactatggggactatggcccctgcccctgaccaatattgaaaaatacggataaacaggcagggggtgactcgcaaactcaatagtgggcccccggaaacggccgctagcatgtagcgacaagggaagcaacatccgttgagctgcttgaggaaggggaggcatcccacggctatcagagcaatcccggaagtacggtcaagacccctaccagcatcttactgggatacgtccttcccccaagtggagctgaaggcaactccactcttgcgaatctccactcaaaccagccgattaaggcaagagtgaggtaggagaggccactccggatagtcacgagtaccaaccggagttaaaaagtagggcctctcccgggagtcaggtccgtggggtcgccactgcccaacagctcgccacaagctgccttgcggacttattattattatgtttgttccttacataatcacgggaccacagggtcccggacctttggaaggcgtacgaggggccgaagccaactcgcagaggcccgttgaacacttttaatctaattatgtaatgggacatcagccggcgattatccctgtatgcactatggaagtacaccaaaggacaatccccggctgatgcaggactattgtgcaatatggaagaaaaatgattgggttatgggtgtgagtggctaatggactggtaaatatggtaactatggaatactatggcccctgcccctgaccaatattgaaaaatacggataaacaggcaggaggtgactcgcaaactcaatagtgggccccctgaaacggccgctagcatgtagcgacaagggaagcaacatccgttgagctgcttgaggaagggagggcatcccacggctatcagagcaatcccggaagtacggtcaagacccctaccagcatcttactgggatacgtccttcccccaagtggagctgaaggcaactccactcttgcgaatctccactcaaaccagccgattaaggcaagagtgaggtaggagaggccactccggatagtcacgagtactaaccggagttaaaaagtagggcctctcccgggagtcaggtccgtggggtcgccactgcccaacagctcgccacaagctgccttgcggacttattattattattattattgcacaccctatttgttttctaacttagtttgtagtctttatttgagcgcgttactttaaacaattgcatttttcatcctaatcaaccacattctcaaaataaagttcttaaggtgcgtttaagtaaagtaagttccgcgctatttttcaccctgtttagctacataatgtgcgacatgcgagtccttaaagaacatttaaaacctagaaaaatattttttatgaagaatttacaaaataagcggccaaaacatagcttatttgtattttgctttcgttctgtatttaaaaaataatgtggcaggtgtgcttcgattcaaggaaacatattaagagtagatagaaacatattagtagtatatagtccagtcatttggtagataaaaagggggttacctggaaggttttccgggagttttgcaaattggtgaatttatagatttgggtatgctcttttcgaatttcaactttgccacctcgtacacccgccgctcgcgccgccatattgaaaaaatggcgcctaaaaacggttttttattaatatctccgttccgacgcattttatgaaaaattatttatctacaaaattaaactagaaaaaatttcctacaatttatgtattgataactttttcataaaatcaagtccagtcaaattaggatttcacctcggaatttgagatacccagctgtaattttgtatatacttgtataatgactgcctgaaacttgtctcaaaacctacatatggtagggtgtaagcaactattaaattttaaggtcaaaaggtaccaaaaaacgtttttttgcgcttttttggaaatatctcatttcctatgggtttttggtatttgcatttaataccaatattgtagaatacaaaattctctacaacttttgtctaaactttttttttataccgtgcaccgtttccgagatagagggcggagactgcacctcttcaaaaaaaatttttttcgtctaacctatccgtgatggttgtctatggataggccattaaaatacgtcatggttcctaaaaccatttttcgtcaaaatcaattgtttgaaagatagacacttccaaagtggaaaaatgaggtctatcgaatgtgtcctgccctctaacttttaaaataagtgagtaagaaaactaaaaaaatatatactgtagattttaatggaaactttcaaagaaaattggtttgaacgagatatcataattagtttttaagaattgatacatttaaaaaaaacacattgtttgtacacgtggtggtgcagatgaataatactttgcggcgctcgtacgccaaaaactattgattttatgaaaaagttatcaatacataaattgtaggaaattttttctagtttaattttgtagataaatattttttcgtaaaatgcgtcggaacggagatattaataaaaaaccgtttacaaacaatgtgtgttgtacaaacagggaagtttcggtaggttcctgtttctgatgttatatgtgttatgttatatgttccaccgtgtcctccgggcggtcttcgcagtgatgacacccgggcgtttcctcccgcccaatcaaaaacaggatcctaccgaaactcctgtgtccggtaagcacctgcgtcaggcggtaggtgaggacaccatggcgcttctctagccactcctcaaacaggggacttacctctgcaatgacagcgagcccagccctcggttgcgacagtcgttgctgcacaacacacatagtttgtacacgtggtggtgcagatgaataatactttgcggcgctcgtacgccaaaaactattgattttatgaaaaagttatcaatacataaattgtaggaattttttctagtttaattttgtagataaatattttttcgtaaaatgcgtcggaacggagatattaataaaaaaccatttttagccgccattttttcaatatggcggcgcgagcggcggttgtacgaggtggcaaagttgaaattcgaaaagagcatacccaaatctataaattcaccaattttcaaaactcccggaaaactttccaggtaaaactaccaaatgactggactataatctattcttggcttttctcaagaaacggttaattaaaaactgtaaaaaagtttaaaaatcataaaaagttggtttattcattacatacatttaaacatgtttgtattagtttctgagaaaaaaaagaagagggttcaaattggctattaatttgatttgaatgtcagacaaactccaatttatttcagtcagcattttgttaattacttacttgttagaaaatgttagaaatattttattttgtttaacgcctcaacgccctcctacgccactcattcaaattacataagcccagcagcaagctcgtgccgttcttctttcacaactcatctgctagatgccagttaccacgagatgtttaattcatgtgtaatatgtattatcaaaattacacctaaaatattttaatcgcctaaatacgtttttgggtacttctatctggtcaggaaagagtacgtagtcagacggcttagtcgtccacacttgacctttttctaataataaccaataaaaataaatacaaaaaggcttcaagatcacaaaaagtgattctatcatattattgtttgtttgtagaaaaaaattacaaaaggtgggggtcaaatctgctactgctgtggtcttgtgtcaactaccaagactagtaacacctgcctctggttcaacagtttccagagtagcaacggacccctgaaggaagctgttgaaatttgttatcctatcagagttgcaggaaaacttcgcttgtgcgatgcaggtttttaacattttctagcgttgtaaacaaacttcaacgaaaagttacacagtataatgacaaaatacgaagccaaaaatcttttggccacatttatattttcatccaactatagattgaacttaaaaattagaatttaaactttcaaatttactaaatggaagtttacacacgattgacaaggacagagaaacaacaaggtggtcagcttcaaagcgccaatttcccggaaatattccttaaccacttatgaccaaaacaacaaataaatttatttttttcccagttttgtcatgactttgcaatttttctatctcaaatggaacctttttatgcgaaaacgaaagaaaaagcaagtgtcaaatttagtgccaccattcgaaagttctctacgtacatttcttttcatcgatgatagagcccagctactttgtgaaatttgttgttattattctatttatgcacccatagcatatacgaaacagacatttcggagacacatttcttcttttttcaaactttaaatacggcttgtcaaaactttcaatttgccatcaagtattttaggtctaaaccagaagtaaatttgatttacttagtatggaggagtttttataagttggtatcccagcctcataccccccgtactagcttcaaaatatatacggtcgcgtcagccatgtttttgtgtggcatacatttcatttattcaacaaacatgagtcacgtaaggaggacttctagatgttaataattattatgttttctagagtttattaaataagccatagttatattaaaaataaattttcacatattatttcactcggccgtaaggaaaaaaagtaaaggaaggcttttcaaaggatacactaaaataactttttagactgtaataaaaatatttgaaatatcaaagtcatgatggattccaaaaataataaaacttacaacttgcgagtagaagcagtgaaatgttcatatagtgacatctaccagagggtcggtgaagtacgaagtattcacctgtgaatacttcgtactaccctgtagggtaaattaaatccacagcgtttaaaccctgtgctggccgaggcacttcatatggtgatcgttggggtgcgttgtagtctatgtagcctatttaacttataattcaaacattttgataataattataacagacttcaggaatctgttttgacgtttaataatattgaagttttattggctttaaattgcattgacgttgagattggtttcaagcgtaagcgccttggtctggtaagcgtgtctgagtagagtgatcagacttgactttagcaacctaagtggtataccattctgctgcaagccatgtagataaataatttctgtataaacaacttacagtagctacgaatttgaccaaaacacttttgtacgaaaacgcagagcagaggtgagttggggttagggttgtatggcatttacagtccctggccatattattagacgcacggttattttttttcaatttgtaatacgtttagatgtgtttactcaatgtgtcatatatgtatatttattaacttcctaaatcccgatgtcctatgtatggaacatttaacataaagaattttgaactttattgttttttttaacctttagagccagggtacactcgtccctatataaccctctttcttcccttgtttcaattagtagcatggcggcatgtaagacgtgtggtggttcggaccatactcgaacaagttcaaaaaaatgtaaaaactatttaccacccataagaaaaaggaatctgagtgaatctacccaactagagatttataccgtcaaacgaggacttgcttcctgtctttgtccgctcttggatccagagaaaaaactcaaacttttgacagaaattcgacgggatgttcgcgatctctcacgagtctatatcgaactgggtgtttggtataattattatatgaagacaagcaccgaacttccacctaaaccagacgtgttgaatttcatctatgccatgaagggaaaaggaccctataataacgtatattctaccatgtttagtgagagaaaatttgacgataaacttcgctcatttgtggttcaagagatggcgaaacagtacgagactgtactacacacaaacatcagcacacacgcctactctagactggcccgctatttcaacgtgaagcgtaatgatccagcgttgttttcggctttcttcaagaaagtgctacccgacgataatgaagagatgcgtcgagtttgttctattatcaacgtggacactgtcggaggcgccaagtggtggtctactattccagaatggctcaaaattcaggcaaaacttgaagactttcgactatttccacaaccatcacatggactcaaacacattacctacacatccaggggttggcatgaattactgcgccgtgtagatccaaaatctattacgggcaattggcccaagatcattgatcatcgacgagaattatgggctccttggttagatattaacatgataaaatttgggtgtaccctacaaacagatggctttagcgtgagtctatcaatgagtcgcatcaaaagggagcctagtacgtcacaaccacagaaacgatcaaagaagagctatgatcgtatcatcgctgttgatcccggttccaggattcccgttgctgtggtggaatcgcgcaggttcaagtttcaacgtgtgacaaaaaaatatgtgcgctcacatacattggagtggaagcgtgcacgagtcaaagacaagttgtgtcgagtcagtgaggaggctgaacaaaaggctcgtgaaaagttggattttcccgtttcttctaaaaacatgagccatgtcgtggattacacggtttttagaatgcactggttcaacgttcgtcaggaaccgtatgagaaacatgctaagctctcacgtttgaaactagacaagtatatccgtaccgctaaatgtgaagaaaaaataatcaaggaaatattcgatgatggctccaatactctagtgttgtatggtgctggaagtaaatttatgaacaaggcttctttcagcggtcgtaaattcaaacatgactcgctcatcaaacgtctacggagtaagcccaacattgatgtagcggtcgtagatgaacagtatacctcacaggcgtgttcttcgtgcaacgctacaactggacagtttcagaagattgtcatgaatcatcgactacgctggggagtttgcccaaactgcaacagcgagtttgaccgtgacaccaacgcagcgaagaacattttgatcaattatacacggtctaccctctgtaggccaggatgttccaccaatggagcatcgtagcctcctatatatttttgtatctcggtgtcaataaggttcaattttatccttggacttttttggtgtcgggatttaggaggttaaaactttattatatgtttttgatttgtacttttttatatttgtagaacaaaagtgttaattaattcccatatctttactacattactcacgcgcttatctccggaagtacttgttccaattgaaaaacctttttgtcggagatagtccatttgttaaggaaggttatgagatataaaacattacgctacgctcaatgaaaacttcaaaataattacctactaaaaagcgtggtgcgtctattaatgtggccaggaactgtatgtaagtacattatacaatgtgataggggtgagacttctaacccgttaaggctgagttctacatctaattttatcgacaaaagtcgggggtcgaaggggtcgaatcccctccccctaaaagttatggctattttaatagtttttttactttttttgacatcaaaggttgtatgcgtcgtagaaacaaaaaaaaaaacgacaaacggtagctaataaccttagctaactaattcattacttttttcatatgtatgataatgttttggtgagaaaaaaaatcatttgtgaataatttttaccgaaaaaatcactattttccaatattttcaattaggggttcaaccccctatattattttttttgtcgataaaattagatgtagtactcagccttaacgggtcagaagtcccacgcctatcacattgtatatttctgtatacaagttatcgattaacatctgttagggttctgaatgtgtgcgtgcgacgcaagtgtacctgtgtgcagagcggatgcttaatctcagggaagacatgatgtcgatagtatcgatagattagaactgcacagttaaatcttatgtaacgttcataataagcaaatcataaaaaaaacatatgctgtccatctctatgcatatatattttttgaaataaatccagttttctatcgaccaaattagtgacacaaaacaaaatttaatacgaaattacttgctattttatagcgaatgatatttttgccattattttataaatgataactcatcagttatcatagttttaatcagttgccaatacatctattggcaactgattgaaactaaaactactaaaatccaaccagtatttttttatttattgattgatgtttttgtaatcagttcgggcattttttttaccgaaaccaaaaatgttggatatctcagaaactagccactttccgcccaaggacctcagggctaattttgtaggaaattagttgtgttatcacctcccgagaggaatacatcgaattcaaagtcgccctgtatataacggaggttaataaaatttagttttgtagataattatgagaaaatttcgatactttatcgataacactgctgctacactgtacatccctacaatacacgtctgtgttgtatagatgtactgtgtaaataagactagttacattcgtgcggggcagcgtcctggtccgcgcaaatctaaccagtctcattacgtactgcccgcgatacagacgtatttgacaaaataaataaatacattattgattattctttgtatttcaatattactaacgaacgaacgaagttactagtacaacgaaggtgggagataatacaggtaaataattgaatacacgtttatgatgaatgagtgaaataagaataatattaatagttttattgggtgaatgaatgactcatgagatatcaggtgtggagaatgagagaatgtttagtttgatagtacaaatgtaagtgaagcaagataaagtgtttgagaaagtcaatgatgatgatccaattccaattgtttttttttacagtttacgctgtccgtgaccaagatggctgccacactagcgacgggtcggatgtatattatgcgcccaaattttctgcaattcaaattgaaagtatgtgaaatagtgaatataggcaacggacacctgttctattttcttgaattatatttatatgaaacagtttcgtttagtttagttacccgattgttaatatgttttggaaaaaatattaattttattttacacccttcctgtcgagagatcgatctgatagttggaagttggtacacattcttaatcttgactaccatatcctcaaacagcgagtttagaaaaaattaaatatgtgtcttattattgttttcagttgacatcatggcgtcgtggttggacgacaactcgagactgcgaacaaacctgcagcaccagatcgagtggaataacaactttgttacgtgtagcagcaatttattgtagattatttaaagagtttcttgattgtcgattaccgcagatataatattatggcatactctaaaagatattaattaaacaatttgtgacatgtcgcggcaattaattgtagattatttaaacagtttcttgaatggctcctgtgcgccttgaatgtaataatatttgatggtgatggttttgcaataaaattactatgacatcatacgtgtagtatcattttcaaacaaagtcacgccttttatacccgaagggctaggcagatctctgcctttacctgtgcatctgcacattacaccatgtaatgccgctatacaatgtacactattcaccatttgtgttataagtccttgatgtaatagggggtgtgcctattgccatatactggacatttcctggatcattgtccggcagtcgcatttgcgaccactcaatcaacgaggaagtctattataaattaataattagcaataatgatgtcatattcgactgcttggttggtgcagtgcatagaccaactggctaccgaatgaaaatatattttagtgcggtttaaaactgtcacatacaaactgaaatgaatatggttgtgctcagcaatcacatcagtggcaagtcgtatgaaaaacattatttgcggaaacacgcatcaacacaaagtgatcacatttgatcagagatcaggctttgaggaagttgttagtttgtatgtgtttgtagatatcaagtaagcgccagtagtttcagtaagtttgtcatccctgtaagactcattaatataattataaaaaaaatcaaatattatttcacatggtcattgtgctcatgtataggaagactgctcaaaggatgactctaaaagcacttattaggctgtaataaaaatatttgaaatatcaaagtcatgatggatcccaaaaataataaaacttacaacttgcgagtagaagtagtgaaatgtaatatagtgacatctaccagagggtcggtgaagtacgaagtattcacagggtaaattaaatccacagcgtttaaaccctgtgctggccgaggcacttcatatggtgatcgttggggtgcgttgtagtcctatttaactaataatttaaacgttagataatctttataacagacttcaaaaatctgttttgacattaaatagtcaaatagattttattggattgaaattgcatcggtattgagattggtttcaagaataagcacaccttttataagtccggcaagcgcgtcggtgcagagttatctacacctgatcttcctatatattataataacaaaaaaaaaaaaaaataaggcttctggatcataaaaagtgattctaacatatgtttgtttgtttgtataaaaaaagtagtaaaagtgggggtcaaatctgctactactgtggtcttgtgtcaactaccaagactagtaacacctgcctggttcaacagtttccagagtagcaacggacccccgaaggaagctattgaaatttgttatcctatcagagttgcaggaaaacttcgcttgcgcgatgcaggtttttatgattttctagcgtcgaaagaaaacttcaacgaaaagtgacacagtataatgataaaatacaaagtgaaaaatcttttgaccacatttatattttcatccaacaatagattgaacatataaatttaaatttaagctttcaactttacgaaatggaattatacataagagcgacaaggacggagaaatatcaaggtggtcagcttgaaagcgccaatttccccggaatactttttaaaacaacaaataggtcagctcaagagcgcttattttgagaaatattttaataaaactcatcacataaatctaataatatacaatataattgagctattttgacacaaaagaaaattaaatattttagccaccattttacaaaaacaaaaatgaagtgatcgatttagtgccctttaccgagtaacgtaattacatgctttatatacatctttgatatccgtctctacaaataataactttagtcgttatttatgaattttatcaaaaaccttcaattatccgttttgagcggctaattgaaggttttttgtctctaagaccattttatttacacattattggggagttttagcaaaatggtaacccagtctgttaccccacactagcaaggatatcacagtcagccatcttgttgagtggcacagatgttttatacaacagacttgacttacgaaaggaaaggtactggctgctgatattattatgtttaatgatgcgttttaataattatattcgttaaccagtgctaatttgtattcctcgttttatctttttactcaattttatctttaattctcaaaaattacctccattttaatattatctgaaactaaatttggtaaagtaaatttaaaacataaaaatggacaatgctttaaacgaataaatctacaaatacctacagaattttataaacaaattattaagtcgtgtcttcaatttattaaatgtagtctttgacggtctgtggccaattacggatgtgtatgttagcagggtatggtgggggttgtttgacggaatcaccaacttaaagctaaaaaaatacacagaagtataaagttaaaggacaatggatactgttgggcgcatcactgaatagaaataagatacctctttttggatagatattcttatggaaaataaaatatagtattttcaatatagtgcctcttatattatcaaaaatatgatcctgatcaagtaattagtgatcttgtctctgttatcataagataaacattccaaaagtcaaggtttatatccccattacatcaactagaacctatttggaaggtagttcgataataaattgccacccatccaaatactaacctcggcaagcagggcttaccctcagaggtcgactcatatacatgaaattaattaacgacaagaactagacacatcagacacacagactacatctagttacgaagtaactctattctgctacgacgtagctagaccagctacgaagtagaaagcgcgtagctacaactgcgtgcgtcttgctacgtcggagcgcgattctagctacgacgtagcacgagtctagctatgacgtagcattataatagatatcacgtagtagaattttattgttagcattacattttatattcttgtaaattagtgaaccattatgtagtgttatttagtgaatcattatgtagtgtgtaaatagaaacagaaaatagtaaaaatacaggtttcatccatgtagttaaaaaaaaaattaccgatctttttacccgattgttaaacattttctttcgtacgtatcctgtgtttatgtatgtatgtaagtatgagtgcattattaatattaaatttatttctttttaatattattttgacaaagactaaaagactaaaactaacaaagactaaccttacttcacaaaaaaaataaaccggtacgaatcactgagtccagttcaacacacggcaataaaattttaataagatatatttaaagtgtaacgtagcttcattttgaacaatattttaaatagaagaccttcgaaaagacaacgaaaatatattaaattgactatattttgtgttttatcatattttttttggattttacagtgccacgtaatataataataaattaagtaaaaatatataatattttaagtttaaaataacgttcaaaaatgtaaaacgttctcctcggcggggaatcgaaccccggtcatccgcgtgacaggcggccatactaaccactatactaccgaggatgtgattgaaaatctgaaattgggcttcctattcgtcgaagtacaatagaaaatctcaaataactgttaaataataccattacaggttttaaatttggttccacagattgaaaaatatttatttcgttctattactagcatgtgtatacatagttaactccgcataagttaagatatagcataaatttgcaatttcatctggttgaggctactacaacgcccctccacgtcattcatacgaatcacatggttcggtaccatgctcgttcggtactgcttcgactacttccctgctagatgtcagtcaccacgagatttgaaatgaacgccttatatatttttttaaatatatgatttatgtacaacaactaccaacatattttccttttgttgtcatactcaatatttattttaaaattgaaaataatttgattacatattttattatgttgtagttactatgctgttttttatattttgaaatattaactatattttttaaagataacttattattattcatttatttatttacctttcttgatatttacattattaaatattcaatttaaaaaaagcacatttaaaaatataaaaagcagtagcccaccagtatcgggataaatccaagctaccggcagtcagggctcaagagagaggaatttccgggcaatacgcgccgtatccagaagtactgccttctgcatcaggctcttgatccaaccatctaacgttagcctactcaggtgttggtcgaggcttttggctataaggccattggcagatacgactatcggcacaatgattgctgaatctacatcccacatgtctacaacctcatgagctaaaaaaagaaagataataaagataacttattattagtaaaacaataaaaaatcatgatattattttaatctgatgatgtgggcaggttgatgaagaatgttctaaacttatactttcgcaaaattgtgtaatgaaaatattcaaacatagattaaaaactataaatataaaaagagatcttgaagtattattttctttaaagacaaaaatatcggctgttatagtaataattcgcgatccaccagtgaggtctcccacgaaaatatctttacggctttacacaacccctggaaatttaccttttattgtggacgttacatcgaattctaagccacggactccagggagagaccgttatgctattctataccagttgctggaaaacgttcacttgcacgatgtagaccttaatgttctttcatcatcgtcaatgataaaatgtttagcagaatcatctggcaattctctgttttaaatttttttattatattgaattatcttatagaagtactcactacgctaaaatcaattatgaactacaatgaacaatcagatatataatattaatattttagtgaattcataaataaatagtcaacaccatgtgtgtttttttttcagtaactttgtttaaccgcatctacacgcaaaaggggcgctactgtcgccaaatttatgaaaaggacgaaagcgatcgccaaatttaaagtcattttcacaggcacattagctcagttggatggaatagagcgtcgcttaacgagagcgaaggtcgtgggttcaagtcctgcatgtgccgtccttatacttttacttttttttaatcatatggagattaggttaatgatagggcatttactgtattttctgataatgctgaacaccactcgaattttttttatattaatttcttattattatttcaaaattctgttatggttaattttacactattgttaatccggtattcttatatattaaaaacaaaaagtgtgacaatatatgtaaatgaggatagtagtgtataataaggtacttttaaaaatttatggttatataaattgaacaaaattagtttatatcgaatatatatcgttcaaaatcatattttatcttcaaaattaaataaaccttaacattttaatttaaaacttaaaaaataataatttaagtaaacagatcttatcgtttgtcagcttatttaaaatgtgtgccatctagtttttacgacttacattacttaacacaacagctgcacattttagttccctgtctggtcgcaatagaaataatgcttatttcaaggataaagggcgctgacgtcgtaaagtaataaaaacgtaccgtaacgtgtcgcaaatttggaagcttataaaccaatcatcttggatgatctgttacagtaagtattatcaaattaacaagtgcgcaaacgcacacggagatgactgacaaagaaagtttgactttacttattggcactttttgtttttaaacgtttatttttacatgatattatctaactaggtaaatttgagggaaaaatttagctagatagtaaaaacattttgtttaatcttacaaaaccaaaccatactgatatataattctgaatatctgttactcagaatgttatgtcagttttgaaatattcaaaagtgcatgatgtaagacgaataagtaatactcgtttatttattgcttctatataaatataaccatgtttatgagatacttacgattataaaaaaaagagttttatttatcatattattttatttagcctaacatgctgtcaatgcattgtctaaaactgtactgagacaatacttgtggtacttattgaatcagcctaaatgccttgtttaaagatgcacaaaatgcattttagtgcaacacattcagaaacagatagccttttttaacgcatttaacatcgggccctgtggcgtaatggataacgcgtctgattgcggatcagaaggttccaggttcgagtcctggctgggtcgaaattattttttaacaactcattattcttgtgattaaagtaaagctaagcttcaaatcaagttattctatcagacggatgccttccaaccaaaatatcgagaaattaccatgacattttataacaacctgtcttggtgtattataattattaaaccataatctcttaaacaacattttcattttaataacacgtaacaattattacacgtacaaaaatttcgattcattatgatactacgacctacgacattatgatcggcgattcattttaattttaagaatattatttcagtattagcgaattaatacatttgaaatatgaatttagtgaattctgtttggggataattcaaatttacgcggcaaaagtggttaaacagagttagtggcttttagtttttatatgtatttcaacaagaccaaacaaacctttcagggatgtaaaggcgtgaggatatcttattgttgtcacaaaaatgtataaccaaaagtaacgaagatttaaatagggaaaaatgtatttcacattgaatgtgtatacctctgcctaccctttcaaggcgtgattaacaaaataatcatcaaaagaatcaaaaaaccaaaaaaaaaaatgaaaaaggatcagatgactattctcatataaataaaaataattatttatataattaattacatatagataaatattttaaaaatgaataccatataacgcaataagcttatgaaacaatattagtactctatacaagcgtctacattgcaatatatcctccagagactcaaattaaccttacctacatagcacaattcatatcaaagcattgagtaaaaaatcaataattttaacaatgaatgagagactcgcgtttcgcaaacattcttccataacttgacattgttttatataatttttccttttatatttttatatttccttttaaaattgttagtttgaggaccgtgtgagac

SEQ ID NO: 45 - DNA, 21746 bp, Spodoptera sp.
  source 1..21746: mol_type = other DNA
agactaaatcgtcttatatggtatagattgcacctaattgcactattctgtgacattgtcagacaaattgatactctaatcaaaattggataggatctattttcttatgcagctgttggaaattaggctacagttttgcgcttagataaggtcgggtatttattggtatttcaaattgttgctaaaaccaattcactgaatgcgatgttctccagttattttgttacttcttgaatacagctgttctgttaattatgatgaccattataaaattgcgataaccctaaccataggtatgtttttctggcttgaagagcaatagtgtttttagtcagtaagggtctgacactcggaccctcctcacccaaggcgggagaaatcattggatgattttcacccctaaaaaaaagcttaccgtttctaatttgcatgcaatgcgaaaactatcttaacgacgtgtgtttttaaaccttttgattaaatcttgatctgaaatcttattggactccgaattgtgtagttagagatacattatgttataatggcattgtcaattctcacattctattctccatatcagaagaaaaacaattaactccttacagttttctcttacttctgtaagacaataaactacaggaaacagtgtattagtgaaatgttgaccggtgcatgtttgtaagtacgcactctgaatgcgtcggcagtgtgcgcggcggtcaagtggtcccacgcgaatctatgatctgtgtagtagctggcagctgctacagggttgagaacaaattatttgggaatttattaggaaccatatattatgataggctactttttccaccaatatactaagtatcttgttcgttatgtggttgcaagtacgactatcgataaagggtcttaggttcagctgatcaataggttatgtattgcagttatttcggtttcaagaaagtttacaatagtagcacgaactctgtataagcaataagctcaccttttattacatgggactcacatacctaaaatagaggtaagtccagacgcaccattgcctattcattcggtgattaaaaggaatgacgttatattggttgcgttaaaactttaaaagtccttactaaggaccttagtacaaagcctttaaagtctttaatacattgtagcggatatttcttctctacaaaagagccagccctagcccaaacagttaggataatcacgctaaattattgtctggcgtatcagcagtgctgtacgtgtagcgagcgctgtggggtacgtgccacacggctcgatagtgccgccagaggtcagcactgcgctccatggagtctatgggaactttctcatgtaggcaccatgtgatttgcgtttcctgtccttgattagctgactataggtaggttgctttcaccaattgaccattgagactctttaggtgatggcacacgataaaacaattgatgcgtttacaatacgtaactgtgtgcccatcagctcaaagaaatgatttgtgcaccgcagtgacagcgcaatcggttaatggctgggtaacctgctgccgcgcagcgtaaagcgagttcgattcccgcaccaaatttccgcaactcattgtgtgatccacaatttgttgttccaggtctgagtgtcatgtgcatgggaaattgtatgtttgtaaacgtatccgacatccgcatcctagtgcgggcactaggatgttctcctgtgtcgtgggtctcctgtgtcgtgggtgcgtaaaaaaaaatatactttgccccggcaaagtatatttttttaaatctagccatataaaacaattataccaactactgaactatcccaagtttgtttgtttgtttgttaccgctctatgcttaagatatttatgcacccaatttactagttgactgagattcaggagtacggaggactggggattataaagaattaacatcaacatacacccataaaactgcgagtaaaaccttgtatactatagtatgtagtagtaaataacaaacaaagtaactatctctctatcagcaaaattctcacaaatgtcacatttcaaattgatttagtgccgcaataaacctacaattgttgggagctaggcagggcggccatattgtttaattacagggtaggcagcgagacagctcgccagacgtcaattgacatttgatccgaatgacctcatggatcagctcaattggtttatgtctcttgagaatgttttttcgcaaactgttttggtgttgaagttagttttgtgtattgggtggtcttaaatatgatgtcttctgttcaattcttacctatgagtaataagcaattaattacatttcaatacgttagcctttgaccaccatctcgctagtgaaattcctccaatgaatccgccagactcgatgaccaaattgatattgtcttactatatttctgtagaatccttcaggaatagttagttttggactacaataggtataacaataccattcataacaatcttgacaatcagattttttactattgatgtcagtaatcaaggttaacattttaactccaaacggtatatattttccttcattacattaaataactaatcgccaatcattcttcacgtatcacatacattataaaccggcacaatacctatctaagtacctacatacatagctcccacaatacgcaccacacagtcgacgcctacagaattgagtccgcaaacaacaaattacatcatcgaaatgatcttttgttacatttctgagaagttaatagttctcgcatcctgcacataacaccactgagccctatctaattggcgcggtcatcgccaaccgctttgatgtctcatttcctgcctcagataacatccatccttgtctaactatcgtaaagatgctatttctatccctctttattaacgtcccgtgaaatagtatggccacacaagattggttgtaattattgggtggatttcgtagattgctttaaaatagattaaaaattaggatgacgattcaatttttatggtgaatattttataaaattgtgtttaatgtaaatctttggctggtgttcgattccaagatccgatgatgtgttatttgaaattgtcaatagttgtacggagactgtataagaattttgttgtccctttggtaaaattaaatgtttgaattggatttaaaaaaataccatacaggttacaactttgttaattttacatttctatcgagaaaattagtattatttctgactgaaataaatctgtaacccttagtacgagtttactttacgttaaacgaaacgagagcgcgttcggcgctctgattggccggcccgaataaaccaaccaatcacaacgctgaacccgctctcgtttcgatttcgttaaatgtaaaccaatctcatgctaatggtagatactgaacaccagaatttttcagcaatcaaaaccgttaacttacaattcacatgaaatcaaaagaataagcacttatagtcaacaaaattaaaatacagtgggtaggtacggggtacgagtatcatacaattcatgcacacagccgtcatacaatttgaatgaaacaataacttagggtagcgacatattggtgcattgtgatatacaccgtgcgcctgcgcggttcgcagaacaataataataatcgacgcaagtacactgaatgggaaataaattacacacgacgcctgtagggatgggactccgtcttgagcgaaaatgtcgatgtcgatacaataggaatatctttttatcgaagtgctttgtaaagtttttgtagatctgctgattgctttattggttaggtgattgagactgattgtatccttatacttgagtaatctttactacttaaaagtagtacctaaaagataaaggtaaactgcatccttaataaatatacaatttagtatgtcgaactcacatttttttaagtggggaacatcttccaatatcctctcggggcgttgggcgaggtgaggcgaaaaggagtgtcagactattactggctaaaaacgaccccattcctactcttagtattattaccagtaagcttaaatctgataatgttaaacctgaacctttataaaacaaaacactttattaataaacagcaactcccatccctagcaccgcctgaagcggtgcgcgtacgcatcgaacatcgcaatttcgccgtgcgcgcgccgctcacttattaaatccttccgccccgccctaatgccccttattacaggtaatataataaagcggacacattgaaccccgagccttgtcattaaagcgacattcgtgtactttatttattttattacacttgtgtttgatgtataatgaattgtgcattttgttgcagtggtattgtttctgaattttggtggtagtaggtgagtgatattacggatgggtcccagtagggctaatgcccaatacgtaactgcggaagacttaacgagataccgatgggctccggctcaaagagcaggagtaggaacagggtgatttttggtcagcaagagtttgacactccctctcgctttacccaaggcggtaaaaaagtaggtgagcgatttagtaatgtcctcattaacttatctagatagtagatacatatattatatttctttctgtggctgtcgtaagccgactaaaagacaataaatcgactaaaagacgacgtagcataactttaatcaaggttaagtcagtaaattacccatcatcattaaattagtgttacattgtagttaaaattgcaatatcattaaagaaacgttagtactactactaacgtacggacagatatatacttaattctaaggtttctggcagttagagtaatggcaggatgtgctactggttccataacactccatgcacattaacgtgtcataacaacagtaataggtacctagtatcttattatatctaactcatttctattccaacacatagcaattaggtggtctgtatgtgtttaaaattctatctcgtatggagatgttgaataaggaacctaatttaaaacttaggtaccttttttgaggggggaaaatcagctaatgacttctcccgctttgggtaaggcgagagggagtgttagactcttactgactaaaaaccggccgtttctggtggtctgatgactctttgagacacgcgtggaacgcgacgcgctgtacgggtctggttttaatcgatcaacgagctaccgattcctaacacctggagtgtctctcacgacggctggggcggtaatcttaggtttctgggtactattttaataagcatctacgtatttaattggtaccaaccattagataacaaatacgcctgatgatttattcatagcattacacacagagaccgttacaaaaaaacatacaggcgaattgagatgagcacctcctccttttcaggaagtcggttaaatggatggaagttcttttttaggattccttacgaataattgaaataggtgattgaaccaaaacttaacttaatatcaaataggcaacaaataaaatataatggatgacaaacctgactaccataatccgtatacaaaatgctaacccgtgacattacctataggctacaaaacacgggtgtccctcgcaatacggatagtatgcactagcgcatcgaattttatgtagctgcatgaagacatcggcgcggagttaaagctatgcttacgacgcttttatgagcgcggcgcggctttgttgtaaggcttaggacatggtggggattgtgagttgaatgatatgtaacatgtaggtccgagatatctagattctagatattctaatgttactaggtttgatatggagcttgtcgatagtctaatagtttaaagtggtattgtaatgccttagttagttaatgatgtgttgagcttttacagcaaaaattaacacctagctaaatctagaatttaaatttcaacagcaatcaacaacacaattgcgcacatactggactatgagctttctctacataaaacaaagaaagaacaaaactgttattaatcttcttattaaacattcttttgaaatgcgatattccactatcacaaagaatattgcaaaaacttaataacctaaatcgcttcatcgcccgctccgctcatcacgaaacctcagtctgccgccgcaagcgcatgacaaagatgagatattactattctgaacacgcgcccgattcaacctccactattcatcgtcgacagtttataatcgcgaaacctttcatgcattttatttgcaaaaatattactcaagatctgcatagggctttgtcatggtaaatgatatactgattgagttctctcgaatgaaatatggttatgtaactcgattgcttcgttaaagaatagtgttagatcatggtggttcgatctaggaggcggacaaaagattttatttactgaatttcgttttgttatatgaaaaaaatctagttataaattaaggcgattttacttctacattcagaaagtacaaagtaacgtactagtgcgcctgaactctagctaaaacacattttatttatagaaacaacacattctctaatcctaaacccctgttgtgcagcctctgtttgagcctttagggttcagtcacgctgcgtactgcctatcgggttaccgggttccagctcgaaaagcaggaatatgaacggggtggtttttagtcagtaagagtctggcactccctcacgcttcgcccaaggtgagaaaagttatttgatgactctacccaccttaaaaaaagtaattctgtttcctgcgtaaaatttcaccgatggaagtggaaactatcgtatttttctatactcaactttttttctgatttatttcgttgtaggatccaagacagttattcaagtccctgggacgcgtcggacttcagtgttccggtgttttcattgttttatccactgtagatcttagcttactgtagatccttaggaggttttgtgaggttgtggcgtcgttatcccaaaaaaaacctaaacccctttcaaaactaaaacatagtttgctaattctagaacagctattgatatttgcaaggcttcctttacctagaacctgctatgatctatcagatatgacgagaaacaagtagtggctagggtattctagtcacatgaacacacgtgatgagcagcgcaatggagttcccacaagcaatggcctgctctatggaaatagtatggcggtttaagtcaatgtaggtaatacctaacctacgtggtgaagcgatacactctttatgattattacgtatctaaaagcataccatggtaccaccaaatatattattactttactaacttctaccagcgctcccgtgaaataaaaactatcctatcacccaagtcagctaataccctgactgtataccgcatttcatcaaaatcagttcaatagtttcagcgtgattgacggacaaatatccaaacgaattttcacatttgtaacattagagtcatgcctggtacactcagagatagacaaagatggcattgaccgcataatagaagtcatacctttttttttagggttggaaatcatgcagtgacttctcgcgccataggcaaggcgagagggagtgtcagactcttactgactaaaaaccaccccgttccttctcctgcttttcgagccggagccccggtaaacccgctaggtagtccgcagctccggatcaggcatcagccctactgggccccatctgtggtggtttgatggctctttgaggtacattttgatccctggagggtcttatgatatagtggacgagttcgtgggcccattaacaatatacgctgctatttatccggagctgcggactacctaacggatttaccggagctccgactcgagaaacaggagtaggaacggggtggtttttagtcagtaagaatctgaagaatttctccccttaaaaaaacaacgactgcctcgttggccgagtggttgcaagtgcgactgccgggcaaggggtctcgggttcgattcccgggtcgggcgaagtattactgggctttttttcggtttttcgaaaatttctcagtggtagcacggagtctggaaatgtgcccggtatatggcaataggctcaccacctattacatgggacttacaacataaattgtgaaaagtgggtgtaacacagtggcattacgtgccatgatgtgcacctctgcctaccccttcggggattaaaggcgtgacgatatgtatgtatgtatgtaatctaaaattctccaacgggcacccttttttggtgaaaaaaaaacaaaatacataataaatatacaacttcattggaatataaataacaaaccactatttatgtaatattatgttacagtacggcataatataattataaaccatatataatatgtttatataatacaattaactaatcacatggttttatatcacttttttccgttatacactattttatataacgctttatattcagggggtacgcagaggtccataatctctataccggtaacatcgggtttctttgaccctaagaggcaactttgaccctaattctataaccaataggaatccagaacaaagcgtttaatagtttttcattggtctaaaagtttgggtcaaagttaccccctaaggtcaaagaaacccgatcttacgttacgataaaaatgtattgctgttcgttagtctcgccaaaacttgagaacggctggaccgatttggcaaattttggtcttgaattatttgtggaagtccagggaaggtttaaaaggtgagaaaaaaatgtctgaggcggtacgaagtttgccaggtcagctaatataaaataaagttaaatttttacaagttttattagagtgggtacattttggactttgtgctaggaagtaacaaggttcaaaacctcttttactgactaggaaataaaatccaaagcccaaaacttctttctgcagactataagatacaattatttgttattctgcttgtatacaatcttattttttgattacgcaaaacttttccaccagagatatgttatgctattctacaagaaatgtaatagctaagcttagaaactatgtcaccgtttccactgatactaagcttggcgaggaagatgcgcagctcaagtatgccataatcgatagtagggaagacatttatatcacacatccacagatcacatctatagcgcgcatctttccaaaaaacagtttagctgaatcagttttcaccaatgctaaactgtgtaccaatgaatatgattggtggtatccaaacgcattaacagcaacgtagcatagcatatctccgatagaaaagcacagctattgaaaaagttggttcgtataaataactgacttgattccaataatttttataccatagtatattttgagacaatattataaaaaaaagtatacaagcgtttttaaatcttgtagcaggtttattacccaaaaaaaacctgttttgcataaacaaacatgactgttttatagaacccctaattcacaataaaacctaattttcgcgtaaaataaataagtacacacatacaaataaattaataagtatatacacgctatgattagactatcaccttaaagggataggcagaagtacggcacttactacgtatacagcatcaatagtattcacttgtcatttgatcacaatttggggcaaacaccatataccaggttaccacattttaatgcagatttcaaaattactataacattttttatggtataaaataatccggtaaacgagcagacggatcacctgacggtaagcaatcgctgccgcccatggacacttgaaacaccagaggcgttacaagtgcgttgccgacgttttgggggtctggaattttagcctcctaaatcccgatgtcctatgtatggaacatttaacataaagaattttgaactttattgttttttttaacctttagagccagggtacactcgtccctatataaccctctttcttcccttgtttcaattagtagcatggcggcatgtaagacgtgtggtggttcggaccatactcgaacaagttcaaaaaaatgtaaaaactatttaccacccataagaaaaaggaatctgagtgaatctacccaactagagatttataccgtcaaacgaggacttgcttcctgtctttgtccgctcttggatccagagaaaaaactcaaacttttgacagaaattcgacgggatgttcgcgatctctcacgagtctatatcgaactgggtgtttggtataattattatatgaagacaagcaccgaacttccacctaaaccagacgtgttgaatttcatctatgccatgaagggaaaaggaccctataataacgtatattctaccatgtttagtgagagaaaatttgacgataaacttcgctcatttgtggttcaagagatggcgaaacagtacgagactgtactacacacaaacatcagcacacacgcctactctagactggcccgctatttcaacgtgaagcgtaatgatccagcgttgttttcggctttcttcaagaaagtgctacccgacgataatgaagagatgcgtcgagtttgttctattatcaacgtggacactgtcggaggcgccaagtggtggtctactattccagaatggctcaaaattcaggcaaaacttgaagactttcgactatttccacaaccatcacatggactcaaacacattacctacacatccaggggttggcatgaattactgcgccgtgtagatccaaaatctattacgggcaattggcccaagatcattgatcatcgacgagaattatgggctccttggttagatattaacatgataaaatttgggtgtaccctacaaacagatggctttagcgtgagtctatcaatgagtcgcatcaaaagggagcctagtacgtcacaaccacagaaacgatcaaagaagagctatgatcgtatcatcgctgttgatcccggttccaggattcccgttgctgtggtggaatcgcgcaggttcaagtttcaacgtgtgacaaaaaaatatgtgcgctcacatacattggagtggaagcgtgcacgagtcaaagacaagttgtgtcgagtcagtgaggaggctgaacaaaaggctcgtgaaaagttggattttcccgtttcttctaaaaacatgagccatgtcgtggaatacacggtttttagaatgcactggttcaacgttcgtcaggaaccgtatgagaaatatgctaagctctcacgtttgaaactagacaagtatatccgtaccgctaaatgtgaagaaaaaataatcaaggaaatattcgatgatggctccaatactctagtgttgtatggtgctggaagtaaatttatgaacaaggcttctttcagcggtcgtaaattcaaacatgactcgctcatcaaacgtctacggagtaagcccaacattgatgtagcggtcgtagatgaacagtatacctcacaggcgtgttcttcgtgcaacgctacaactggacagtttcagaagattgtcatgaatcatcgactacgctggggagtttgcccaaactgcaacagcgagtttgaccgtgacaccaacgcagcgaagaacattttgatcaattatacacggtctaccctctgtaggccaggatgttccaccaatggagcatcgtagcctcctatatatttttgtatctcggtgtcaataaggttcaattttatccttggacttttttggtgtcgggatttaggaggttagagtggttgggattgggaaaattggaaagagggggtaattgggcccccgctaatctcactcacacaacgcaagcgttatttcacgtcggtttactgtgaggccgtggtatcactccggtcgagtcggcccattcgcgccgaaacatggctctctcacttaaaacatattttattttactggttaaaacaggataccgcgttgatatacaatacatacttgttaaattggtataaattatattatttaccctaattacattatacaggtggtattattttacggccgaagttaataaccaaccttatgtgacgtcctgcgtgagcgatctagaagcgaacgcgaagcgacgcggtgacacgcgaattcaacgcgatgcgatgctatgtcctatgtgcatgtgaatcgtttcgttttgtttcagtttctgacattatctatatattaatacgtgatgcaaaaactttggaccgctttttacgaaaattgcgcggacgtaggagcataaaatttggtacacttatagtttatgtgtaggagaagtgcagcacgcttatatttttttaaaataatggttataaagtacattaaatcaataaataaaacattacacacacatgcatagtatctgatcgtatttgacaaaacgtcaaaatctatagacattgcgatgatattctcacgtctcatatgaaaagagttttataaaaagagtttgtttgagtttgagttaaataaaaattatccttgaacgtatgttaagtggtattgtaaattaaatcgtatatggttgaatttcgaccactaggcgaccactagtaaacaaaaatgtgacggcaccgcgtccagttcgcgcgacaatatcaagccaattgatcgcgtccgcgcgatacattttgacagtttgtttttcgcaccgcgccacaccgtatcgcctttgcgtctagattgctgaccctggacgtcgcgttaatctaaaatatctgaatcgatcccagcttacaacatgttataaatcgatcttaagatatcgaatcttacgacatttcgtcagattgagatcgatttttttatttcgaactccatcgaatctcactatacgtttcaaaatgacatgaatcctaatttcattatacaggatgttcagacggcattattttatccagtctcactatacagcgtgttgtcaattttaacaatcctaatttcattatacattgtaaagacggcatacattgatgtgtttgactatacagggtgttggtgactatacagggtgttaacaaaattttaagaatcctaatttcattatacgttgtaaagacggcatacattgatgtgtttgactatacagggtgttgttaactatacaggatgttggtgactatacagggtgttgttgactatacagggtgttacgacggcatcatgccttggctcctcttccactgggcgccagacctgcggttgtggttggctctagctgacttgttcttctctttcttgtctctgttgtgaagaacctccttctcctgcccctggccacgtggcttgcctgttacgtccgtattcctgaaaattaaaaaagtattaagtgaagttttgttgaatattggttggaccaaaatatattattagttattacctaccgaatgaagtgaaagtcaaaacatttatttcaaataatcataaattaagcacttttgaaaagtcaaattgaagtccgtcagtgtgtctgtcagtaaagctataaagatgaaagtgaaaaaactaacttcattgcctaaaacttattgttatttcaaaatcaattttatatccatataaataaacaaatattaatgaatatatgtataattgtatacctaggctgtggtgcgggtcggttcccatgtccccgtccccgcctggcttgatagctcgcctccctgcgcgcgcgcatctcctccgggttcacacagaagtccatcttatttctactactactcggcttctcttcttctggaccttctggttcatcgtccgactcctcctgggagaagattatggttttataaataaaattatgataaatgataataaatgataaatgatattttatttctgtaaatagattataaaataacacttttacacgtcaatatttcaaatagctagatgaggccggcattttactttgaataagaaaaagactgctgacctgtggggtaattctgtgtacattaccagctctgtaataactattgtggcacctgtattagctttaatttttaataactgtattgatcgtggtgtgtttcctgatctcatgaagtatagtaaaataactccgttatttaaatcgggtagtacttctgaccccactaactttagacctatttcagtactacctacattcagtaaaatttttgaaaaaattattctaaatcagatgcaaagattttttaatagaaataaattattgcatggtaaccagtttggatttacaaggggtcgttcaacaactgatgccggtgttgaacttcttaatcacatatatgacgcgtgggaggactcgggggacgcattgggtgttttttgtgacttatccaaggcgttcgattgtgtccttcatgaaacactgatcaggaagctatcccattatggaatgcggggcaactctctggacctacttatctcttacttgagtaatagaattcagagagttgagattaacgggaaaatttctgccgggtctgttgttaggatgggtgttccgcaggggtcaattctcggtccgtttttatttcttatttatattaatgacttaccttaccttgtaaaggataaccatgggatagtactgtttgctgatgatacctctttattatttaaactcaaacgtggacaattagtcagtgatcatgtaaatagtgctctctcaaaaatagtacgctggtttagtgccaataacttgctacttaatgaatcaaaaactaaatgcattaaattcacaacaccaaatgttaggcatgtcaaaaccagcgtgctaatcaagggcggggagttggaccctgtagattcagctatctttttaggtataaccctagacgctaagctacagtgggccccacatatagataagttgtcgaaaaggctcagctcagcagcatatgccgttaaaaaaattagaaatttaactgatgtaaatacagcgcgtctagtatactttagttatttccatagtatcatgtcatatggtattctcctgtgggggaatgctgctgacattcagtctgtctttgtgctgcagaagcgagccattcgatcaatttataatcttagtccgaggcattctctcagggaactatttaaagaaattaatataatgactgttgcctctcaatatatctatgaaaatatagtgtatgctcataaaaacataaaattatttaaaaagtacagtgatatacacaatatcaacactagaaataaaaataaatatgttgttcctactactagacttaagaaaataagcggttcgtttagatgtcaatgtatacgcttttacaataaaattcccagccatattcaaagtttaaacctaggtaaatttaaaaatattattaaagaaaaactttgtagtaaagctttttataaaataaaagactacttggaggatagtcaggcttgggaatgaactgctataatgtccacacaggtcttgctgacatgtttgtaacatatagttacattttttatacaatttgacattaacataatttgacattgttttatatatatttttttccttttatatttttatatttccttttaaaattgttagtttgaggaccgtgtgagacttttgctagtcattttatttttagtaaattatattctgacagtttgagcatttgtgtggcctacccaaatgttcttttggttggtgttgttcgtcggatcattcagcaacagccgtcagctgagctgattgtaaactgacacatgcgtgctgccatctgaacaggtccgctcaaactgctgtggttctttcctcaaaagaccactacagaatcaacttgcacggttctccgacatctttaattgattttgtctggactttaaaagagactatgacctctgagtttgtttcggcatttcttctcagagtagtcagataggaaatgccggcctcatctagttatttaagagattgacgtgtaaaagtgttattttataacctatttgcaaaataaatatcatttatcatttatcatttatcatttatcatttatcatttatcatttatcatttcctatccgactactctgagaagaaatgccgaaacaaactcagaggtcatagtctcttttaaagtccagacaaaatcaattaaagatgtcggagtaccgtgcaagtttattctgtagtggtcttttgaggaaagaaccacagcagtttgagcggacctgttcagatggcagcacgcatgtgtcagtttacaatgagctcagctgacggctgttgctgaatgatccgacgaacaatacctaccaaaagaacatttgggtaggccacacaaatgctcacactgtcagaatataattaactaaaagtgaaatgactaggcaaactctcgcacggtcctcaaactaacaattttaaaaataatatgtgaaaacaaaaaaatatcgaatgatattaatgtatatcatgtcaaattgtataaaaatgtaacttgtgttacaaacatgtcaacatgacctgtgtggacattatagcggctcactcccaagcctgactatcatctaagtagtctttaattttataaaaagctttactatacagtttttctttaataacatttttaaatttattcaggctcaaactttgaatatcgctgggaattttattgtaaaagcgtatgcattgacatctgaacgaaccacttattttcttaagtctagtagtgggaacaatatatttgtttttatttctagtgtttatattatgtatatcacaatactttttgaataaattaatgtttttgtgagcatacactacattttcataaatgtattgagaaggaacagtcaatatattaatttctttaaataattccctaagagagtgcctcggactaagattataaattgatcgaatggctcttttctgcagcacaaagacagactgaatgtcagcagcatttccccacaggaggataccatatgacatgatactatgaaaataactaaagtatactaatcgcgctgtatttacatcggtcaaatttctaatttttttaacggcatatgctgcagagctgagtcttttcgacaacttatctacgtgtggagcccactgtagcttagcgtccagagttatacctaaaaagacagttgaatctacagggtccaactcctcgcccttgattagcacgctggttttcacatgtctaacatttggtgttgtgaatttaatgcatttagtttttgattcattaagtaataaattattggcactaaaccagcgtactatttttgagagagcactatttacatgatccctgactaattgtccacgtttgagtttaaacaataaagatgtatcatcagcaaacagtactatcccatggttatccttcacaaggtaaggtaaatcattaatataaataagaaagagaaacgggccgagaattgacccctgcggaacacccatcctaacaatagacccggaggaaacttttccgttaatgtcgactctctgaatcctatcactcaagtatgaaataagaagatccagagagctgccccgtattccataatgggatagcttcctgatcagtgtttcatgagagacacaatcgaacgccttggataagtcacaaaaaatacccaatgcgtcggccgagtcctcccatgcatcataaatgttattaagaagttcaacaccggcatcagttgttgaacgaccccttgtaaaaccaaactggtttccatgtaataatttatttctattaaagaatctttgcaactgatatagaataattttttcaaaaattttactgaatgtaggtagtactgaaataggtctaaagttagtggggtcagaagtactacccgatttaaataacggagttattttactattcttcatgagatcaggaaacacaccacgatcgacacagttattaaagattagagctaatacgggtgctacaatatctattacagagccggtaatgtacacagaattaccccacagatctgcagtctttttcttgttcaaggtatggaacgttttgacaatatctgtataatctatgtgttcgaaagagaagcctaaattgcaagctgcaacattttcttttagtaaagattctgcaactgtgggagatgagttcaaagacttagtagtggatacaggaacgtccgaaaagaagttttcaaatgcagctgcgacttctgcatccgatttaattacattattatcaattataagactaaattcactactcttctctttagacctccctgtttcactgttaataatactccaggtcgctttaattacattgtcactgttttttattttagagctcaagtataacgattttgcaattgagcaaacttttttaaataatttagaatatttctttacatattcactaaattcagttgtattaatatatgttccctcgttataaagttcatataggcgtttcctactcttatagatgccagtagttgcccattgattgaaagacgcattgccatgagctggtatggttttaggtgtgaaggtggacttaaactcggtatggtaaatgttaaaaaattcatcacacaagttattagaatttttattccttaataataaaggtattttgtcagtgagtttagatttgaaagtttcaatgcgtctttcagtctttgggttaacaataatatgtggtttcgacactttatttactttatttgttattgaaattaattgtccacaatgatctgaatcaagcaatgatattatttgtttattagttggtacaatgtcagtataaatattatctaggcaagtggcactagtaggagttatcctagtgggctccagaaacaggttcgtgaggttaaatgaggcaaataaacttacaatttttgtacttaaactagagttttccaacaaatttacattaaaatcgccacaagtaatgatgaatttatttgaactactgagtttatttagtacttcatctaatactgtttcaaaacagtcatacaaaccagtaggtggtctatacacacttaaaacaataaaccgctctaattccacacaggctatttcaacagtacgttcaacagagtaactaactatatccttgcgttctttaaatttaagtttgttgtttagtaaaattagtgaaccaccatgtatagcgttctccctgctgaacgagctaccaatctgatgattaccaaagttgaacattagttgatgagatttcaaccaatgttcagtaatgcacataatatcaatactattacaatttaaaaatagttctatttctaattccttactcaaaaaaccttgtatattttggtgaaccagattgataacattactgttatatttgcaagaggtggactctcttgtcttattttttaatttaaattatggggaatgtcaatactaatagaattattttgagctatgtcaatatttgaatgttgctcaataggagcaacctgtttagccaagtttttggctgttatattaataaaatatgatagcgacacagctatctgtcttaaataatacctggaaagatagtacctatctttcgtcaaatatacatatttaccaacataattgttggtgtcaataatatgtacatttgtgcaattgcataaattataatttatgcaattacacattgcaacatttaatttatatctatggttattttcttcctgtggcaagctattgctgtaaggtaatgtaaacaaaattatttgctttagtttaagtgctacaagtgaactatgatatttaagaaaattatttttattcaaactacctctatttgcacaaataattatgagggtagcatcatgattaaaattataattaataattctctccaaaatattaccaaaagtacagccgggcatacagtgatttattattgattgtccagggtatttacttgtcaataaggaacctaagtttttaccaatctcatcactgaagatcacaacattattgttattacagctatgagttatgagtaaatgcaatattttttttgtgttgccccacactaaaattttctcttgtgtcgtgggtgcgtttaccaacatacaagttcacatacacatgacacccagacccgaaacaatttgtggatcacacaaagagttgctccgtgcgggaatcgaatccgctacacgttgcgcgacagacggttgcctagccaccgcgttagttgaatcacaattttcctttcaatacatgtcatgtttaacttgaagcttgaatgttgctttcaatacatggtttatactagtaacaatttactaaaaatatgacattagtttttcagaaacatctctcctacctcttggtcccgatcgtactggcgcagcgccctcggagtgacgaagggtctccgcgcgtcctccgtgaggtccgctgtgggcgccacgccgtccgagtcgtacgtgtcgtcgtactcgtccgagtacagcgcctcctcgtcgcataccaaactggaacattggaatattcataacaataatgtaaatatggtctttgatgaacttggatcttggagatctaactggaccagcccactgtacagaaaatatgtatttatttattaaatactttattccatatacactgtgaaattgaatgccatgggtattctctgacaatcaaccattgggtattgcaaaacgatgaagtggtaggtgcaaagttacagaaaagaaagcctaatgtaaagaacagaagtactaccactcgtaaactttgattcgaattatctaggtactgttatctcatacgacaaaataaaaaatacgtgtctaatattttttcattacttaactgacggactaaatagatttttaattctcataccctgtcatcatccctattaaggataaaaaatccaaagcctcatacaaacagatgcataccggtttaacttcatagacctgaaaaacaacattaaataaaaaatctactcacttatacttgctataaatgtccaccatcttcttaacctcagacttatcatccagcatctccttaagatccttgtacttggacctccgcttgccgacgtggatcttggagacatccacatcatccctggtcatgatatcgaactggtctccatcgaacacgttcagccgagccacgcccgtctccaggaacttcttgtctaacggatcttcagggattattggtagcgactggtctaatgctgtgaataggggaaagaaacataaaatttctagttaaagttcttaatatctgatttaaaaaaatgtttggtttttttcatggaacacgccgacgtaaacgagcagaccgatcacctgatggtaagcaatcgccgccgccatggacacccgaaaccctagaggcgatacaagtgcgttgacggcctttttggggttaggaatttaagagttgttggggtatcggggattgggcagaggggtaattgggcttccggtaacctcactcacacaacgcaagcgttgtttcacgtcggttttctgtaaggccgtggtatctccggtcgagccggcccattcgtaccgaaacatggctctcccacacttgaataaatacaagatataaacacactcacctctcaaaggctcagccaaattatcttccaaaacactattaataaccctct

SEQ ID NO: 46 - DNA, 21746 bp, Spodoptera sp.
  source 1..21746: mol_type = other DNA
ttggttactggataattatttaatcgatatacataatataggtgttacactcatcgagattaaatgaaaaaccttattaacaaggcttttcaatcaattcttgaccatccagtacagtatcaacaatatcgggatttgtaattagtaaattaacaaaagttgttttgttttattttttcagtaaaaaagctgcgagtgatagcgatatattcggtatcagtcacgaccacgaggcaggcgcggacgtcggatcatcaggtcgagcatgcctgccgtcgctgttcgtgtaccgagtggccaacgggtgtgagcgacgcacagctcacaccgatggcgaatattacatcgactgcaaggtgtaccgagctaacgacgcgcgcaacaccgactcgctagagctatggaagaaggcaatcgtacggatcaagctccagaccgacatagactctcctcagtggcaaaaactgcaggagtttgtaaagtccgcagatgttttgttccccgacaaacctatattttacgataataaatagttatatgattttatttcaatgaatgttttattttttatttccctactacacattatgtgtgaaattatgcgtggctacacataattccacacatgtcatacagacacaattaaatatcataaggttatgtttatacacaactttacgatattgtattacgtgtgcatacgttccatgtccctgtttcagttagaacgtacgttgtacggaattatttgaatagtactaaacagatgataacgtttgttacttttttcgcgttaatatcgttaaccgagtcgaccgttcacgattgggcattctggaccacttttcgttcggcaaaattaaccgagtcgaccattaacgattgggcattctggaccacttgagcgaaggcgttcgccgagcgaaaagtggtccagaatgcccaatcatatactactgagtatgttttgattcgcttcgttgcaaccaagcgaggagcaaaaaccaagtctctgatccgagcggtcacacccaaggtgtatatacctgtattaccactcatagtcggagctcgatataggtatacgataaatagcacccttttgaaaacgagtcaacttctcacgtacataggaaaaaaagagtcgtattatttcatgacagaagatcgcttgattgtgagcatcaaacctacgatatttaaaatgaacttgtattcatccatgcaaaaaaaagaatttcttagtatgtttgaaccctctttaattatagattatggattatccttattgtatagaaacttgtacggattgcctctagagatggaccacgcaaaaacaatatatcaaacccagggtttgacaatgaattctacattatttatcgacttgcgttcgacttctgttaatgaacaatatgttgcgctttctagatgtaagaattatagaaaaataaaattgattttaccatcttaaactagtttttttattactttgaccctaatgatgaacttgtccctccggtagtaccggtcgtgcccgttgtcgcatctgttttggtactagaagaagtacccatgttactgctcttgcagccaacaataacaacgattactaggagtatcacaacggcccctccaacgacccaccaattgacagaggccatgtttgttctaagaaacctcgagtccgacatcttccttatacatattcatcctacgacttgttcgagtggtagttttagtttgaaaccacacattgtttttgttgaattgttggacatgtgcgggcattgactaaccgtctttgtaaaagactttttatttagaaaggtacttagaaatgcagacatgagagcgagaaaccccacaatcaagaatatcatgttaaaggtaatggaatataggaatagacaaacgacaaaggaaacgctcgccatagtttcagcgaaaattcccatttgaatctgacaattgttataaaccaaatgaaattttgaatcgttttcaaaattagtttgcatatatgctcgggcacagggcgtacataattcataaatggccaaaacttcgtcgttaaactctgctttcaaaacgttggtgattataggatcagaaggagcgcccggatgccaagtgcgttccccaaaggtaatatatgtatgacccaagagagggatacgactcacaccgcgtcgtttgatgatgaaaatttcactatccccgtgatttgtaaaaattctggaaacaataccccgttttgtttcgggccaatatttatccaatgcgtcttttatcaattcgggactataccgcattcttacccttgccgcatactttcgtgaaacaaagtcacgcgcgagttaaggaaccccaatctacacgtattagctttgtcagcaaataagtatttagtttattgttaagtgattgttttctagaatattccatagcccattcagcacttataataatctaggacgtgcgtcacatccgacaacgttttactatgtactacgttagcaataagttagtatataagatgagtataatattattttagacaattactgtattagctgtaactctggtcgaataaagttatttttttaactctttcgttgctggttacttaattggcgcagccggtaggatctctgtagtcagtctgtcgcgtatacaattctacgagaagcagccgacgtccgtttctacggttaagcagagatcaccgaacaaagaaatttattaagaagcccttgcaagtacgagagaggaccagccacagccaagcagtagttcagggatcatgaagatagctgcggaattgtgagtaaatcttttcaccttcctatcagttcttccttacatcctaaccttgtaataagtctatgtgtgtgtattattagggattggacaacgccgtaataatatttgcatagattttagttgtactgatagttagtataataacattttagtagcatatttgtgtcaattttttttctctttctctcaattttccagtgttattttaataacttttacacaatggaaagcataagccgtgtcccacaagaaatggttaaaataatacctgtattcagtggcgacgctagaacattacctttatatatcaaaaagtgcgaatacattttgactacattccaagggagcgtagctcaaaatgcatatttattccatgtagtatcaggcgaagcagccagtttggtaggcgaaagagactcaatagatacgtgggatgagctgaagaagttgttaaaccaacacttcggtgacccacgcacagaagattgcttagcaatggagttagaatcttgcagaattaataagggcgaaagttatttagatttttgtcatagattacagcatatgagaagtgctttatttgctaaaatatcggagactatcatggatgattctttacgtaaggcaaagcaaataatttatagtaacagggctatgaatgttttcttgtttaatttaccaccatttcttgtaagattagttcgtttgcgcgacattacaactttagaagatgcgttaaaaatagttttagaagaacaaaactttcagagtgtttatgattctaaaacaaacgatcgacgtaattttaacagaactaacaggcctaatttgtctaattttaatagtcaaactttttccagttttaataatcaaaacgtgtctaattttaatagccatataaacgattcgcataggatatcaagtacacatgtaccgaataatgctacgaatagtacgtttacgccaaacaattcgcatcagtttaggaattttaaacaacataataataatcaatataattttaatcgtagatttaataataactcgtcaccgcagttaactaggtcaccgtttccgattgctcaatcgagtcaacagttcgcgacacatgcaccgcgcatggcaccttttgcaacgcaagcatcgacgtcgggttcgaatactgatgtcaccatgcgtactgcgaattcgcgacgtgttaattatattaacaattatagtaataacgaacagaatacaagtaatatgaacaatgagtgccaggaattttcccctgaagatgccgaaacggaaaatttttgcataatggcctcaacactagagaacgaataaaaataaattgtaataaacgtttaaatttaccacatatagttataccagaattaaaagcagtttttatgatagatacgggaagtgtaaggtcttttataagcccgtatatagcgaataaatattttaaaaattatttacagtatgaacctttcgaagttgttagcactcacgcatcgagcgttcatagtgaaacagcgtttattccattaccagttacttttcgtagtcaggaattccataagttttatgtctatagtgttgacgataggtatgatgggttaatagggagtaatttgcttaaacaattacaggcaaagattaatatggaaaaccaaatattacatttaaaaaatactgatattcctatcatatactcaccgcctatgagagaggtatacaatttaccccctcgtagtgaactaagggtaagacttccggtcaacttattggacggggaagctgtgttagattttaagcagtttacagaagggattcgaatgcccgctgcattagttacgtgtgttaaaggttatgcaacaaccgttattcagaattacagtgaccaaaacagaaatttactggtgacagggccttttaaagtcgaaccttatatacagaacccatctattagcgttaattatacggaaaataatataaatatagaaaaactacttacaaataacttaaaaaaattacagttagaccacatgaatgtagaagaacgcaggttaattgagggactttgtaaggaatacaaagacatcttttattgtgaaaatattccgttaaccttcacaaaccaggttaagcattgtattagaactaagaatgaagacccaataaacaacaaagcacataggttacctcctactcaagcaaaggaaattaggagtcaggtcgaaaaaatgttaagggataatattatccaggaatcgcattctccctggagtgctcccgtacatttggtgcctaaaaagatagatgtaaatgtaaatcacagtggatgacaaataccccttacccaacattaacgacctatttgatatgttaggtaagagtacctacttcacaaccctcgatttagctagcgggtaccaccaattagaagtacaagagcaggatagagcgaaaaccgcgtttagtacaccttcaggccattacgaatttaacagaatgccatttggtctaaaaacagcacctgcaacttttcagcgagcgatggataatgtcttacgaggtcttcagggtttacattgcctagtctaccttgatgacgtcattatcttctctaaaagcttgccggaacatatagaaaagcttcgagcagtttttgaccgttttcgtcaaacaaacttaaaggttcaattagataagtcacatttcctcagaaaggaagtactgtacttaggtcatactattacgagtgagggtctgaaaccaaataatgataagatagatgcagtgcttaggtatcccattccagaaacggttacacaaattaaaagctttttaggacttatcggctattacaggaaattcattaaagatttcgctagagtaactagaccattaacagcttgtttaaagaaaggtcgtaaaattattattaatgacgaatataaaaaatgttttgagacatgtaaaaagcttttaacaaatgcacctttgttacaattccctgactttagtaaaacttttattttaactactgatgcatccaattttgcaatcggcgctgtattgtcacaaggaacagtaggctccgataagcctgtagcatatgctagtaggactttgagtgacacagaagttaaatatagcactatagagaaagagttgcttgccataatatgggcagttaaacactttagaccgtatttatatggtaacaaatttactatatttacagaccatagaccattagcatggctgtattcattaaaagaccccaatagtaagctcacgcgttggcgccttaggttagaagaatacgattatgatgttaaatataagaaagggccgcaaaacactaatgcagatgccttatctagaattaaaattaacgcaattgacgatgatttagattcaatatttgttaatgtaggagataggcaggcacgaatacacaaaatgatagaaagcgaattggatgaggttgaaactccaatagaaacgatagaactttcggattctgacgatggaataacagccaattcggtttcaaatagagaacacgaaggtattcctattttaaacgaagccattgatactaaaccaaaacagattttagtgcatccatggctcaaaaataaattacttgtaaaagatatttctaataataaacaaagaatcctagaagttcacttaccaatgaataataataatctagttaaagactttctaaaagaatatatagatcccatacataaatattttatatattttgaacatccagcctttagaaaatctttttcaaatatggtaattaagttatttaaaaaggattcagttaagttaacagagtgtacagaaagagtagtaaatttgacagaatctgaagaagatcaaaaggaagttatcttaaaatatcacgatgggaaaacatgtcatagaggcattaaagaaaccttagctaaacttaaaagatattattggtgggcaaatatgaaagagacagttacggcaatcataaatgcatgtgaaacatgtaaacgaatgaaatatgatagaaaaccaattaaaccccgtattcagttaacacaaacgcaggatagtccttttcaggaagtttttatggatttattgtatatagaaggaaaatattatttaaccatagttgatgcatttagtaaactggcacaagcaatagaggtaccaaatagaagtacaccggagatagttagagcgttaattaagtattttagtatgtatggactgcctagaaaaattagttgcgattccggtacagaattcaacaatacattgattaaagaaatgatgagcttatataagattgaacttcatatagggactccaaataatcctagttcaatggcaatagtagagaggttccattcaacaattatcgagatttatcgtttagctaaatatgataaaagcgatttagacgcagcatccgttatgatatatgctattatggcttataacaataccatacactcagcaacagattttacgccttttgaattagtatttggtcacacttattcagataatgtatttaacatagatagagaaaagagtctaactcagaaactattgttagatcataggaaacgtcttaaaatactttatgaattagtgacagaaaaattagaaacagataaaataaaagtaataaacaaaaaaggtggtgaaacaacaccagctcttaagacaggcgatactatttatatgaaagatactagagtgaggaaagctaaagaaaaaccacgatatgaaaaggcgaaagtaattggtgaagttgaacataatatagtgcctgtagaattaaagaaaagaacaactagagtagcgataaaaaatgtaaaacgtcctccacagatcgtgcctggtacttctggtactagtagcggcgacatacatgctggaccttcaaaacctcggacaaaatccggggatagcatcgctaaagatgggagtagcagtgaagaagaatagttattggactatatacaaaactatagatttggaatcagtaggtttacaaatagataataatattcgggattttagtaatctaaaaatgaaaattatagaaaatagattaagtaatgaaaccgtaggaatagaaaatcaaatagaatatctagctaagctaactaaagataggttttttcatattttaccttttcattatagaaacaaacgaggtttgtttaatccattaggctcattcgtaaaagctatttctggcaatttagacgaaaatgatgcaattaaatatgatagtgaaattcaaaggttacagaataaagagcatgtagtcgaacgtaaagtatcgtcaatgacaaaggcttttgataaattaataaatgactccgaaataataaatcaaaatattaaaaacttgggtttacatactgatgaactggaaaaattagttgaacaggagtttagatttaacaaacttttccatgtattaaatactatgtatcaaattttgagtaactttcgaacttgttatgaaaacataaaagagatcgagacggccatagcctttagcaaattaaatacattacaccaatccattataaatagcacagaattatataatacgttagaagtaattgctaaacatgctcgaacaatatatccggtaaaaaaaggtaatttaataaaattagaacgtaatattattcttaagtcatatataaataacaacaagttagttttcgttttagaagttcccctaatagataacgaaacatataattattacaaggttatacccattcctatattccattctccaaatacctatactattatacccaaatacccttatatgatggtgaatagattgaaatacatgcccgtagtaagcccatgtgttgagattgaaaatgacaaatttctttgcgctgataccaatgttgcccagtatccaactgagacctgcattgaacaaataatgttgctgaagaacgattacaaaagctgcatacagaaccatatcgaaatagaaaaaatcaagattcaaaaagtaaccaataatcaatggttggtttactcagaggagaatctcatcatcacggagaattgtaatgcagatatcctgaagtacactgttcttggaacttacatcgtgacacctggtcaacaatgtgaaacacaaataggtgatgtcatcgttaccgctaccacaaacgctacaggttccagccttcagctgccaaagatccagatgcctgagctgcaacagcacatccagagaaggttcaagaaagtggatctaagaaatgtggactttagtgatgtgaaagaagtgttacaaagtgcaaagtttagtgaaatagacgatacaactcaaatagtgacaatagaaattagtatatggaccattttcgtgtatatcatcattataatattaatagtcatttttataatatacaaatttcagttagtacatttttgtcgaaactctccgaaaccgtctgcgacgccttcggataatttctctcttggggagggaggagttaaggaaccccaatctacacgtattagctttgtcagcaaataagtatttagtttattgttaagtgattgttttctagaatattccatagcccattcagcacttataataatctaggacgtgcgtcacatccgacaacgttttactatgtactacgttagcaataagttagtatataagatgagtataatattattttagacaattactgtattagctgtaactctggtcgaataaagttatttttttaactctttcgttgctggttacttaattcgcgcgcccatttatattttaattttctaaaaccggagaatattcctctcctctctatttttcttccttccattcgaaggttttagaagaaaagagtcgcgcgcgaagctatcgctctttatatagaccttatcagtggatcccggggtccgaccaatcagagagcagcatttcgacggcccctggggcactgaatctagtggctcactccattagttaccgttgggagaacgagacgtgctcaattcgtcaatgaaaccaaacacatgttatcaattaaaaaaataccctttaacctcctaaatcccgatgtcctatgtatggaacatttaacataaagaattttgaactttattgttttttttaacctttagagccagggtacactcgtccctatataaccctctttcttcccttgtttcaattagtagcatggcggcatgtaagacgtgtggtggttcggaccatactcgaacaagttcaaaaaaatgtaaaaactatttaccacccataagaaaaaggaatctgagtgaatctacccaactagagatttataccgtcaaacgaggacttgcttcctgtctttgtccgctcttggatccagagaaaaaactcaaacttttgacagaaattcgacgggatgttcgcgatctctcacgagtctatatcgaactgggtgtttggtataattattatatgaagacaagcaccgaacttccacctaaaccagacgtgttgaatttcatctatgccatgaagggaaaaggaccctataataacgtatattctaccatgtttagtgagagaaaatttgacgataaacttcgctcatttgtggttcaagagatggcgaaacagtacgagactgtactacacacaaacatcagcacacacgcctactctagactggcccgctatttcaacgtgaagcgtaatgatccagcgttgttttcggctttcttcaagaaagtgctacccgacgataatgaagagatgcgtcgagtttgttctattatcaacgtggacactgtcggaggcgccaagtggtggtctactattccagaatggctcaaaattcaggcaaaacttgaagactttcgactatttccacaaccatcacatggactcaaacacattacctacacatccaggggttggcatgaattactgcgccgtgtagatccaaaatctattacgggcaattggcccaagatcattgatcatcgacgagaattatgggctccttggttagatattaacatgataaaatttgggtgtaccctacaaacagatggctttagcgtgaatctatcaatgagtcgcatcaaaagggagcctagtacgtcacaaccacagaaacgatcaaagaagagctatgatcgtatcatcgctgttgatcccggttccaggattcccgttgctgtggtggaatcgcgcaggttcaagtttcaacgtgtgacaaaaaaatatgtgcgctcacatacattggagtggaagcgtgcacgagtcaaagacaagttgtgtcgagtcagtgaggaggctgaacaaaaggctcgtgaaaagttggattttcccgtttcttctaaaaacatgagccatgtcgtggaatacacggtttttagaatgcactggttcaacgttcgtcaggaaccgtatgagaaacatgctaagctctcacgtttgaaactagacaagtatatccgtaccgctaaatgtgaagaaaaaataatcaaggaaatattcgatgatggctccaatactctagtgttgtatggtgctggaagtaaatttatgaacaaggcttctttcagcggtcgtaaattcaaacatgactcgctcatcaaacgtctacggagtaagcccaacattgatgtagcggtcgtagatgaacagtatacctcacaggcgtgttcttcgtgcaacgctacaactggacagtttcagaagattgtcatgaatcatcgactacgctggggagtttgcccaaactgcaacagcgagtttgaccgtgacaccaacgcagcgaagaacattttgatcaattatacacggtctaccctctgtaggccaggatgttccaccaatggagcatcgtagcctcctatatatttttgtatctcggtgtcaataaggttcaattttatccttggacttttttggtgtcgggatttaggaggttaattaattatcatccattcttttggcttgaataaacaggttgtatagcacaggagttagagtatttattcccgaacgatactccttcttggcgagtttgaacatttctatatataatgcagttttcgagcttctcttcatcgttagtagattggccataattttggtgtatgcagcatcgaccgttttatatttttttaaattgaacaacgaaaaaaaggtgggatatgtgagatttgggtatccatttttcgagtttgttcgacggcgggatttggccatcttatattattaccgttcaaaagatggatactgggagctcataagatgtctgatgtgcaaaatttgttcaaaacaaaaacgcttcaagcatatctgacttcaaaaccagacactgtaacaacagaggatggatttaaaaccgcgtttggttttgctaaaatctccctgctttggccattttattcgtattccactccggaattgggatggacctcttggcagtcgagggagcggacattcatagctcaaattaacctaggcggtaatatattcaactcagtttgggctgttttgaatacgacttttaatcggttcatgggtaaacccctgccaaaaactagagaaagtattctgggtgaattggttaaaatgcaacaagccatgactggtatattcttgtatgacaatgtgaaacgttacaaactgattggtatgcacgatagaacagacgactggcgttcgtttgcaatacagattcgtaaaagtcttcctaaatcatccaccaaatttaatgacaatttcaaattcattaaagcaaacgggcctgataaattcatttacgagtccccgagcttactagagtcattttcaatcgctagatatgtcgtcactggtgactctgaagttctcaatgtgctcaaaaagtatactctatccccaccgcctacaccggcaaagaaaagagcaaaccctccaataaattactttttaatatttggtttgctgggcgcaatcgtttcaattgtattattcatgacaaggggaacaacacgagtcgcggcacgaatacccatcatccgtcggccgcgacatccaccttcttatcagaggggcgtgggtatagcatatatataaaaaatagaaacaaaaaaatatatttttttatacatttatttcaagagaacatttttatttataacatttcaaaattataagtatataattcactttgtggagtagagtggacgaacccgtagatggtatcacccccgaatgttgaaatttccaaaacagttccatgggtatcactaaatcctttcaagcctttcaatttggtgttcacaataggaatcctttgccgatagtcgttaatcttgttgttggtctcgagcgtaggtggtggtgatgtcatcgagtaaatgatacatataacaatcatgtaacatatggatataatcatcgctacttctttacatataccgttgcagttttagtaacatacatgctcgttttatcagcaatagactcggccacaacaatcctgttttccgtctcccgaaacacgcgcttctcgactgttccttcggcaaactttacattttcctcaatgaacccgggacacgtcatcacctttgattgtactagagtttgtttgtaatgagacaaatcaatcggctgcggactctgaaacatttcgtagcgcgacgaatttatccgatattgaaaatgaagcgtgtaaccgtgttccacagtcttcattttaatgcggtcccaaaacgtaacctttttctcgcccattgctcgcggtggttatccgcacactgttgccgacgcgacgacggtctgcgcatcacaactgcgctctaaaaacagacggcgatagttctatctcatttatgtaatgtgcaacatctagaatatttgtattaaaattgttcattaattgcgcagcatgacgaatgttctttacgtgtacagaacgtgactcggacggattataattatttaatatgcgcagcaattttaatacatatgggacttttattttggaaatttccttttcaatttctgccattttttcattcttttccattaaatctcgacgaacagtttccaaggtgattggtttactcatcaactcgtcaatgcgctgaccacgcctattgatataaccgtccaatttttccatgatatttttcgtcttcttctctaaacggtctatggcttcatcctggggaatcgcgtcatccatctgcatttgtgatgtcagagtctgaagaatgtctccgtacactgtttctacgagtatggcaatctttaattgggtttcatccatcttcttaccattagcacagagtctcttgttacgacgtgaaaagaaaagaccattcagaatcggtgccgctgaaataaggataatagagcagtttggaaaagttttttctactcttgatttgcaccgcttcaatatatccagggtttagtttcatatatcccggggcgacgttatcgagacacaatacgggaaacggaagtggcaccgtatacattgccagcggaccacagtcgaaattatccaccacgctcacattgatggggaggatactctccgaagaaccaacgattaatccataacagccgccgggcaatatatatttatatttggaatatattttggatggaatctgaggaggtatttgtctgtctccatccatagccaagggtatcagactcatatccgcgggtgggtttggatcgttggtcaaaatctttccatccaataccacgctcaagaaatcatccacttgattgaccaattcctcgatggcgtcttcatcatcatcacagtggctggaatcaaaaatgggaatttccccaaaggcgctattctccttcaaagttttctggtcaaaaattgaaatttgtttgatattgaaaaaatatatccaagtcgttgaagttttttttccactgtgtaaccgtgtggtaaacattacttcatatcgctcacccaattgcaaatctagagccgattctagagccggtgatacgttacccgagcaaataatggttgaggtaaacattatgctagcgcgaacacatgcagaatactaaataaaatggacgcccggcgtatttattcagcgacttcaaattaccgcctcggcgcggagctagtacttgacgagcgcgcacattagagttttcattagagaacttccgggatctcgaacatacaaaccgattgtatacacgttcatacaaatcattcccaataaaactataattataatcaaggcaatattgagcattctcttaacataccccccggaccccgaaaggaaatgaataagaacttatggcggggtttcttcaaacgattatcaccacctctgtgggttatgcactagccagtttaatagattctggtacctatgtactgacgaccgctttcacgacagatattagactacaggcaaaagtaaaatttataacactggtagtgtttttgataacattacttggggttggggcgttgacctggtgaaatgaagatttctctgttggttggcgtacaattgtttaatattctatatatcttggaaagcttatctggaaaaggtttatctttgcgcatctttaagaatgttaatgtatttttatcgtctaccctaaactcagcaacccctttaatattaggtggagcatcgccccattgtattactagattattcaacttttggcctcgaagagcgtacaacatttggacatttacctccaattctatggtgtgaaattctttatatttgaatattatggtatcactaaacagcaaccatccgtcggtaggccactgggttttgttcgatgatgccaaatctaaaacttctccgtcgcgagggataggataaaaggtttgaatttgtaacgttgaagatagccgggaccaggtctgcattagttcgatggctttcaacacgggtatcgaaaagactataaactcgtttcggggatggagatcacctttggcatcgctaggaattaaaatgccgggaatccattgagcgggtttcaaaccaatcgactttacaggttgaaccataaaaggtatgtctataaccacaaaagaattttcaatcatctccatagtcatgacgtagatggctctaggtcgaggggaagcaaacaccccttcaaactgagtgacgaacccctttccaaaaacatataatatattgtgcataaatatcgctttgaaacgaactccatccaattttctggccttgaacgcgatagagtttagttttgtggctttattgggcaactctgtgaatcgacgcgaactattcaatggtgtttgagccacaatctcgataggatcaagattggataggtcggccgcgccgctcaatatttctagaaaaaattgtcgacccaaagcgttttcaatacagagtaaaagttgttccggactactttcatcgtcttcatattcaaacaatagttgcaatttttccttttcactgggtcccgttatggtatttaaaacgattctaaatttcgcactcggataatagacaaactgatggtgtgtcaatgggttgcacgggaccatgtgtttctgtgccaacaccgttacgcgttcaagagcggccgacatcaagggatggccaattaaatcgtattccactgcacgttgatgtctaatcaacaatatatcattgtcgtatacaattgccacatctttaatctccttgaacaactttaactgcaattgaaaaagggtttcttcggatattgaacgaatcacccaatcctcagaggcggtaatgccaaaagtatccaaaaatgtttgattttgttgagcgtagaggcgataatcggtcttgggcgatacaatttttgtccgtttcgtcgctctacctctttggtctagggtatatttcatttttttataatcctcgatggaaatgttgtcaatcaatatagagcattccgtttccagagtcgccgccatgacgtcacgcgctatttatattttaattttctaaaaccggagaatattcctctcctctctatttttcttccttcccattcgaaggtttcagaagaaaagagtcgcgcgcgaagctatcgctctttatataggccttatcagtggatcctggggtccgaccaatcagagagcggcatttcgatggcccctggaggcaccgacgaaaaggaatcagtccaatattggatgtgtcgatgaaaggacgtcttgccagagtaagaatatggatggattccttttctctattgcgagaataaaaaataccgaaaagcataaattttccaccaacccgtgttattcgttatcgcaacgtttttttagtcgaaacgaaggcgtttcttggaaaatgattataatgaacaacaaagttcaattaatcaaactagacaatttaacagttctcgttagtgtatcggtagagcttgagaatcgccccggattatattcattccacccacccacactgctaaaggatgattgtagaaaagttcaattagaactaccctttgattgttctatttcgacagacaatgcgtatactttgtgcatcaattattatcggataaatattcggcaatggttgatgccccaacaccaaattattcgagaagattcatacactgacgtatccaaggccgtgtccccagagtttgagtggatgatacggaatctaaacgaagagcccgttgagttgatctcatgcgacactaacacgtgagccggcagtcggctacgagaagccatggcgtgtaggtctcgctctcgcgacatgtcaaacaaccattttaaaaaaattcctcccgaactcgtttgggtgattgggcgacaattatctgaaggtgattttttcaatttcaaaacagcccttctgaagcaagaaccctcgaccctcttggatattccctttcttgggtccaatactctctgtccatatttatacaaagaggacaatgtgttcaaggtgggcgcagacaacactttcaaagtaattcaaaaggtgcgtttcaaggatcgctcatattcaatggtatttgaacgatattgcggcctgaagaaaatgacccttcccaagagaagaatgcttcagatcagatgtggggacgaatccgagttttctattccgattccgaagaacctggacttgtacgagtatagatttttggtaattgatggaatcacatatgcgacgtgtgccaaccttgaaactccaaaaatacccttgtctgatggaaattatctcatcaagatgggactctttcttcagaaaggatcggtacatcgatatccaaaacaagctcatctaccgcccgattcgttgaagccggtgctgaatcccaaccgatacgagtatttctccatatctctgacgacaaaatattcaacttttgaattgtatcggcgacagagaaaaataacgtcaagaaaatggtttgacccaagagattaggataagatgttattttttattctactcatggtcattggcgggacgaatggagattcatgttcaatcgcacaaacggcaatcatctctggactgcgagcagatttgacagagtgtgaggaaaatttgagtctcgtaaacactgaaatgaatagagccaaactcctgcccgtcattcatttggaagaattggtaatccaggctaatcgcaccgtcaggctcttggcggatattacaattgtacaaatttccaattatactgatgatttttacaataaaacaaaatcgtttgattttcccaattcccatttcctaacaacattggtgtttccgtatgccgatggacctgtagttttactttccccgaaagagtttacaaacgtggctcctctcctgggattcacatgtgatttgggcaagtatattctttccttggagatggacgagggtacgtgtgtggcgggaaaacattacacatggaatagtcttagaataggtgatccggaaacgtggacggagagtacacttgagtttggtgataaggatagtatgcgtttgacggtggcgtcactcgataagggtgcgctctttccagtctgtttatttgctcaggcggtgggcgcttgtaactcagtctttttcaaaacctctcgggtctcggactagctccgtcatggacatgcgtctggaagagaatcgaataaaaacatttgacacatggcccgttgcctttttgtctggaaaaatacttgccgagaatggtttctattacctcggtcgtggagatgatgtacgttgtgcattttgtaaagtagaactgaacgattgggagcgaggagacgatcctattaaacaccatcggcgatgggccccgcaatgctcgtttatacaaaaagggatcacatccaaggttcaattgtcacatcctcgatatgattccgaagcggctcgtttaaacagctttgtaggatggcaaaactcttttaaacaacgaccaaaagacttggccgaagctggatttttttacacgggccaaggggatttgacaatttgtttttattgcaatgggggtataaaaagttgggaaaaggaggatacgccttggaaagaacacacccgctggtttccccattgtgagtttgctcgtcgtatgagagatgaaaaggaccgaccatcttctctatcatcgactctatatgaccaatcgatatgtaaaatttgctacgaagaaaagtgcaacgtttgcttcacgccgtgtggacacgtcgtagcgtgtgtcaagtgtgcagttaaaacatacaaatgccctgtctgtcgaacccccaatgtgaatataatacgaatatatttttcataaaattttgtttattttcatctgttccctttcctggtcagcatgtgaatgattctttttcgtcagtgcctccaggggccgtcgaaatgcggctctctgattggtcggaccccaggatccactgataaggtctatataaagagcgatagcttcgcgcgcgactcttttcttctaaaaccttcgaatgggaaggaagaaaaatagagaggagaggaatattctccggttttagaaaattaaaatataaatagcgcgcgtgtgacgtcatgcagatggtctataatcgagcccaattcgacaagaataaaccgcctataactttttacatagcaattcgcgcgactgacttttgcagatggtctagaatcgaatcaatatgcgaaaaaagtgatacaccctcattacaagaataaaccgcctataactttttacatagcaattcgcgcgactgacttttgcagatggtctataatcgagcccaattcgacaagaacaaaccgcctataactttttaaatagcaattacgcgcgaccgacttttgcagatggtctataatgttttcaaatttcaatgtggtgttagtttcaaaatatcaagtcctttggttaaaaaactaatagacaagagtatggttccatatatcctcaaaacgaaaacaatcgaaacatattttaacgtcatgcctagtataaaaagccaggccctctcttgtcccgattctgaaattaacgtcttgttttctcaaaaatttggtattgagatgattaccgaactgggacgcagtcattgttctctatacatggagggggattcatgggataaacaagaaaaggaatttaaaaaattaattaaaactggtaaaggggaagtatttgaagatgtatacacaacaatgaacgcagcctattctcgttatacgagaaaggttttgccaaaagatagcaccaagttgattgaggtcctttcaaaaatacagtcttgtatgataggttactttatatattttcccgagtgtgctagcgatactctaagtactcgaactcgatacatattgccgggattcaaagttgacgattggcgagccatggccaagagttcatcaaagccggctccctatagcattgatcaatatgctgatgccatcttacaaaaaaaggggaatacaaaaaacctcattttcgaaaatcccagtctgtttgaagcgtttaatatattgaaattttatatgaaaaaaaacttcaagtttatggaagcgttgagtgattccggaaaagattatacccaaatatctacagcttatacaaaaaaaataacccctaaaagggtagcgttggccgtgagtgtttcgggtatcatcttggcccttttcctattctttttgaaatatctacgtaaacaaccagaggtaggacccgtccctctaccgcgtttcggacgacgtagaaattatcaaattgcaaactttgatgcatccgctcccgatcagagagccgtttccgttgcatttttataacattggcgctgacgtcacgcgctatttatattttaattttctaaaaccggagaatattcctctcctctctatttttcttccttcccattcgaaggttttagaagaaaagagtcgcgcgcgaagctatagctctttatataggccttatcagtggatcctggggtccgaccaatcagagagcagcatttcgatggcccctgggggcactggcaaaaatgaatcagattgatgccaaccgtgggaaaggaaagacggttaatcgcacgccaaccttccatgtatcaattctaggttcaaaagtcgatcgtttttcaagattgcatgaatccaatttgttatcaaatgaatttcttttttattcactattgaaaaaatacccccaacatatataggtaaagagggatatcgatctcggatataaaagctatcaatcacggtaaatggtatagtgtcaagacgccaagctctatttcccgacaccaatgttataacgtcatttgtgttaaaatcgcctgtaccgataaacgcataatcaatctttaaaa

SEQ ID NO: 47 - DNA, 21713 bp, Spodoptera sp.
  source 1..21713: mol_type = other DNA
aaataactttcattgtagacttctaataaaatcttatcactcacctgtcacttgtattgccagcaattgatgaacaatatgtcgtgcagtaatcttaaataggtcacgactgcttattttcttctttttataatatggcataagcagtttaaccacaagactggcaagatctaccttttcggccttttttgtagtagcttggttatctttagtcacatcacttttgatcttgtgtttactttctttgtggtgtgatttctcgtttttgtgtttttcccttgaggcctcctttgtctttcgttcaattttattttttttacttaagctaagtttgtgtttagattcatatttttccttaattttaggtggtgctgaagaggatagtaatttttcctccaggtctttctcaatatttgattcattttcagggagttcaggttcaggtggcagatctttaaacttcaatagtttttgcattattgcgtctgcttctaggcttagtttacgagctttattcaagttcatatcttcactatcgacttgaagcgaccctccagaactgttagatttattttcttcaatagtagagtcctgattgcttttcgtctcatcattctcatcgttaacattgctaagtactaaagtttcttctgcacttttgttaatgttataatcagtaccgtcgtcgattactaattctttttcagactcatcatctgattgcccaaataatgacgcaggttccacagaagtgccatttgtcttaggaacttgattgtttgattccttgacactatttttcgtagacggtttttttatatgattgcttttgctgtggcttgtcttaatttttttagatggcctagtttcgctatcgctatcggaagattccccaaacagggctttaattttcctttttgatggagatttacctttattcgttttacgatcggttttcattggcactttagggtcattttttactttttcaatttttttagtagtatcttgttcatccgtttcattgtctttaacgttttctttattggtttttggtataccctttaatgtaatattaatcacgaaggtatcagattcatgatcggacgagtgtttgtcaacgtctgctggttcgccttggacacctatagtttgattgtcatcagtgttggcaacttcatcattgatttcttttaacttaagtgtagtatcattactgtttgtgttcgaatcgttgatttcactgtttcttctgtctccactattttcatcaataacgagaccatttgcatcatcatcactttcattaggactattgttagaagattcctttgatgatttaacaaagaagctttttagttttgtctgtgtcataaggtctctcttaaaagagtttgcttttcgttttgtttctttatcggatttagataattgaatttcttttttattttccagttctgaaaaaactaaaatgtgttaaaacagtgatacagttaaaaatttacagaagccacttgtgttaccagtacatataacactgtttagagtgcaaaaacttacctaattgtgatgcagtaataaaaccgttttttgctctctgttgctcatattctttaacaaattccctgagtgtgttattttttttcggctcaaactcttttaactgtggataaatatggtccttgcatgcttttacggaagatatctgaaaatagtgattattgtattgttaaaattgcacgttgaagctgaaattaaggatttttagaattaatttctcaccaacttggacatcgctcgcctgtacaaacttatgaccgtactacacgagaatgcttcgtactccagttctatagcgcactgctctatgtcgtttttggaaagcggcttgtcgaagtggtcaatgtccttagtgctatgaaaattattatttaaggcatcggtaagtaatacgagatagccatctcggctcgctactgttaacccattaacctaaaacaaatattattttccaattaaagttacagtaaatacctaaatagaataatgaattagataactgtaaattgattagaatgacgtacgtaatgagcaaccatataaaaaatataagttgtcaaacgacgaagttcttacgacgtttataggtttgaagtaaaaacaacaaatgaggttttacatattttatcccatacttactttattgggtgtactttcagcagctttacatttcgaatgtttggcagattccgcatcattactagattttttatcttcagttcgctttttcctattagcaaattcttgcattataagagatttcgtttcctgcgcaattctacgacggttactttcaccatcggaatcaccactgtctcctccataatatgactcaacttccctaaaatgccagtaaaatatgaaaactcaattactgagtagtgagtatctaattgttatgtaatcaaataactggtagttatcaatcacaaagtgacatagatattttttatgaaatagtaataaaaacgtttactttttctgtcccagtcggccttccccgtagaggtctgacacgtcctggttaacaacgagtccgccggagcgtagctgtgccgacgaggcgcggcgctggtgctggtccagggcgcgccgcacgctgcgctcgtcgctgcacacgtcgcatcgcccgccgcacttcggaatctcctcaccgaaatactcagcaaaaaccttatgacgacacctaaacatcattaagaatatatagtgtataatttttttatgacagtcattaatgaatatgtacaataacttacttgatatcttcgcaatatttcaccataacttcaaagcttttgtaggcgaccttacacctatttttttgctcaggtgttttagagcgccctacttcacttttgagtaaaaaatcaacagcattgcgttcactgcggcagtagtaaatacggcaaaaagctggcttgccgtctcgaccagctctaccagattcctgttgtttaaacattgaggtagctatagacacatttacatgacactgttgtgtaggacatacgaaaaatatttgtatcaattttaagtttgcagcaagaagtaataggtacaattattataattaaataggtagatatttttaaaacacaatattggaatagcaaaagtttcttacttgataatacgcggcgacattttgggcgataccccagtgggcaacggcgcgcacgctcgctttatccactcccatgccgaacgacaccgttgcacacacgcaaggtacttcgccctgtgaccatttttcttgaactgatatacgttctgaagatttcatacctagaattttcagaagacatttttaagataatataataaatactagaccactaaacagatcctcagactaacccttagacactgaatatgaaaataagttgttgttttttcagacctgacaaagcctgatgattttaaaatttatgttacctaccctgtgaaaaaaatgtttgcatgattactaaatgtatttacaataactgtatcacactgataagttgtattatagacatgcattacatacaagtttaaaagttatcaaatcaggaaacattttttttttataatgtaggtagtacaattcatatgttttgtatacctaatttttttatattaagcacattttaaactgcttacctccatgataagctaaagacattaaacctcttttactcaacatattggctaaatcttcagtttgttctcgagttcgacaataaactatagcagcatttttatctttctgtaataaaacataatatagttattaggtaatatgtgaggacaggtgactgaactgaaaaatacttttttttaatcttacaggtttgacattttcattttcttcttttaaactttttttcaagaattccgttaagtggcccacttcatcatctatgcagttttgataaatcacatcatagaataaatttcttctgaaacttggtgttttatatagtgccacaggtaataacagcttgagattagataatatatcctttgccacttcagcacttgcagtagctgtaagggcaacccatggtacacttttatattgttctcggagattacctagctttaagtaatccggtctaaagtcatggccccattcactgacacaatgagcttcatcaacaacaacatatgatagctttttatatttcacaagatgctccatcagagatttaaatgtacctgtagcagcctgttcaggtgttacatataaaaatctagtgtttggtttcatgcttcttaaatcattaagaactctctctctatcttttgatgtcattttagaattaatagattcagcattaatttttattttagagaggtgatcaatttgatctttgatgagagccaacagtggggagaacacaatcgccactttattgtcctgcaacattgcaggcaactggaagcatagagactttccagagcctgtgggcattgaaacataaacatcgtgtactcctggaattaaaaaaaaactatgttagaactattctaaaagacatatctattctggatctggtagctattttggtagctcagtgtatgcagaatttgcaaagaatgaaacatattgcgtttaaataattttcgccgcctatttatctagataagtccttcaaactttagataaaatatctaagcttatacatcttacctcttgctatcgctctaattgcacgttcctgaagttcacttttgaactttcgatgaccaaaacactgaaacaatttttctgttacgttgtccattgtaaaagacttgaggcttctccgacgttaaaacaattagggcacgtatattgtgaaaacttttaaccatgtcaggtttgaagacatattttgtataaataaagtatttttatctaaataaataaagaaaaaacaacctcaaattattttgtatccaaaatacacaactgacaacgaaatgacattgattgattgagtgtgacagttgacatttcgactttcacataatgggaagttccaaaggctctaatagtacactgaaatggtatggagtagtcgaatttgtggtatttaaaaagaggtagaatttttctatttcttctactttgtttgatagggatcaagcctaaattcctaggttaggcaacgtgttgctgaatataaccattattgcgattcttaatattagtttatggagagttcctgaaggagggaagaggttgccggttgccagtacgttcaggaagaactgcttatatgtactgcaaaaacattgactatcccgtgtctactccgggaaacaaaatatttattttcctacgtacgtacgtacgtacctacgtacggaataaaaaggaaataatatataataatacggaaatacggaatataaacaagcaccctgaccctatttctcaagaaagtgcggaaaaatcctgtaagaagtattcatgactttttatgatattattagagtattatgtatttacttatttagcacctccttacttaccatgaaggaaaatgtcgtaagcaatgaagtgcaaaataaattaaaagttttaaattgcctattcaccttatcctcctaaatcccgatgtcctatgtatggaacatttaacataaagaattttgaactttattgttttttttaacctttagagccagggtacactcgtcccagggaatatgcataaaaaataaaatggcctgatttttttttccctaagcttttaaggtcgcagtattacactcaattcgttatttcctaatttaatatgcatttaattatttaaaacttaaatcaaaaagtgaaaaatttacgcgcgtaattcaaatttgtaaaacgcctcgtgacgtcatagggcacattatcgtcctgtcagtcagtcacgtgtaccaactcaactgtctgtcaaagtgtcaactcatggtagaggtacagcttgtgtttgagaactttgagagaaaaattggttgtatttctatactagcttagttttctaaaatagaaatatcaagcatcatcaatagcaatgacggacaacggttttgtgaaagcacagtcggataatcttccaaaaatagatgcatttatgatgaccacatattttgcgtcaaacccagattttacatctgctgaggttaaaggagtaaaagctgcaaggtaattattgtcaaacatggtatttttaaactagtaaacctgtttttatgcatacgtgcacttatttaattatttccctaaatataacctcaaatgttgtttacattcattatactttattaaaacacgtatgaattagattatacaatcaatcgcatgtttttatgagagtaggtaagtaagtaaacctagattattgtttattacaggtctcaacgagaatcatacggcgattcagctgtaggatatgtacaaattaaacgagaagggaacttatgtgtagtgaaagctcgcatcacaccagagcacaatgttcgtcagaagtcatatgcagtacaagctgtatgtgatgaagctgaagaaactgtaatttctgtggaatgtctggattgcgcagcacacttaggtacgatctcttttacttactttgtgtttgtggctgatgatatacttgttatctaagtaaaactcttgacagtcataagtcatatgtaaccataaagattgtcaaattattatgaagtcaagaacttatagcaccattaggttaaccattactaccagaatgatatattgtgtaaaaaacataattttattcttttgttttaggaggatgtaaacatgctattgcatttttagcatggcttcaccgacgtagtgaagatcctccaagtacaagcattgagtgttattggaaaaaatccaagctttcttcagttggtactagcttgaagtttattaaagcaaaagatatttgcaaagcacctaaagtgaatcccgcatcaaattcctcaagcactggcaattttttaacagtagtaaaaaataattgtgtgagtgttggtgatacaaataatcatctgatgaaattttatcaatctccaaacaatgcagagagactgtcgatccatcatttaattcttgcaagcaaggctacaaaccctgttgagtttgttgaatattgcaaactggtaatgagtacagaagcatgcgaacaagctgaattgataactaaagaccaaaatgactgtccattatggcatgagctaagatatggaagaatcacagcttctaaggcatatgaggctgcacattgtaaagttctggatggttccttaacggagaacatattgggagcaaccaaactaaaggacacagaagctatgaaaagggggcgatttttagaaagtcaggtattaaaagaagtagagaaaattaaacaaataaaaataaataagtgtggcttaaaattaaatgcggctcatcctataatgggggcttctccagatggggaaagtactgtgtacagcatagaaattaaatgcccatcatcagaaaaagcgttgagccgttatattgacagcaatagtgaagtggctccaaaatatatggcacaactacaacttcagatgcattttggaaataaaagtaagggtcttttttgtgttgctgacaataattttgaaacctctaagaaagtaaatattatagaggtggaatataaaaaacaactgtgtgaaacaataatagaaaaatgcacactgttttggcatcaagccattttcccaaaaataggtaaattgtaaaaacttgtacttttactttatctgaaataaaacaaatgcattcttaattcatttttttattaaaacatcctgaatatttaccaaaccacatgccaatgttattgcatcatcaatgacaggtattaaattatagtctacacaagcatgaggcagtaacatatgaaactctcttaatctatttattacacgttcaacatgaattctcaaagctgctattcgttttgactgctttacttcatctttggtgcttgggttggactgtgaaacagaaggtggccggacgagagtacagtctctggctcccagtaaatgtgataagtctttaaaccctctgtccgccataactgctttttttggaggtaagcagtctaagtaaccacagtcttgcactatcatgacatctgtagctcttccaccatatccatcggatataaaattaatcaacccatctggtgtacatgaaattaaatacttcaatgtattacattttttgtactgtgaccaagtaagtgattggtggactggatcggaaggtttttcaatctggatttcaaagcaatcaataatagaaataacatttgaatacctagctctaaatgatataggtaaatttttatatacctcagttggtgttggccacacaatcaagtctttcatttttgatgcgattaaaggtaaacttttattgaatattctactgatagtgctctgtgagtagccaaaatgtaaagcaagtatgccaaaagattcatttaacttcaatttcttaagtgttattaatatgtctacagttggaagtggaatgttttcacttaatagttttattaaatgatatgactgtttatgtaatcctagtaacattttgggttctctatctatggcacttaacatactactgcgcattacatttttaaaatgtttttcatcatctgaatctgctgattcatcttgcacacaataacttaagtcagatgagctacagggttcataatcatgagatatctgtgaagaaatggaagaaatagatgttgtatccgacttagtaggaaataaatttctttttaccgcagctgttgcaggttttattggtgaagttccaatattttgtgatggaaggggaacaggagataaagctacattagtcttctttgttgttaaattaacttgaacacttttacttctgaagtttggtctcatatttatttgcacacacttgtcactaaggaagttttctgtattagtagagacttcaacatgggatgtactgggctctattacagacaaatccataacagaggtactaggcctcactggatcattttcacagccttgaatataggaagtacttggtccggcatcacaataacttgtttgtgaagtttcacgttctaaaacattttcactgttgacttcaggttcggagaaagattcatttataagtgataatcttttcttcttagaatcatacattctctcctgtggtcctggtgcatttcgtttttggcattgaaatttatgaggcataactcctttatttaagaataatttaactttttcgccttgttccttcatgagcttgtatttaatataatttactgtatcttctttgatctgaaataaacacaacacttggtgaagcatcttaggataagtagaaatagctcagatgaagaatcttctaacatgttatgacattcgtaaataaggttacgaacttaaataaagttctgtaacctagaaatttctagaacactacaagatgttatttgtccaaatataatacttacattaaaatgatcttcacaacaatgtaaacgcgatattgaagatacattatattctcttcgcataacctcacaccattgtttacgtatgttcggatctctcggaacagcaaaaaacactttatctggtgtactttttatattgttaggacacattggtaccatgcaatatctataaaatggctttttttcttcttccatgattattacgcgtgttattatctatcaaactctcaatgtaaacaaacaatacaatgacaggtgtgccctatgacgtcacgcatcaagcgcgcgagaaataggagcgtttgaactcgtcaaattaaaccactatttttaaaattttataaaaaagtaattactactcttacagctatggtttattttttttctacatcaaaatgaagtgaaaattgaataaaaaaaataaaaaaattgtctgcatattccctattagtagcatggcggcatgtaagacgtgtggtggttcggaccatactcgaacaagttcaaaaaaatgtaaaaactatttaccacccataagaaaaaggaatctgagtgaatctacccaactagagatttataccgtcaaacgaggacttgcttcctgtctttgtccgctcttggatccagagaaaaaactcaaacttttgacagaaattcgacgggatgttcgcgatctctcacgagtctatatcgaactgggtgtttggtataattattatatgaagacaagcaccgaacttccacctaaaccagacgtgttgaatttcatctatgccatgaagggaaaaggaccctataataacgtatattctaccatgtttagtgagagaaaatttgacgataaacttcgctcatttgtggttcaagagatggcgaaacagtacgagactgtactacacacaaacatcagcacacacgcctactctagactggcccgctatttcaacgttaagcgtaatgatccggcgttgttttcggctttcttcaagaaagtgctacccgacgataatgaagagatgcgtcgagtttgttctattatcaacgtggacactgtcggaggcgccaagtggtggtctactattccagaatggctcaaaattcaggcaaaacttgaagactttcgactatttccacaaccatcacatggactcaaacacattacctacacatccaggggttggcatgaattactgcgccgtgtagatccaaaatctattacgggcaattggcccaagatcattgatcatcgacgagaattatgggctccttggttagatattaacatgataaaatttgggtgtaccctacaaacagatggctttagcgtgagtctatcaatgagtcgcatcaaaagggagcctagtacgtcacaaccacagaaacgatcaaagaagagctatgatcgtatcatcgctgttgatcccggttccaggattcccgttgctgtggtggaatcgcgcaggttcaagtttcaacgtgtgacaaaaaaatatgtgcgctcacatacattggagtggaagcgtgcacgagtcaaagacaagttgtgtcgagtcagtgaggaggctgaacaaaaggctcgtgaaaagttggattttcccgtttcttctaaaaacatgagccatgtcgtggaatacacggtttttagaatgcactggttcaacgttcgtcaggaaccgtatgagaaacatgctaagctctcacgtttgaaactagacaagtatatccgtaccgctaaatgtgaagaaaaaataatcaaggaaatattcgatgatggctccaatactctagtgttgtatggtgctggaagtaaatttatgaacaaggcttctttcagcggtcgtaaattcaaacatgactcgctcatcaaacgtctacggagtaagcccaacattgatgtagcggtcgtagatgaacagtatacctcacaggcgtgttcttcgtgcaacgctacaactggacagtttcagaagattgtcatgaatcatcgactacgctggggagtttgcccaaactgcaacagcgagtttgaccgtgacaccaacgcagcgaagaacattttgatcaattatacacggtctaccctctgtaggccaggatgttccaccaatggagcatcgtagcctcctatatatttttgtatctcggtgtcaataaggttcaattttatccttggacttttttggtgtcgggatttaggaggttaagcaagtatggcgattccgatccttctctgtatgaggagtggtttttgcccaatattgaaaacatcgtagtacagtcaacaacagtcaaccacaaattagaaatccgtacgtggaatttaaatagtaagtcataatgatcacgcgacacgcaatcaataaaaagagcgatgtgttttatgtaattccatttaatcgaaaaatcatttaatacttattatacttcaagattatacacgtaatttaagatcataacaatatgactttgcaaaaaaattaacaaggacaataatttatgtatctataaaataactaattaggtaaaacattattaaattgaaaattatatacataagtctaaggtacaatatcacaaaactcgactttaccttctattgttactcatttgatatgcttttaaacacgaaaaggtcatcttaacttatcgtgtatagcattttgttttaatacagccttatttaattaaacatagcatagtatgcgtgactgactgcttataatctagctgggaagataactagcaatgagtaatgacttttatataaattagtaattgttcgcagaaaaatcaagtttcgggcgctttcttcagcccactacggctgattacgtatcgcaactgaccctgagaccctgccgaggcgaagatattgttatttatcaagtcacaaatatacattccattttaaccacaaggtattttatacatagcaaatattctaatcctcttattcttcaatttatttgacattctatcaaatacgttcagtctacctttagtcatgcattaattataaaaataatttcttttatcttacttatacttaaaataaaaggaatacttcatagaaaataaaagaaatatcggcacagcaatcaatatgtctaacatttttgatcagtcaaaacatttacatatcaatctgtcaattatacagaaacaaattcataagaattggcaagtttttatcattttattgtagtattatttatagatataaacttaataattacattcatccagtttagatgatttagaagttttcagggaagaacatagatgaaaattttgcaaacaataggaaatgtgtgtacctcacttatctaaatattaacagtacacattttaattttctttcagtccgagtcaataatacacatttacttataaacaatttcaaaatttgcatcacattgcttaagaaacaaaaatagcacttgcagtgaaatttttgattccgacaacaaacagtgttttgtgaaaacacattttgggacttaagtaatagacacaaaccgatgtaatagtattagacataaataatgatatattttggtacaaaaaatgcattcacccttgtacatttcgtttctggatggtctttcagtcttactacagcaactaggcgacacgtgaatgttagatgctagttgctacatgcctttagtgtcggaagcgtggagcgcatctacgagccgtagacgagctggtagaggtgcgaggagtggtcagcgagcgcgtcgtcgggcgcgcgcaggtcggcggcgcggcccgccgaaagcacgagcacgcgcgcgcactgcagcacgccggccaggcggtgcgccaccagtaccacgctcgaccctccgaacgagcagcggatggcgtccaggatctgacgctccgcttcgttgtccaagttagccgtcgcctcgtctactagcagtatctgatgatcaaatcattcataataatccaacctagtccaaaatgtgtccatagaaaaataatacacatacaggaaaaaaatgctgtaaaccatcaaagattatttaagaattaacagaccaaattttttggatgaatcaattcatccaaaaattttgcttggtattatatgtgttcatgttcatataaatgatatatgtaaatgggaaagttgtagaatagtaccttaggtcggtgcagtaaagccctgaccacacagagtagctgcgcgtggccgcgcgacagcagtgcctgcgcggcgggcgcgtgcagtccgccgcgcgcgtgcacgaggtcgcgcgcgccgcacgcgtccagcgcgcgccacagctccgcgtccaggtactggcccagcgggtccacgttgtcgcgcaggctgcccgagaatatgaacggctcctgcgggatcacgcctatacgggacctgcaatcatcatcacacatggtctacattaccaatttatattaattttcttcttattgagatttcatatcctagctaaccagcgtactagcttatgtataagcttcataggattttgaagcggtcgaacaatgtaatttgtaattatacatatttacgtaatatacctgagtgagtgtaagtgcagtttcgagatgtcgactccatcaattaaaattcgtcctcgggcgagtggtgctaggcgaagcagtgcagtgaggagagagctcttccctgctcccgtgcgacccaccacgccaagcttctcaccgggatgcgtcgagaatgacacgccattcaaggccatcacaccattctcacgaccactataaataaaatgttacacttagtaataaaataactaaaataattcttaacttatcaagtgcatagtggtgaataccgagaaaatagccaatagttattacgaaagtagctattgaacaatacctacctatatttcaggaaaacatcttcaaattctataacaccttgtgaaggccagccgtatggcggtgagtcaccgtctataggttcactttccacctgcaacaattatgataaagatttgcatacagacagtaggtatttgtaggaaaatataagatcatctctacatcgcgtacataccgtcttgatgtactcgccgacgcgctccacggctatcatttcacgttcagtttccgtaaacgagtttagcaagttgctcagcatggacgtcattgacaatgcgtaggaaatggcgagaccgatgagtcctgcaaaaaatagcagaaatattgacttacgaatttcctgcttgtaatggtcttcagtactttcgtaaatagtacaaagtatcactaatatcattttacagaattagttcgagtgaggagtagcaatgacgaagagcgttagatacggtcgaattatatttatatagaaggaaggtggtaaagggtaaagatatcgaagcatatggatggtgaaggaggtggatatggacggagatgtatgatgataggcaaggtatcagacctgggtcggcggcgtgcatggtccgctgcagcacggcgagcagcgcggcggcggccacgacggcggcggcggcggcctgcaggcgcagcgccagccaggcggcggccgcgcccgcgcccagcgccgcgcgctgccacgcctccaccagctccgcgccgcgcgcgcaccacgcgccgcccgcgcccagcgcgcgcaccgtctgctgccctgtaccagcccacgcgacacttaatactgcttgcatgatatccacacgcacacacttaaaggcgggtccagacatgtatcatttgcccgatccgatcaccgtatccgatcaccgtatccgtatctgcgtttgtatcaagccccgtatcaagttttggacgcctccgatttgctccgtatccgtatcttcacaatagtcatgatcgcgtatcaaattgcttagttcagtttctgctctcgatcaaacatgtcgtcgcagttggttgaagtgtacgagaatttagcaatttcatgtgcctgttttattgtcattcacaatattctaacttcaaaaccaaaacagagacgatggtggcaaacggaattatttagaaacagatacagacttggaggaagagctttgatgagagacctaagatttcaatacataatgacgcgtcccgactgacccacgtccgtatctgtatcacctttgatgatcggacaaaaaccgacatgacatgggacgggccgtatcataacagtgtatcgagatcgcgtatcatgatacgcgtatcattccccgtccacatatgcgatcatgatacgcgtcgacgatacggatacggtgatcggatcgggcaaatgatacatgtctggacccgccttaacacgactacgtattttaggttatctacgaatggtcaggtttcataaaaaagcagatttgactattggagataaagttaagaagaagaaagttaccatctagtgtgtcactgaagtgagtgtagacgggcgagagcgtgacgctctgcagccgcttgagttgtcgcgaggtgacgcggtagaggcgctgcaggcggtagtacacgaacgtcagcggcaccacgcacaccaccagccacggcagcccgtacagcgtcaccgccaccgcgcctggaaccacaccacacacgttacttcgccattacccctcgtaaacagcaatcaagttttctacataatcttaattttgtaataaagtcattattacataataccaaaattacgatactcaccaattaatgaaaatgtttgagctaacaaaatgttcaatataaatggcaacgagtcatccactgtgtaagtatctgatgagaatctgttcacgatacgacccagtggtgttatatcgaagaacttcactttcgcctgaaacataaattaaatatttacaaaaagtatttgagttgagtgataattttttacaatattaaagtagaaaaaaatatactcaccttgataatgactttaagtagaaccttatgaattcttgtagctgctttcacgccaccataagcgaacaggaaggctcgcatgatcgtgaacactaaatttagtcccgccaatccaaaatatacttccaaataaaaattatctgtgtaagtcggcgtcacatttgctttcaagtcttgtagcagttgttccaccggtggcccttgctgggaagtcgtattttcaacatttttattttctagaagcattcttgttgcatttatgatggtatgtataacgttgtctatagccaagactccatgatccagaatgtttgtcttttccgtgggatgttctagaaactcggtatcttcgagtgtggttgagtttttagtcctgttcttgacccagtacgttagccaaaggaaggtaaagttttgtgatagttgcatgagaactaaggaaagtataatcgtgactgagaggaacgctcccaccgaccgtaggtacaagccaatgacccaccaaccaacagttccctgcgacattgattcctgttgaaagcagtaaaatatggaattattttatttatattttgggctaaatatagcaatactaaataagatactagaagaacatgtaagtcatcaaacctcgtcatccaagctgttcctgctgaccgtgtcattgttatcctgttcgggttccggtgcccgcggcggttcctctcccagggactccgactcactcggcagaaactcttcgatttcatttaatacagtttcagggggacctatagatattttatgacaatattatatgacacatccataggtcactgttacttatattaaaacatcttgaaaaattccttctatgtctgtttattgcttatataccttaccttgccttaatatgcgtccgtcctccatgagcagagtgtacgaggtgcgcgcgagatgcctgggagagtgcgccacgaatatccgcgtggtgtgtcgcagcaggcccagtatgcagcgctgcattatgtgcgccgccaccgccccgtccacgccggccagtacatcgtccagcaggtacactgcaaacatattatcttgtataacaatggccggccatacttatttattttctttattctgcgactatcaataattgacaggaatgttcgaatgacagtgattagtcggagtttaggactaatcctttataacatggtattctaatcgtaatcaaatgggagaagtgggtgttactagtgcatcttcactaaaaatctagtgttgaaatatgtgtaaaaatagaaaagatctaaattacaatacattatccacacattattgaagacttaagtgattatttatctgtaccttgcttatcctggtacactgcccgcgccagtgcaatgcgcgcccgctgtccaccgctcaacgtacaaccaccttcgcccacgtaggcgttccatccgataatgtttaagtcctctattttaagtaaataaacaaaaccatattagctgttacagaataataattttaaaacgttagagagataaaataaacaggatattataattacgggtaagtgcacaggcgtcaactacatttctgaacttagcttcttcatatggtttgccgaacagtatattatcgcggattgtaccacgtattagccagggcttctgggacacatatccaaaacctaaaataaatgaaatttgtgtcagttaagttcctcatgttaggtttccaactaaagttaattttaatacttactggtgagattctcaggtaattgtaagtaaccgcttttcttaatcatatcaccaatgatagcatgtagtagtgaggttttcccgctgccgacggcgccagtcactccgattaactcctcgttaccaatttctaaagaaatatctttcaacatgaacggctcatcctggatcaactgctcagatgaagatgttgaatcccgcctttgaatattgcccctagacagtctctttttagacttccccttatttttcttagatttctttggtggcctcttcctctttgaaggtttggcccacgagaacgtcgcgttcttgaatattattactttatcttcatcatggttcttattgagacggtcataataaagttcggcgtccatatctggaagctaaatttaaaaataaaacgtaattataacacatgaaatatgtatatgtagtactagctacttccgcgcggtttcacccgctctgctcggctcctattagtcatagcgtgatgttttatagcctatagccttcctcgataaatggactatccaacacaaaaagaattattcaaatcggaccagtagttccggagattagcgcgttcaaacaaacaaacaaacaatcaaacaaacaaactcatcagctttataatattagtatagatgagtaagaaataatttaagattactcacatccaacaacttttgtatacgttttatagacacccatgcctcagtaagcccgttcaatacccatgggaaggcatttagtggtgcgattaacatgttgattagagccactgtggtgaaaacctaaaatgcaatgaaaaaaggtttacaaacaaactaaccaagtttacacaatattattattatataatgttataaacgaacattattagcagtaaaatataccaaatacgtactgtaggagcatcaagaggtagtcctctaagcgagtgtgtgcctagtgtgaaggcggctacgagcactggcgtagtcgcccacaggaccacacatatcgcgtccagatacttgcggccgcgcagatatcgtaattcttgacctcgcgcctctaaaattacatgttagattaacatacatatgatcgccattatttctagtacgtcaagtatgaaattcaatttaaactctattagctgatttgattttagaagattcaattaacattactaacctgacactcgatttatgaagtagtcttcccaaacatgaaccttgactgttcttatacccttcagcaagtcacttattaagctgacacgagagtccttgtgtttcatcatttccgtgctgagttgtccaattttattggcaatgattttgttaattggtatcaaaataacagagaatgccacaccagctaggaacgatattccgacttgttggtacagaaggaataatgttatgaagagctgcaattacaacagacatgtcacgtcaattacacaataaggttatagtatttccagttaaaagtatgctatttatgtttcgtacctgtaaaggtatactccacaatgcatgaaaacttggacacgaatttacaattctgtccgtatcagtcgacatgaagttagtaatctcaccaatagagaacacgttattcagttctgtggaagtgacacttagcgtcttcctcagtatagtggcaacaatagcgccgcgcatcttcagacccacaattgacatgagccagttaaagtgcacattaaacagggcagatatcaaagtagcgcctagtagagatccagcatacacgtaactgcaattaaataaccaatgaaaatgtacatgatattaacataaataaaaaaaaaaaacaattattttgaacaatacttaccctaaatgttgatcaatactttcatcttcaacgaatttgataagataattgagaaggattggaccagcaaatccagccatgtcggaaactaatttgagtataccaatactgtagaattgtatgccaaaacatgaatgcaaagcccgcaatagtgtcacattctggcggcgcggggaacggactagtacccgtgttgtaggcgtcaccggggtagacgcttgtggtgccgtttctcctgttgcaccatatcctgcaaataattaatgacatagttatatacttttcattctaatttctacttaaaggtaaagagataagatcttatgttttccttccattgataattattattattaggaaaatacaaaccacaaattatctacttaaatataatttacaatgtacactatcaaagtgaaagatatctatgaatgttatctcatgattcattcatagatatctttcactttatttacagacctaaacaaagacatttacaatattgttcacatttacctgatcctataaaaggttcatgcggcacttcttcatactgctggtagttgtcaacattaccaattagtgctctatctatccgtgctcccacataagaacaacaatacttggctggcacatcaaacagttcctctggatcatttagtttattttcgaatcctacaaaataacaaagaatataactatgagttactaaaattaaataaaaacaaatactttccttatacttttccttctcctttcccaaatatcttaaaacccaattattctattgcaactgttcaaatcattcaaagtattggagttatattacatattaatataatataaacaaaaccttaagccagaacaaaagatgagtcacaaaagtacaacaaaagaataattcagtttttcttcattactagtttataactaacctttctgtagtagtgggtcaacccatgagaatgctagccttgatagacaaccagctccttgcatagcagtccccagtataccttcatccatgtgtggcagcaggggggtgtactcactctgttgacaaatttaccaccattaacatgaataggtaaattccaatctgaatctttaagatgaaaactcaaaaaacatcaagttacttattatagatattacatattataattttattattattgcaagcaataattttattattattacatatttgtttgttacctaattaactcaaatgcttatttatgacactggtttggtttctgtaatggtgtaataattgtgtgtaaacaataaataaacattaataaatatttattgaagttgtcaacttacatgtgtatgttgtgaaccgactagacatggtgaatagaatgtgggccttgagttacttgatgggagaagtgtcatgaaatacagtatgtggcagcacatggtagcaatgttgaaactcatagtgctcccagttattatactgctccgcagcgcaaccacattcacaaatactgctaagctccacattaacagctgagaagtgggtcctcgagcactttgtcccaatctgtgtttcagtgccaacacatagccg

SEQ ID NO: 48 - DNA, 21206 bp, Pyropia sp.
  source 1..21206: mol_type = other DNA
tgagttcctacgtcgtttcacaaaagcctgtgacgacaatgccataagtgaaggcatggctttttacatgctacaggagtttacgaagggagacctgcggacagaaattatgtccgtcatgcccagctcctcaagtggaggcgctgggaggtgacgtcctatttggagctcgtcaactggttgttgagagccatggttgatgaggcagcgttggcttctcaagtcgagaagtttacgcaagcccatcaggaagaggcggaggacgagttgtcctttgcggagcgagtccgtaagctcaacaatctttgtgggtttcttcatccacaagctgtggtgaagagtcggtttgtggagggactccattggtcagtccggatggagacccgggagcataacactgcccgggcgaccctggccgagttggtcaggttcgcctatcgcagaggcgaggcctaccgcaagttgcgggaggaacaacgccaggagcgtcaggccgagtggccaaggaacgggaggaggcgcgccaggccagagagttgagagaggcacgccgaatccgcaaggagagggtggtagctgccgtgggaacttcccagggtacctcttcgtcttccccagttgggaagacccctccgggaactgaccatcggtgttggaactgcaactccgatggacactgggcatatgactgccccaagttgagtaaacgcatccaacaacttgtaaggaatgcgagtaagaagtcggctacgagcgaagtacgttcacgccgcgagggtgggtctcgaccggtcgtcgcggtcgccacaccctcggcggaggaggcggacacgtcgtcctcggactcgtcgtcttcctccccgccctcagattcggacgccaagtcggcgggaaacgaatgaccgttggggctggtcgtccgaagctcacaacggcagcctcggccaagtgggccaggaggacgaaccaaccgtgccggatactgcggcgacctaagggagtccgccaacctcgggtaggactccccaagaacgaaaacccacgtcgggtgatcgcggtgctgacgggtgagaacttccaggtggctggacgggtgcagcttgcccccggccgtgcatgctgtacccgtatcgtacttgataccgggtcaggagcctccttgatacgcaagtcgctattaccaaaggaggtgaagctccaacgctggaggtccaaggctgaccatatgattgacatcaatggtggggtacttcccatcgttggtgccgtgaccctaccaactaggttggggacccatgaggtcgacgtgacctatggtgtagttgagaatatatcggtacccctgcttctgggtaccccttatgtcgtaacacaagtgcctttgatctgtggccccgagtactgggtcaagttgatgaatggggagactatccccatccttggtaagggaaagtctgtggctcctgtgacagtctcacagtcgaagcctgtttgctctgtgagggaagggtttactgctaccctgcgtttagcccgcaaagtcacgttgccccccaactcggtggcgcacgttgacgttgtaactgatttttcggggaacgggttggtgcaccctaacccccgtcttgctcgcaagcaccaagtgcatgttgcccttggcacgatggactccaaagccggagtcccgtggaggatccaggtgatgaacctgagtccgacgcccaagtacttcaagtcgggagccaagttcggctatatcgaccaacatgagggaccgatagtagcggtcaccctcaacgcgggcgcaagtagcgacccgaagtccggaaaggagaagcatcaagccaagtcggccacctctcctcggccccatgtgaacatggagggtgtcccccccaggttgagggttcaagttgaacgcctcttggaccaatatcacaagttgtgggatggtcaattgggactcatgagagctacccaacaccggatcgagttgaagcccggtgcaccccctatacgccaacaaccgtataggggaggaccccgttcaagggccctcgttaaggagcaagttgctcgcatggaggccctcgatgtgatcgaggccagcaacgccgagtgggcgagtccggtggttatcgtccccaaagttgatgggaccccccggttttgtatcgactaccgtaagctcaacgagagcacggtgaaggacagttatcccctacctaggatggatgactgtctggactctctgggggaggcgaacgtgttctctaccctggactgtaacgcggggtactggcaaattcccattgccccggaggacaggcataaaactacctttacctgtcactgtggtacctaccagtgcaaacgcctaccgtttggtctgtgtaacgcgccggcaactttccagcgcgctatggacatgattctggccggagtacggtggcagatctgtcttgtgtacctagacgatatcattgtgttctcccgaagtccggaggaacacattggccatcttggccaggtgttcaagctacttgctgacgccggtgtgtcactgaaggcgagtaagtgccacctcttcactcaagaggtggagtacttgggacatgttgtccgtccggggcgtctcagtgttaacgagaagaacttgagggccattcgtaaggctcagtaccccccggacccagacccagatgaggagcttcctcgggatgtgtaacgtgtaccgacgtttcaccaagggcttcgccaaggtggcgaagccgttgaatgagctagtgagctcgacgctaccgaagaacctgcctcccccaagtcgggtggagcaggaatcctttgagactcttcgggaccttctgctgaagccccccatcttggcaattcccaggttgggaggccactacatcctggatgtggacgctagctacgaccaacttggttgtgtgttgcttcagcagcagccggacaaggagtacttgccggtgggatactttagtaaggggctgaactcggccgagaagaactacggagtcaccgagttggaaggactcgcagtggtgtgggcggtgacgtcacttcgtcactacctggagggtgagaagttcctcatccgctgtgaccaccgcgcgttgcagttcatctttaagacggactgtacgaacactcgtctcaaccggtggagggtgcgactggcacccttcaactttgacattgagtaccgacctggcaggcaacatgcccttgccgatggcctctctcgggtacccaccgaggggctggacactaacccagttgatgaggacatccccattgtgggggtagtcacgcgctcgggtcaggcgttgaaccccgaggcgccagggaacaagaagtacttgcccctgtccctggacgaggtggtgaaggcccaggccgaggatcccttctgcaagtcgcagagaaatatactggatacggtggttgagacgcgcttctttctgggagacgatggcctcctcatgaggagggggtattccaggggactgaacaacttgtcgtccccgcatccctcaaggacagtatccttgagagggagcacaacgctcccacgggtggacacctggggtctagtaaactgtaccagaccctgaggaccaggtactactggccgtccatggtggtggacatctacagttaggtggctgcctgcacaagttgtgcacagaaccgtctgatggaacggcggcctagtacggctatgctactgttcccggccaaagagcccttcgccgcgttggcgatggacatccttgggccaccgcccgtgaccgaggagggcaaccagtacctcctggtcatctgtgaccgcttcacgaaacttacgcgagcgatcccactggcagagatcacggccatgtcggtcgtgtcagccttcctagatcactgggttgccgcgtatggcatcccagatagtacactatcggacaatggaccgcaatttgcgtctgtactgtttcagggagtgctggatatgttgggggttaaggcaaactatgccaccccctaccacccacaaactaatgggcaggtggagcgcttcaacaaaactattgttaggcagctgcgccactatgtgagtgagcacgtgaagacgtgggaccaatacatttctatccttactactgcctacaattcacaggttcactcatctacaggggaagtacccctcgcttttgtgaccccccgtcgcgtgcggtctattgccgtgcggcggtcgctcccaactagggaggatggtggcagtacgcctactcctactgagagtaaggcggagttcgccgctaggcttgaaaacctcatccctaaagtcagggctgagatggacaaagcacaaaagcgctacaagcgtacctttgacaaaaaggtgcgcaatgctaaacatgtccccgagcagggtgactgggtgctggtacactcgcacaccccaactgggggtaagctggtattccagacgaagggaccgtaccaggtccttcgtactgatgggcggcgcttcaccatcgaaagtgacgatggggtccgcacagtgaacggacaggacgtggtcaaagttgcaccaccgcctgcaggcgacccagcttgggcacgtgcgttggagtcgtggcgcctcccctcactgcctgcggccaaacagggcccgcaggagtacgtgttcgataagttcatcgaccacggatgggatgaagacactgaccgcctcatgttgagggtgcgttggtttggctacaaagccaaggacgatacatgggagtatgtggaggaccttcctgctgagaaggtccgggcgtactgtgcccggaatgagatagaccctaacagccctccctcaacgtgagggaaggccgagcaacagtgccacgagagtgcttcaagtcgaagtggtacgcagagtggcttttaactacagccctaaccctcacactctcacaacaaaggcagctgccagctaggcacgcatgctagactctcccactccacggcccttgccctcacgtggaggcgagcggcgatacccacgccgataacggtctccactagttggagggggcggcggctccaagtcggaaccgtcgcgcctctcacggtcgcgcaagtggcgccgaccgtggccactcttctgcctggtcttgcgcgcaagtttgcgacgcagacgctggacagactccgtctccgacggggtagaggactccgagacggagtaagccaactcgtcttccgacaaggagggagagcgccgagagtgtcggcgacgacggcgaggaggcgagtatgcccggctcgcgcgacgtttgccacgcccaagtggggctggctggggcataatagccccaatacgagccaactcggctgtcataaactccgccaccgactcgcaactcgcggtcgctactgcagtacgaacgcgctcctcaagttgaggagtctcggaactctgtagggttgcggtcgacgcggccaaccaggaaatggtgcgcaccaacgtggtgatcatcatctctgaggttagaggcgtgggcggcaacaccaacttggggtataccgtcaggagggtggcccccaagttgggggacaccggggtggaagactccacggccacgctgatcgggatgttcccgtgaggttggaaaggaacaggaggaagcggaggggcccgccgaggtggaggtacccgggtgtaactgcgaccccgacttggggctcccgcagtgggttgagtcatgtggtcatcataggacggcacggccataactatgggcttgtccgggggtggcgcagtgtggcgatccacccccggggcatacgggtagtccccgatgcccaacccctctcgtaggaccacacggccgtcgtgaagttcacgagcgacccacacgaactggcgaagtgcgccatcgtccttgggcccacgagtggggcggcgcaacttgtgctcaatgctctcccactcgataaacttatggagccggagcatctcctcaagtagagtgagttgtcctgatgagcacccctcagcaactagctgaggggtgagctgttccaaaccctggatgagccggagggggagatgccagagcatcccccgccgctgaacacaggacacccaggtcgacatgacctcgaggagccactgggtggccaacatggcccacaccaggtgatcaggggcagccgtcaacatgacggagccgaagtggtcaagcaaccggggcaacaacgccgggaacccgtaggggacctcaacttgaggccaccactcgggcttcttcggatagtactgctccttactggcagcagactgttgaggaaactcaagttgagccgaggtcaccaagtagggacctcgccggaagtctttctccatccgcacatcaaagtgatgagtgtgcggatcggcctcgtggaggtacggtgggcgagttgccacagtgtcccacgtgaaggtcggcaagtcgccgggacccgggatagttcccccgcggtccaccatggccttggcacgttggacgtcatcaacctcctcgtcgtccaggaaggcacactggtccgtcctgaagccggccgggaacccgaccctacggggatacttctcccgtaggcggtcccatacccggcccatcgctgcgccaagtcggccacagcgaagaacagtcaacccctcctcataaagaggccaagcggggtaaaaccaccgccccaaggcctcacgcgggacaacttgtcccgcctccgggggagaccccgccgtcaacccaaagccgggtgacgcgggagtcccatcccccggagcgatcgcggagcccccgccggaagtcccggcgggtgctgcaccgtaggaggtgtcctccatgcgctcgtcaagagagtccgtctccactcccggagtcgccatggctctccccaagttggggagagacgctctggctatcgcagcacgagacccgcctcgagttgagagggactcggatcgtgggtacacgggtggcctccccagcgtggggcggcccagtggaaggtgatggggaggtggtggtgatggtgaagtgtgaactgaggagagcaagctgccgagtgggcaagcttgaggagaggggcggtcaacgtgaccgcctccacatccgtgttacgtactcgatgggggacagcaagtcgcgcccccaacgccgagacgtgcgtttacgcaccccctcacagggccgaccgggtcggtcggaactgaggagaggggagtgtggcagtattgacccccaggtagcggggcaacacgtgccatgcaaggggcggcaggccactagcctgatccgttcctccccctgcatttgggtccatattccctaagtttaggatagttagcttagtagtaaatccaacttggatttgagggttttctgcatttatcgtcttgaattttcgtgtggcccggtgggcaggtgctggggtgggagattctgagtggcgagattctgaggggaccctggggggataaggggagggacagcggggcttggccctgcgtccccgtcccgaccaagaaactgttggaccacacaccatcttcttgtttgtccgtggggggtttgccccacaacagggacagagtgtgtgcgacttgcacttcttccggttcccccgacacgggaggcagccctggcacaccgccccaacttgggtaccgtgtgtgcttgtggtttttgccacacccgggtgcacccggaggtaaagtttatctctgtcccctgctgctccaccaaatgtggcataaaccactagcacacacggcacccaagctggggcggtgtgctagggctgcctcccgtgtcgggggaaccggaagaagtgcaagtcgcacacactctgtccctgttgtggggcaaaccccccacggacaaacaagaggatggtgtgtggtccaacagtttcttggtcgggacggggacgcagggccaagccccgctgtccctccccttatccccccagggtccactcagagtctcgccactccgaatctcccaccccagcacctgcccaccgggccacacgaaaattcaagacgataaatgcagaaaaccctcaaatccaagttggatttactactaagctaactatcctaaacttagggaatatggacccaaatgcagggggaggaacggatcaggctagtggcctgccgcccgttgcatggcacgtgttgcccccctacctgggggtcaatactgccacagctagggcggccggtcacggccgcgatcgctccacccgaagcggaggcacaggcggagaggccagcgtcggccaagcccgcctgctcgacggtggcggaagcgttctgcggcgccaaagcgggcgccgccgagcccaaagaacgcagcgtcgaatccgctgtgttggcgggagcgaccgtgccaacaaggtttgatacgagccatgcccgtttgctcgccgtgcgattcagcgctgcatccttctcagcgtgagcggctcgcaccctctgcacctccgcgtggagaaaatcaggcgatgcgccttggcacacgtggaaaaaaggttcaaggctcttgtgtccgttcttgttaaaagctacgcctttttctgatacgacgcgcttgaaaagcgtggggtccaacgcaacggtcttctgcgtgtggcccggacggcgacacttaagacacctgcagagaagcacagcatacgacagaaacaaaaaccagaagaggtgtatcaagtgtgtagcaaaaaagagaactgttcagcgcactgataaagaaaaaattgcctcatcatgtgtcctcctacaaccgccaccacacacacgttaagaagaaaataggaacatcacgaccgcacatcatgcggcacacacagtgctggtcctggcactgcgccccagtgtaaaaggcgtggccaacaggcaacgtgctcacgcacggctgttttccaaccaccatggagcactgcccaaaatagtgacccttgccgtcggtaccaacttttttgatggccgcacgccgcacacgcaggtgtcttcggaccagtctcagaagcacctgcggcagcgtccggatggccgatagtgggtccctgggagagagagggggagatggggagacggtatgctgcatttttcgaacaggtgcagaacacaaaagataaaaaacatatgcaggcatgccgcgtcaatcgaaatcccgcatggtcagaaagagttttgtcacacggatggggtaggatacccgcgtcccactcagctggagtcgtctgccaccatgacgcacctgtctcatggctcattgtactgacgggagtgagatcagttcatgcgatcgggcgtggagcaggtaagaaggtggtcggggctggggggttcaacactcgcaaaagagagcgcaggtgggggtgcgcgcgtgacggggacgccgggcgagaagaagtcggtcacgacgacggtcgagccgacgacggtggccgacgccgggcgctcctgctcaggcgtcccctagattggcgatcggtttgcggggatccctaaaaaacagttgtcgtcgaattggttggtttgtgcaaaacagtacgaagacgaatattacacacaagtgtgtaaactcgcatgtaccaaatgtgtacattccggatctgtgtacagcgtgtcgttttgagaacgtgctgttatggtgagggaaacatgtggccttgcatgttgcatggtacaaaatgcatgagctactttttggaggatgcacaatattagcgaagctcctctgggagagggacatcgatcttgtcacgctaacgccaattgattggtccacatatttgcaatgtcaaattgctcctggccacatgttgaatcggtttggctcgtgaggtacgatgccggacccgtcggtggtgtccagcggcctcgtcggggtggccttgtggtgcacgcagcgcttggggaggacgggcggcctagtagaagaggggggagaggactcggggtcacccagctgtggtgctcacccgccccctaaagacgccggctgtcttcgctatgacgccacccgtccacgggaggacgccgcccgcttcagcgacgacgacattgctggactgggcggcagcctccttgacgtgggctgccgctcgcagcactgccgactatgctggcgcctatggcaaagacgcgttgcggccactgcgcacggcccgcgtccaccgccatgtgcagtgtgaacggttcgcggccaaagtcgcacgggatctgagcggcggatatggtcgccgcatcgtggacggcaaggccgtcttggtggtgtggggggcagcagcgacgaggggtggggcgaccgccttgaaacgccacgtagcgcgggggtgcttcctcgccacccaagacgagtacaactcgtcgcaggcctgtgccgactgtcactttcggctggtgttcgtgtaccccaccgacctctccccggatgacaggcggcaggtcatcaacatggcgcagtgcgcggcgcaggcgcttggtgacgaagacggcaataagcgcaaggtgctagtgcgccggcgacgggcggccaaggagcgtcgcagatgcgacggccgcggggggtgctcctcacaagacctgacgcggcgaggaagggcagaggagggcgatgccggcgaggcgcgggagtggttggccgagattctggtcagtggcaagcgctctggcggctatgacatgccggcgtgctggtccgtgaagacgtgtgtcaaccccgaatgtggtcggctgtacctcaaccgggacaaagacgcggcgcgcaacatcgcgcaggtggcggtcagttcattgctggggcggtctaggtttccatttttccgcaactgtctccctcgtcggcctctggcggctacagcccagtggtgccgagacacggcatcggagtggcacccgccgtggtttgtgtcggacagtgctggtggtggcggtggaggcagtggcggtggaggcggtgaaggcggtggcggtggcggtggaggaggtggacgcggtgggggcggtggcggtactaccagctctgtctgggcgacgaccaaactcgtctcggtgagggctctggacggggccactgcctattcccgcacagcgacgagccctgccggcgacggcgggggcaattgtcgcacggttcatcagtgatagtgtaggaccctcttagagggcttcgctatatgccaatctagtgtctattctaccgtgggcatcatttgatgcccacggcatcaaagaatgcccagtttcaacctgtgtttccggtgtgttcccgacctctcagggcagttttgactgcagaatcggacgcagcgccgtctgtttgactttgggggaactcacgtgcgtccttgcctgctgagaactcgagtgtcacgagttttcccgcgcgcgccaacgatcctgcgggcacacacgttgtcctctcggggtggaccgctgcagccgccctgttggccccagcctgcaagaggggtgcccaacggcaacctggccgagcacgggtcacactcgctccgccacgcacagcctggcgctcaactggggatgcggcggggcagcaactggtgctttcctgtcactgcggatgcctgcgaggcattccgcgtggcgacgtgttgtcttgcaccgcgcgcgacggggcactctcgcgctccgcacagtcaccgctatcccttccacctcacccgcacccctccatccctgaacccccccccaccccctccccttgaccgtctctgcgtcgatctggccgagcggtgcaatccgtgcacctgtcgcctccccccctcccgccccccccccctctctctttcccccattctcccccccaagtcctttctggacgacgcctggcagtcgcgtgtgccgctcgacactcgtgacgggctgtcttcgggcggccctggcggccaaccccaagccatctcgtgatgggcaagcaggcggatgcgcggctggtggctggggcggcagtgcacaccaaggccacgtttgtgcatcactttgcggagtgcagtcgcttgtttggtgcgctggccggggctaagctggttcccggggtagtcgaggaggtggttcaaggaaccaagaatgggcggcggaccacgcgtctcgttgttgcgtggcagatgccggggcacctcgtgaccaaggaactggccctggccaacgtcaaggccggccccccccctttggcgggactgcatccccagccatccaacttacccccccagacctccacagctggcgtcgccgagacgttgccgccgggaggggcgggtgatgctggcgggctgggggaccccccctccctgacggcacgtccgttgccccagatccctctgacgcaggcgtcccaggccctgggaggaggcagcacggggggtggcgctggtgttccgtggtccagtcctgctgcaggtggccaccctgtcgtaaccgcacacgggtatgactggagcgtgcgcaccgcctccactggcgtgggagcgcctgtgcctcgcaaggactggtctgtgcgtaccctgcctggggaggtcatcttcccgaacggcgactccatcgggactggtgcgtcgcgcacccctctggactactttatggccatgttcccgatggaccagctcgtgcggatggtccggctgacgtgtacccagctacaggccaagggcttccctcccacgtcggccggtgagctactaaagctgtttggtgtcatcgtgctggccacgcgctttgagtttggagcccgggccgacctgtggtccaccaaggcacgaagcaagtacctggttgccccggctttcggccagcgtacggggatgccccgggcccgctttgacgccctctggtcctgtctcgtgttcagccagcagaccggtgcacccggggacacctccgagggcaaccggtggggcttggtccacgactgggtcaagtccttcaattcccatcgggactctcgggtcactccgagcgacttgatttgtgtggatgagtccatgtccaagtggtacgggcttgggggcgactggatcaatcgcggactgccaatgtacgtggcaattgaacgtaagccggagaatggctgcgagatccaaaatgcggcgtgcgggcgcagtgggatgatgatgagactgcacattgttacatccgcagagcatcaacgcgcccacgccgatgaggaggacgcggacattgggcatgggacggcggtccttaagcgcctggtcggcccctgggcgacgtcgggacgcatcgtgtgcgcagactcatattatgcgagcgtggaggcagcggtggtgctccgcggcatgggcttggggtttgtgggtgttgtgaagacggctactcgcggatacccaatgagcgagctgtcgcaactagagatggccgcacgcggcaaccacgcgacgtacgtccacacggggaacgacggggcggtggacttgatggctatcgtttgggtcgatcgcgaccgacgctacttcatcaccagtgcctgttcaagcgcccctggcacgcccatcgagcgcgtacggtgcaggcaggtcggagaccgatcggagcgcgtcgtgctgaaagtggcgcagcccaaggcggtggagctttactacggatgctgtgcgcaaatcgaccggcacaacaggtgccgccaggatgacctacgcctcgagcacaagatggggacgcacgactggtcactgcgcgtgaacctgaccatgttgggcatgtgtattgtggactcgtggttgctgtacgttggtgcccgaggtccaagacccacattgacccagaagcagtactacgaggacctggttaaagggcttattgacaacaacttcgacgtcatcggcgtccggtcgcgcgacgctggcagcgccgagattgaggcagaccagccgccatctttcggcgtgggctttcatttgaccccgacgaataagcggcgccattctggggcatccggttccggcgatcaccgggcgcagcgtgcctgcagcgtatgcaagcgcaagggcacctcctacgtgtgctctggatgccgacagaccccggcaggcgaggtatttttttgcggccccaagaccgggcgcatttgtttcgaggaccacttgagtgaggctcatgatgtggatttgtagttgagtagattttgtactgggaggagggaatgtttgtctgtgatgggggcacaatactcaacgtagtttgagctggcctggccattgcatcagcctatgtacggggtgccccttcatcgcccttccaacccctctctcgcgcgcacccggcccgaccgctgtctcgaggtcggcgggcgtggcgatggctgaagtccccatcgaggagccatccccccccgcacctaccaccctcggcgagtggcggcggcctacagtggaaatcccctttcctcccctcattccctcccccgcccgttggccgctgccgccggctgccgtggcaaggggaagggaggggatagagagccattgcgtaggccctcagagggggaggggatggtactggccgtgccgctagacgcggctgccgcggcgcgctcgcggctgctgctgctccagctggagctggcgccggccagcggcaatgccggcaacgcggccgcggcggcggcaggcagctggcggccaagagcggccgccacagaccccaccgcgtccgcggcggcagtgcacggcggccagggtagggggggggcgggggggggggggggaggcgggaggtgagagggattcccatcttttcagcccatgatgcgaatggtgggggtgctcggggggtgcaaaacagttgagcacacatcccaggtgtgagggtcagcgggaagggtgacaggccttcggctgacccgtcgaccggcctgtccagaaattcaatcaaggatgcctcgaccgcatcctctttccctgccacgaggcccagctcgaggatgccacctgacagacaggggcgtgtccgaagtcatttagggagggggccgacctgggccagttgatgacgttggagggcggggccagactctcgagagtccgctcgtacgcaggactccggtggcctcttcacaaggacgagagcaccctggaattgtcatggagggagtggtcgggggtcgcgtgtgctcccttcgtgaagcgtgatgctgtccgtgtcattctgttcgcctccctcgaccagtcaaaacccgcgcaagaagaggagatcggaagcagagggcacgcaaaaggtgcaaacatactgaaccgtcagcgagcgccgcgtcaatgtgcccaggacgcctgctactggccaaaaacggaagaagcgcttcacatgtatgcctccagaatgcgattttcctacgcaggcgacctagaatcggcgatcttggggtcccggatctcgggcatcatttgatgcccagccgggcatcatttgatgcccagatccggtagaatagacactaggggaggggggcttccattgatcttttagatacttagtacctaccaacagtcgcgctgaatgtaccatttttcgagcgcttgcgacctgactccgttcgatcttgatcaatcaagaaagaacttaggcagtaagcgaggccttccaatatgaactactatgatgaacagcgtattcagttgcatgaaaatagtaaagttttgatggattgcttcttcacaagcagggaccccgcatgtcagcaaacgggacgcggccactcgcacagccgcgccgcctcgcccgtgcgttctgtggggggagcccgggcttgccgcggtgccttccttcagcttcggcgtcgctgtcgacgacaagtggacgcagcagcttcgacagcgccagtcctgtgccgcttccgctggtgctgatacgccccatgtcgtcctcgggccggggtcatgaaaacggcggcagcagcagcagcggcggcggcacctcgcgcaagggagagcttggagacctgaaagagggccttcattcttcctccaataggacaaggagagatgcgctgcgcagggtcgttgcttgcatgaccgtcggcaaggacatgtcatcgctttttgccgacgtcctgcagtgcacccagacgcccagcgtggagctgaagaagctcgtctacctctacctggttcactacgcgtcggccaagccggaactcaccatcctaattgtgaacacgctgctgcgggatgcggcagaggagaaccctttgcttcgtgcacttgcgcttcggacaatggcttcgatgcgcgtggaccggatggctgaatacttggtcgagccgctccaccgggctttgtctacccccgacgcatacgtccgcaagacagccgcgctgtgtgtcgccaagatgtacggcaccaacccggcgcttacggtggaggagggcttcctggacaacttgaccgagttgctctctgacagcaacgccaccgttgttgttaatgcgattgcagcgctagccgagatatctgactcccgacctgggacgctctcccttactcccgcatccgtccgcacgtacatgtcagctctcggggagtgcaccgagtggggccaggtcactgtcatggacgcgctggctgactacactccagctgacgcggaagaggcggacgacctggtagaacatgtcctgccgcggctgcaacacgccaacgcggcggtggtactagctgctgtgcgcctgctactgcagctgttaaccgtggtgagcagcgtacccggcggcaacgcagcgcggcacacgtttgtataccgcaaaatggcgtcaccgctactgacgttgctctccgccaagccggaaatgcagtatgtggcgctgcgaaacatgagcatcctcgttcgtgcgcgcccggcagtgctggcgggcaacgtgcgcgcatttttctgcaagtacaacgacccgctctatgtcaaggtggagaagttagagctgatggtctgcttgaccgcgcccgaggatgctgtagcagtactagccgaactgcgtgagtacgccaacgaagtggatgtgtcttttgtgagccgcgcgatcaatgccatgggtcaggtggcgctgggcgcagccgaatcgacgacgaccgaccggggggttgatgcgctgattaacctgctgacccgacctctgccgcacgtggtgcagcccgccgttcttgcgttgcgggatgtgttccggcgccatccgggacggtatggccgccacgttgcggctattgcgacagactcagttgctgacgtgctggatgacgcagacgccaaggcggcccttgcgtggatactgggcgagtatgcagacgtcgcggacggggcgctgacccggctgcgcgcttgtgctgatgcgctagttgacgagtctccagcagtgcagctgtgcgtgctttccgcgtctgtcaaatgtcttctgcggcggccgtcggacagggtcgcccagacgcttgcgtcggatgtggtgcgcttctgcatgtcccaatctgaatcggttgacgtgcgcgatcggggcttcttgtatgcccgactattgcaggctgtttctggttctggagcggatgcggatggaagcggcgcggggagcgcaggcgcgaatagggaacgagtgcggcgtgtggtgctggccaacaagcctgcatcatctggagcggccgatgagctccccgctgagctagtggaggagcttttggggcacttgtccacactcgcagccatctatcactggcccgtgcacgcgattcagggtgtgagggcgggcactgcagtcaaggcacgaacctctgccggagatggggtgagtgatcttctgtttggtggtggcggggttgcggagctcagccagaccagatctgacggccctgatgccactgctgacggccttggtggtgcggcgtcatcatccaaggccgttgccacgtggggcccacccggagcagacgacttcttcggcctggccggcccttccagccaagcggtggttcctgtcgcgccatcgtcttccagcgggcctgtggcttcttcgtctgcacttactctactggacgagctgctgggtacagacgggggcggcggagcgagtggtggagtcagtggcggcggtggtggcgtcgccggtggctcggacctgttgcaactgaccgacgcgtcgcacgcgcaagcccccgcgccaacaggcgcgccggcgccggcctcaagcgcggccgcgcaccagagacggccgccttttgccggaaaggtcgctgcggcttccgccattggagggaagccgctgggggacccgtttggtgtctcccctcccccccctcctgagcagtctaccgatgctcttgactcttcgttgcctgctgacgttcggcaggtggtgctcatcaacggcgctcaagggcgaggccttgtcgtccacggtggtttttctgccgcagccgccaatggtgcggcggtggcggccaccctttggcttgctatcgccaaccacagcgctggcccggtcgacggctttgccgttcaggtgaactccaacctgtttgggctgtccccggctgcaggggcactggctggtcagcccgccttacccgcgggcggcactgttacgctgcaggtgcccatgcacgcgacggggacggccacggttggcagcgggattggcacgcctgcaggggcagccaaggctttgactgtgcaggtggcgcttaaggtgcgccccgtaggtgtgctctactttgccgaccgcctcgcaagacgtgtcgcgtcgctcttccccgacgggagcgcgctgcccaagcgcgccttcctggcggcctggtcctctgtacgagacgacgcagagattgccgtgccggtcgtggtgcggctcccgatggctggctcgccaccagagggtagcgcagccgccgccgcgtcggcggccgtcgtgtcggcactctccgaagcgcggctcttccttgtggcccgccgcacggtggggagcgcgcaggtcatgtacttcgcgtcacggctgccgccagccgtgacggtgctggccgaggtatccgtgccccccgttggaggggggggcgccgggggggttcccgccaagctggccattcgtgtggctggggcgtcgagtccgcaggtgtgcacgcttctgtcccaggccgtggcctcgggtgtccagcagttgttgaccaagggctgagcgcgtaacccgccgcaacaacgaaagaggcgagtgacagcaggggcagcaaccgtggccaagttcgcacaggtcccgcgacggacacagggggtagagcgggacgggccgccacgtgtttgaatttcatgttttgttttgaatacgacacgtggatagcatcttgtcaacattatggccaagtggccaagttttgattggtcaacaactttgactccgacttccggcggcgtgtcacgctggacgctgacgttcgccggcggtcgccgagcgccttgccattggggggacaaacgcgtggtccttgtccccttctggtggcgccggactgctgtggtcttctcaccgctcgtccctcgtttctgcctgccgtcttccacctcgtccgcgctctattcttttccatcctagacaccgtatgtcctccgccgctccccttccttcttacccctcctctccccctcacccccccgcctgccccctcctgccccctctctgttgagcgatgtcgttcctttttggcagcggcggtagccgcgacggtgacgacggcgccgccccccccccgccccccaccgacgacctctcctccttttctcccgacgcgcccgaggcggactcccccttctccctgggcggctctgcctttgccggcgacgccgacgacctggacggcggcggcggcacggttgacgcgtacagctcggcggggctgtcctcattgggcggcgccgctgatgggggcctctttggcgccccctccaccggcgggtccctgtcgggcggcgggggtggcctgggggggggctcttccggcgccacgtcggcagctggggaggactccccgctaccacccatccggctcgacgtgggcgccctggacctgtcgccgtccttccccctcgacggcggggacgtggactacctcttcctcgacgcccccggcggcgggggcgtgcggaaaaagtcgtggtcggagcagctcacctacatggccggcttggcctacctcaccggcggcgctgcgggggtggccgccggcgcccgggcggggctggtcgcgtcggcgggcaagccccgcaagctccgcatcaacgcggtgctcaacgcggcgggccgccgtggcgcgctggccgccaacagcgcggcggtgctggcggtgctgtttagtgcggccgagacggcagcgtacggggcggcagaggaggacggggcggccaactatgcggccgcgggggcggtggcggggggggtgtttaaaagcacccgcggcgttcgcgtggcgggcgcgtgggccctggggggggccgccctgggcctggcgggcgtctacgcgtcccgccagggcgtgtacgggcggggcatgcggggggcactctgagcggcgtcgtggcggagtgtggtttggaggggaggcctgcggtggccggcgttttggggggggaggccggagggggggcgggtactgtagagctgcgtgtgtccctgtgcacccctccccgcccttaccctcatccccctccccccgtccaagcgcgcttcttctattagttgctctcctttttgtggtgccccgcaaggccccatccactgttgtcattttttttctccattcacgctacgccttacgggtgccacaccccttggctctgtgcctgccgcccaccggcagtcggtgcgcccgtgccgccccccacctccatctttcctccccgtcatcccccacggccaccgtgacggtcactggcggcgttctcgcttccagcggatttgatccggtggaccttttttcgatttggctgtggcggaaacctacgccctccccagcccccgcccacgacgcgcggcggcttgaagaggcctcgcctggcagtctggtcggcacgcgctgctgcgggcaagtagaaccacgcccgtggtcgcgctccctgtcgctgccgcccctcctgcgtcttgttcgcgggggcggcc

SEQ ID NO: 49 - DNA, 20786 bp, Pyropia sp.
  source 1..20786: mol_type = other DNA
cgatggcgcacttcgccagttcgtctgggtcggtcgtgaacttcacgacggccgtgtggtccttcgagaggggttgggcatcggggaatacccgtatgccccgggggtggatcgccacactgcgccgcccccggacaaggcaatcgtgatagcggtgccctctcacgatgactacatgactcaacccactgcgggggccccgaggaggggtcgcagttacactcgggcactgccaactcggcgtgcccctccgcttcctcctgtccctttccaaccgcacggggacatcccgataagcgttgccgttgagtcgtctaccccggtgtcccccaacttgggggccaccctcttgacggtttttgcccaagttggtgttgccggccacgccattgacctcagagatgatgatcgccacgttggtgcgcaccatttcttggttggccgcgtcgaccgcaacccttcaagtttccgagactcctcaacttgaggagcgcattcgtactgcggcggcgaccgcgagttgggagtcggtggcggggtttatgacgaccgagctggctcgtattgggtctattgtgccccagccagccctacttgggcgtggcaagcgtcgggcgagccgggcatactcgcctcctcgccgtcgtcgccgtcactcgcggcgttctgcctccgtgtcggaagacgagttgtcttattccgtctcggagtcctataccccgtcggagtcggagtcggtccggcgtctgcgtcaccaacttgcgcgcaagaccaagcagaagggtagccgtggtcgtcgccacttgcgcgaccgtaagaggcgcgacggtttcgacttggagctgccgcccccgccgactggttgggaacgttatcggcgtgggtctcgccgctcgcctccacgtgagggcgagggccgtggggttggagagtctagcatgggtgcctagttggcacctgcctttgttgtgagagtgtgagggttaggactgtagctaaaagccactctgcgtaccacttcgacttgaagcactctcttggcacggtcactcggccttccctcacgttgagggagggctgtcagggtctatatcattccgggcgcagtatgcccggaccttctcagcgggaaggtcctccacgtattcccacgtgtcattcttggccttagagccaaaccaacgcaccctcagcatgaggcggttagtgtcctcatcccacccgtgatcgatgaacttatcgaacacgtactcctgcgggccctgtttggccgcaggtagcgaaggaaggcgccacgctttcagcgcacgcggccaagccgggtcgcctgcaggaggtggtgcaacgtttaccacgtcctgtccgttcactgtgcggaccccatcgtcactttcgacggtgaatcgccgtccatctgtacgaaggacctggtatggcccttcgtctggaacaccaatttacccccagttggggtgcgtgagtgtgccagtacccagtcaccctgctcggggacatgcttagcattgcgcacctttttgtcaaaggtacgcttgtagcgcttttgtgctttgtccatctcagccctgactttagggatgagtttttcaagcctagcagcgaactccgccttgctctcagtaggagtaggcgtactgccaccatcctccctagttgggagcggccgccgcacggcaatagactgcacgcgacggggggtcacaaaagcgaggggtacttccccggtggatgagtgaacctgcgaattgtaggcagtcgtaagaatagaaatgtattggtcccacgttttcacgtgctcactcacatagtggcgcagctgccgaacaatagttttgttgaagcgctccacctgcccattagtttgtgggtggtagggggtggcatagtttgcctgaaaccccaacatatccagcactccctgaaacagtacggacgcaaattgcggtccgttgtccgatagtgtactctccgggattccatacgcggcaacccagtgatctaggaaggctgacacgaccgacatggccgtgatctctgccagagggatcgctcgcgtaagtttcgtgaagcgatcgcagatgaccaggaggtactggttgccctcctcggtcactggcaggggcccaaggatgtccattgccaacgcggcaaagggctccttggccgggaacagcaacatagccgtagtaggccgccgttccatcagacggttctgcgcacaacttgtgcaggcagccacccaactgtagatgtctaccatcatggactgccagtagtacctggtcctcagggtctggtacagtttactagaccccaggtgtccacctgtgggagcgttgtgctccctctcaagaatactgtccttgagggatgcggggacgacaagttcggtcccctggattacccccctcctcaagaggaggccatcgtctccgatgaagaaccgagtctccgccaccgtatccagcatatccctctgcgactttcagaagaagtcctcggcctgggccttcactacctcgtccagggacaggggcaagtacttcttgttccctggcgcctcggggtccaacgcctgacccgagcgcgtgactacccccccgatggggatgtcctcatcgactgagttagtgtccagcccctcggtaggtacccgagaagggccgtcggcaagggcatgttgcctgccaggtcggtactcaatatcaaagttgaagggtgccagtcgcaccctccacctgttgaggcgtgtgttcgtgcaatccgttttgaagatgaactgcaacgcgcggtggtcacagcggatgaggaacttctcaccctctaggtagtgacgaagtgacgtcaccgcccacaccactgcgagtccttccaactcggtgactccatagttcttctcagccgagttcagccccttgctgaagtatcccaccggcaagtactccttgtccggctgctgctgaagcaacacacaaccaagttgattgtagctagcatccacgtccaggatgtagtggcctcccaacctgagaatagccaagatagggggcttcagcagtaggccccgaagaatctcaaagaattcctgctccacccgacttgggggaggctggttcttcggtagcgtcgagctgcctggctcattcagcggcttcgccaccttggcgaagcccttggtgaaacgtcggtacacgttacacatcccgaggaagctcctcatctgggtctgggtccggtactgagccttacggatggtcctcaagttcttttcgttgacactgaggcgccccggacggacaacatgtcccaagtattccacctcctaagtgaagaggtggcatttactcgccttcagtgacacaccggcatcagcaagtagcttgaacacctggccaagatggccaatgtgttcctccggacttcgggagaacacaatgatatcgtctaggtgcacaagacagatctgccaccgtactcgggccaaaatcatgtccatggcgcgctggaaggttgccggcgcgttgcacagtccaaacggtagtcgcttgcactggtaggtaccacagtgacaggtaaaggtagttttatgcctgtcctccggggcaatgggaatttgccaataccccgcgttacattctagggtagaaaacacgtttgcctcccccagagagtccagacagtcgtccatcctaggtaggggataactgtctttgaccgtgctctcgttgagcttacggtagtcgatacagaaccgtggggtcccatcaactttggggacaattaccaccggactcgcccactcggcgtcacaggcctcgatcacatcgggggcctccatgcgagcgacttgctccttaacaaggggccttgaacggggccctcccctgtacggttgttggcgtatagggggtgcaccgggtttcaacttgattcggtgttgggtggctctcatgagtcccaattgaccatccccccacttgtgatattggtccaagaggcgttcaacttgaaccctcaacctggggggaacattctctatgttcacatggggccgaggagaggcggccgacttggcttggtgcttctcctttccggacttcgggtcgctactcgcgcccgcgttgagggtgaccgctactactggtccctcatgttggtcgatatagccgaacttggctcccgacttgaagtacttgggcgaagagctcaggttcatcacctggatcctccacgggactccagctttggagtccatcgtgccaagggcaacatgcacttggtgcttgcgagcaagacgggggtgagggtgcaccaaccctttccccgtataatcagttacaacgtcaacgtgcgccaccaagttggggggcaacgtgaatttacgggctaaacgcagagtagcagtaaacccttctctcacggagcaagcaggcttcgactgtgagactgtcacaggagccacagactttcccttaccaaggatggggatggtctccccattcatcaacttgacccaatactcagggccacaaatcaaaggcacttgcgttacaacataagcggtacccaggagcaggggtatgatatattctcgagtactccatacgtcacgtcgacttcatgggttcccaacctagttgaaagggtcacggcactaacaatgggaagtaccccaccattgatgtcaatcatatggtcagctttagacctccagcgttggagcttcatctcctttcgtaatagcgacttgcgtatcaaggaggctcctgacccggtatcaagtacgatacgggcacaacaggcacggccgggggctagttgcacccgtccagccacctggagattctcacccgtcagccccgcgatgacccgacgtgggtttacgttcttggggagtcctacccgaggtgggcggactcccttaggtcggcgcagtatccggcagggttggttcgtccttttgacccacttggccgaggctgccgttgtgagcttaggacggctagctccaacggtcattcgtttcccgccgacttggcgtctgaatccgagggcgaaggggaagacgaccagtccgaggacgacgtgtccgccccctccgccgagggtgtggcgaccgccactaccggtcgaggcccaccctcgcggcgcgaacgtacttcgttcgtagccgacttcttactcgcattcttgacaagttgttgaatgcgtttgctcaacatagggcaatcatatgcccagtgtccatcggagttgcagttccaacaccgattgtcagttcccggaggggtcttcccgactggagaagccgaagaggcaccctgggaagttcccacggcagctgctaccctctccttgcggattcggcgtgcctctcgcaactctctggcctggtgcgcctcctctcgttccttggacgactcggcctgacgcttcaagcgttgttcctcccgcaacttgcggtaggcctcacctctgcggtaggcgaacctagccaactcggctagtgtcgcccgggcagtattatgctcccgggtctccatacggactgaccaatggagtccctccacaaaccgactcttcaccacagcttgtggatgaagaaagccacaaagattgttgagcttacgaacttgctccgcaaaggacaactcgtccccagtctcttcttgatgggcttgcgtaaactcctcgacttgagaagccaacgctgcttcatccaccatggctctcaacaaccagttgaagagcaccaaataggacgtcacctcaccagcgcctccacttgaggaactgggcatgacggacataagttctgtccggaggtcgcccttcgtaaactcctgtagcatatagaaatccatgccttcacttatggcattgtcgtcacaggcttttgtgaaacgacgtacaaactcaaagacacggagggggggagttccatcccactcctctttgtgcccaaaagagtggagtgcattcttcttggcacggcccatggctcaggcctgaataggaccgtacgccaccgacttgttgtggagggcgtaggtctcacagtcgaagatcctctggtaaaccgggttgacaacctggatcttgggtggcacctcacgttgagggaaaagccgctgaggcactggggtaagttgacccgcagtgcctgtcgtctgctgcggcgagcatagggtagccgccggcttttccgaggggaactcccccgtgaagggcgtacgccccaccaagaatggtgtggctccctcgttgggagtcatatgggtcgccccctgttcggggcgacccgagacaggcgtgaggagggattccccatgcgcctgccggctcgaaagccccaatccggtctggacattaaggccatctggcaaactcgccacaatctgattcagaatagtattcgtcatcgtgaccaccaggtccggcaaagtctgtcggaacacattggtcgcctcccgacggacagtttccgcgaggagtggattgtcgactccagttgagtctcggtccgcctccgggagtccacctgaggggtaaccacgatcctcaggggtctcaaccgggggcatgggcgcgagcccatcgctgaccaacggaggtccgccgtcctccgaaagcctagttggcgacggctccaagccaaagttggatccaacccgagtggagcccgcggggacagtcctctcaccttgcgacgttcccgttgagtataccacgcggtggccagacttcggcccatccacatcagaagtgtcacccgagtgaactcccgactgagtcggggtggcctgttgcccgcccgtacttccagtcctgctggcttgagggatctctagtccctctgcgaccccaggtaaactcacctgtgtctcaccagtattcaaaggcactgaagtacgtgcgtcacccgtgtactccccggacgacggggggtccgagctagccatgttggctgaagatccgtataacacggtccaagtccaccgttcctctgagctaactatcccaaacttagggaatatggacccaaatgcagggggaggaacgggtcaggctagtggcctgccgccccttgcgtggcacgtgttgatcccctacctgggggtcaatactgccacaccgcacacggcgacgctgccgtgagccacacgaccagcgctgggaagcgcaagtgctcccggtgcggcttggcgggtcactacgtacgcacctgtgacgcacagcagcacgtggtcgcggcacacgccgcggcagtcaaagccagcgtactgatggcgacggtagaccgtgcggcgcgcaagctgggccgcaaggccccgacttgcggcaagtgtcaccagactgggcacacggcgcgcacttgcccggcggtcctcgtcgggggcgtccggggtctcagagtcgacgctggcgacccgtacgccatgggcgagcacaaagtgcacacctcggtcctactcccactggctcgcgttggggcgacccgccctctggcggcggctccacccgggggggcggcggcagagcgcgccaccagcgtcaacaacaatggtggtcggggtgggccgccgacgcggccgcgaaagacggtcggggacccggcggtggcccaggcgctgggccacgcgctcgagtcactggccgtaacggccaaccgccacaggtacctcatgacgctgggcattgagcgtgctctccggtcagtctaccaggcgagtgcctccatgcaggggtttgtcgacgccctacccctggtgctggcaagcggcagccacccgccccggttcagaggggccgcggcgtcagccttgtgtcgcggcgcagcggtggcagagaggcccgacggcgagctctctggttgctgccaggctctcccggaaaagcacccccaggagtcggcctttgtcggcgacgggctgggaggcaaggcgtttgcaacaacctaggaccgcttcatgtctaccgttcaataagaggcgccgctgacctgcagcaaggatctgtcaggcccgggcgatgcccttgcgttcaagacggcggccacgaccatctggatgcacgtggcatggagggcaaagccagcagtgatgtgccttgccaaggtgatggacgatgacgccctgccagcggtcaagctgctaccgcatccacccttgaccgcgcaggcgcaagcgcaggcgtccacccctgcaggccgcgctcaagaccgtaagcgtcgcgccctccgcggcaagctcacgcggttcatctccgacacgatgatggggggtgccgacgaggtgaaggacggctcgtggccggcgggtgcgccacctttcgtacagcagcggatggcctcagacctcaaggccgtctttccgcgggtgctgcccataaagttcggcgcaaagctggccatcacgctccccgggacgcgccgccaggggtgctggctgcttttcctcccccacggcattcaggtacagcggctgctcttgtcgcggaagcgcgcgtcgtatgcggtctttccgcgcctggcacccgacctgtgccgctgcaagcacgtcaccccgacactgctgcggcgggcgatggaacgggctcaactcgtctcacaccctgggctcggcgaggtgcacaccctgctggcggtaagtcgcggcacgaatgggagcgccggtgtcgccaagctggccgccatggccggggttcgtacaaggcggtcccgcttttgcccgtacgtcgttactaacgggacgggtgtcgtctttacgctggagcggcccgccgacgcggccgaggtggcggccacgcaagcgcaccaggcccgacgactgcggggcggcaacgggaccaagtcgggcggcggggtgacgagcctggaactccaggcgaccgtcatggggctgccccttgaagggtcggtcacgaagtgtgtggtgggtgtggacccgggggtcaatgacatctacacggccagctccctcggcctggatcccgaccttgtcgtcgtcccgtcgccacacgtgtttgcgtaccgggcggagcgggcatggaaggtcgcagcccactccctggtgcgggcggcgcgcacgctgagccggctggccgccgctgtcgactcaccatcaacatcagaagcaatgcatctttggcaaagggggcgggtcaaggcgtcgagagtgcgagtggtaatgctgccggtggtggtacagtggcagcggcgggcaaggtctcccggtgccggcggcgccggcggtcgcagcgcaagcaccggggacccgtggcaacggccaggcggctggcacgtgccgagcttcgcaaggaagtgttggaggagctcgcccagacaggtgcatctgcgcagctcattgacacgctgtgtgcagaggcgattcgggcagcgggggcctacgggactgccggggcgcacggcgagggcgcccgtcgacgacggtggcagagacggcgacgacacccgccatcacgcccccccacttgtccgcctcgtggggcaacaatgtctgtgtgcagtgctgcgcatgccgagcagtcggacggcaagattatggcaagggcgcaggcctcgtggcgggcggtgtgggaggccagccggccagccggctccgaggccaccccagaggacgtctttgagggtacgtccctcaggcagccgacgttgctggactgggcggcagccgccttgacctgggctgccactcgcagcactgccgactatgctggcgcctatggcaaagacgcgttgcggccgctacgcaaggcccgcgtccaccgctatgtgcagcgtggatggttcgcagccaaggtcgcacgggatctgagtggcgggtatggtcgccgcatcgtggacggcaaggccgtcttggtggtgtggggggcagcagcgacgaggggtggggcgaccgccttgaggcgccgcgtggcgggggggtgcttcctcaccacccaagacgagtacaactcgtagcagacctgtgccgactgtcactgtcggctggtgctcgtctaccccaccgacccctccccgaatgacaggcggcaggtcatcagcgtggcgcagtgcgcggcgcaggcgcttagtgacgcagacggcagcaagcgcaaggtggtggtgcgccggcgacgggcggccaaggggcgtcgccgatgcgaaggccgcggggggtgctccccacgggacctgaagcggcgaggaagggcagaggagcgcgatgccggcgaggcacaggagcggttggccgagattctggtcagtggcaagcgctctggcggctatgacgtgctggcatgctggtccgtgaagaagtgtgtcaaccatgactgtggtcggctgtacctcaaccgggacaagaacgcggcgcgcagcatcgcgcaggtggcggtcagttcattgctggggcggtctaggtttccctttttccgcaactgtcaccctcgtcggcctcttgcggctactgcccagttgtcccgagacacggcatcggagtggcacccgccgtggcttgtgtcggaaagtgccggcggtggcggtggaggcggtggcggtggaggcggtgaaggcggtggcggtggcggtggcggtggaggaggtggaggcggtggaggcggtggaggcggtggcggtactaccaaccctgtccgggcgacgaccaaactcgtctcggtgggggctctggacggggccactgcctattcccgcacagcgatgagccctgccggcgacggcgggggcaattgtcgcacggctcatcagtgatagtgtaggaccctcttcgagggcttcgctatatgcccctctcgggaggggggcttccattgatttaactatgcttaatgatatcgattatgttgatgctattcgaactcgagagagccttcatttcagtcacggggcggcgtctcgatcgagcaacccccgtcctgtctggtcccggtgtcggcaaacgaaggggcgggtccggagtcccttgaaccccctgcaggggccgtctgctggcctcacttcaacccccgctaacgacggcggccgtaaaggctgtttctttaaaccacccccacccaacgactctcggcgtcagcccactgccactcgcggtggacgttccgctcctcacctcgcccccgccacccgtccccctcgccccccccctcggaacctcccccgctcccccatcccccccattcatgtcggacgctctttcctcctggatgctttcccccgccgcccctctcgccgtacgcgctcgtccatgtcgcgcagccgcggcacccctccgatggtcctcccgccgctgtcccccgtgtcgagcgtcgacgcggccgccgcgggcggtgtcatggcctccgccgcggcggtggctgcggtacccagccccgtctcgggagcgccaacgtcgggggagggtggtggtgttggtaatggccccgctgctgccgccgccgccgccgccgccgctgccgctgtcgctgtcgaagtcacccccaatgggcgcccccatggcccgtcttcttcctgtggtggccttagaaggaaggggggcgcctcggatgccgccgccacgccgccacctccgaccacctataccccgtgcaacatcctggtcacgggcggggccggctttatcggctcccacgttgtggtctacctgaccacccactaccccgagtacaaggtggttgtcctcgaccgcctcgacgcgtgtgcggcggtggccaacctggagggcgtgcccagaggcgcgcgcttccgccttgtcgtgggtgacgtgcgggacgcggggctggtggccactctcttcgccgccgaggccattgacacggtcctccactttgccgcgtcgacgcacgtggacgcgtcgtttgcgtgtccgctcgcctacacggacaataatgtggtgggcacggcggtgctgctcgaggcggcacggcggcacccgctgctgcgccgcttcctccacgtctcgacggacgaggtgtatggcagtggcgctgcgatggcgggggcgggggcggcggcgggggcgagggcgggcgcgggggcggagccgaagccggggagaggggacgggggcgttcgcgcgcccgcgccggcgggtgcgtcgacgccctcaactgaggcgtcgtccatggcgcctaccaacccttacgcggcatccaaggcgggcgcggagctcttagcttcctcctacgctaccgcgtttgggctgccgcttgtcatcacgcgtgccaacaacgcgtacgggccgggccagttccctgaaaagtttatccccaagacgctcgtccgcctcctgtctggtcgccgtgcatttctccacggtgacggcacccaccggcggtcctacatgtacgtcacggacatggcctccgcctttgctgtcatcctccaccggggtgtcaccggggaagtgtacaatgtggggagcaccgtggagaagagcaacggccaggtcatcgcagacctcctggacgtcctcggactggtccaaccgcccacgggagggcggccagccgccacggggtgcgacggcagggagaagctccgcgttgacgaccatgccagtcgttgcggcggcggcaacgttgaagacggcagcggcggcctgtcgccggggtcccccccccccggggtgaacgagccggtgcccccttggctgcgcgaccccgcgaccgccgccgcctttgacgcgcacgtgacgcacgtgcgggaccggcactacaatgacctgacgtacgcagtggaggcgtccaagctgtgcgccctcggctgggcacccgccgtgcgctgggctgacggccttgccgcgacggcggcgtggtacgcgtcggccgaccacctggcccgctggccggggctcgagggcggcctcgtcgcccactttgtggccccgcgggggggggaggggggggggcgccaccgccgacgccggtcgttttgaaagagggacccgagcggtctgtactgtaggtgggggggggggggggggggggggggagagtatcatacagtacggcggggacaagagctcctggtttcctactttcttttctcttgtttcttgccggccgcccccgccgtcgcgctgcctacaagagtggcgcgcgcggcggcggcggcgcgcctgccaatgtagccggggtgggggcacccccatggcgcgtggctcctattcctcctccctgcgccccccatcccggccgccccggcggcccggctggccactcgcctgcgcgacctcctcctgctgctgccggcgcaacaacaaggcggacgcccccccccccccccccaacagatgtactgtacagagggaaaagcaccccgccggcagcggccccccctacaggcacaaaagaggttgtgccagctctccctcttccccccctccctcaacattctgtctgcatgtacagtatccatcccacccccatggcagagggtggcgaggggggggggcgggaggattggcggtggcggtggctgtgcccgcggtagtgctggtggcggtggcggcggcggtggcggtggcggtggcggcggcggtggcggcggcggtggcggtggcggtggcggtggcggtggcggtggcggtggcggtggcggtgtccgtggcggccgcggtggcagcgcggcgcaggaggcgcccgcgcgggggaggcgccggatcacggccgcgcgggccggccggatccgtttcgccgccgccgcccggcgcgcccccgcgccgccgcccgcgcgccgccgccgccccgccgcccgctgctgcgtcaacggcggcgacgccacgcccgtctttggccgccgccgctgcgccgccgccgccactgccgctgccgccccgctgtcgccgccgccccgctgccgctgccgcccctctgtcgccgctgcggtggcagcgccggctgccaggcgggcggcgggcgagccgtgtcccgccagcctccgggccgtgtcgcccgcgcccgcccctccgcgctgcgccccccgctgccctcctccatccccccccccccccctctactgtcctccattccgcccccctcccgccccgctcccttccccaaaccccccccccccccccccccccacgtactctcctcccccctcacccccggcggcgcgcctgctggcctgtgtccatggtggcccgggacgcggctgccgccgccgccgccgccgcggcggggtcggtggtggaggcggcggcggcgggggcggcggcggcccgagcccgcgggggggcgcctccccccgtggctccgacgccggggggggcggcggcggtgggggcggtgccgacggcggcgtcggtggcggccacgacggcggcggcagcgccggcggctgcacgcgccaccgtcgacgacgcggcggcggcggcggcggcagccggcagcgcggcggccgcggtggccgcgggtgagcacacccccgctgccgccagggaacccgccccccccccagccccccccgctgccggcgggtaccccccccgggcggcgctcgcggcgctcccccccctcacgctggttgcattccccggctacctccgcgccgcgggggcgcccggcggggcgctgtccgccctcggcggggacccggcgctcgccccggccattgccgccccgcgggcggcggtgctgggcctcaccctccggccgggcgcgtcgcctgtggcgtccctgccgggcgtgtgtgcgacggggctggtcatggagctggacgtagggggggaggcggcggaggaggaggggggggaggaggcgggaggggcggggggagcgggagaggctggggggctgggggagggggagccggcggcggcggcggcggcggcggcggcggcggcggcggcggcggcggggggggccgtccccggcggtggccgcctggtcggcgtcgtgagccacgcgctgcggtggggcggcggcctcgccgactttgcctacatcccgcccgccgactgggcgacggcggcgccgccggtgcggcccgccgcggcgtcggtcgaggcgtgggcggcgcgggcgctcgcgtatgggcgccggggggggtttcgcgcggatgacgcccactactacgggcccgccgcggggggggggtcctctgacgaggaggaggggggaaggcgcacccctgctgccgccgccaccgccagtggcgacggtggccggggcggggggggggacgccacggctgtggccgctgctgccggtgccggtgccggtaccgacgccggcggcggcggcggcggtgccccggccagtggcgacggcaacaccgccaccgccgccgccgctgtcgacgtcccttttggtgcggctgcgggggccctcggcggcggcggcggtgccacccgcggccatggtagtggcggtggcagtggcggccgcggcggcggcggcgacgacagtgacggcggcggctcggcgtcgtgcgcgtcgtccacgtccgagtcgggctcgtcggcgggctccctcgggtcggggatggcgtcgagcgggtctgcgtcatcggcgtcgccgccgccgtcgccaccgcccgccgccgccgttgggggcccgcccgtggccttcggggcggcgatgggggggggcgctgacccccgtcatgaggacggcggtgacggcggtgggagtggcaacgagaacggtggtggcggcggcggcggcggcggcgacggcggcgacggggcgggcgcctcccctgcagcgcccgcggccaagcggcggcgaccaaacgcgcccgtggcggcggccgccctcccctccccccctgctggcgcctcccccccgccccccacggcggcggggtcgggacgcacccccccgggcggggcggcggcgcccccccccggctccccggaggaccccgcccccgcccccccggcgcggccgccgcccccccccccaaacccacagccgggcctcgccggcggcctcgccgccctccgcccccccgcgtttgcgcgcacacccggcgcacgcggggactactggtttgtccagtaccgggggctccgccccggcggcggcgggggggtgcgcggcgccgagggcagccccgcgcccccgtcgcggcatgtggtggcccctgccgctgccgcagctgccgccgccgccgccgctgccgccgccgccgccgccatcggcggcggcgacgcggtaggggtggggcgggaggaggcgcccgcctccccgcggccggtgggtggccccgccgacgctgtcgcctctgccgccgccgtcaccgccgccgccgccgttacggcgacggcggtggaggcgacgggggcggcggccgccgccacggacgcggccacgcggggcgccgacggcgccgcgcccggcgcagtcgccgccgccgtggacgcggcggtggcggcggcggcgggaccggcgggctgcagcggcggcggcggcggcgcgggcaccacccccgccgccgccaccgccgccgccacgcccctgccggccgccccctccacctctaagaaccgcaaggcggtcggcggcgaccgccgctccgacgcgtcgcggctgctggcgctccgtcaccgggtgacgtcgtcgaccccccccccccccccccgccccccccccccccgacgcgggcgcgttgcgggtgcccgccgacgcgcacgcgcggatcgtggcggcgtttgcggcgcgcccaatgtacctgcggcgggcactggaggacgcggttgccccctcggacgtgcggtactttaaggagctcctccccaccctcgcctacatgtactcgcccggctgccccggctacgccgtctactctgccgcgtggatccgctacggctacgacccgatgagcgagcccgcctcggccatctacacggccctggaggtgcgcttcaccgacgtcctcgtcaccgccgcgctcgccgcgcgggccgcccgcgtggcagcagccgcccctggcggcggtggcgtcgagccgccggccgtccgccacgcgcgggggcggctggcggacctccccctccgccgcaacacctttatccagctcgccgacgtggccgtgccggcggtggtcgcggcggtcgccgccgccccgcggtcggcggcgtgggatgacgcggccgggtggctgccgccgggcctcgtcgcggggctggtcgcgcccgtcaaggccgccgcgcgcgccttcgcggtgcgggagctgggcgtccccgccgcgacggcgctgctgtgtgcccgcgggccggcggtgacggtgagtgaggacggagtggtgcggcgggtgcggccgccccgtgggcgcgccgcgcgcggggggggggcggggggggggggaggggcggaggccgcgggggggggggcgccgtcggcggcgccgtcaggggttggggcgggggggggcgccccgccgccgccgccgctaccgccgccgtccgggtggccacccggaccgcacccaccgcgacgggcggtgcgggcggcggtggcggcgccgccgacggcggtggcgatggcgccgacgctgccgctcccgatgacgtgacggcggcggcggcggcggcggcggcggcgtcggccggcggggccgacggggcggccgacgtgcccggcgcatcgggcgacgcgggcgtcgacggcggcggtgccggcggcggcgacgaagggcgggaggtggacctggaggacgtggtcggtgggagttcggtggagagctttgacatcctcggcgagggcgacgcggacgggagtgaggaggaggaggacagtggctgggatgagccgtaagggggggggggggggggggggggcaggggagtgggggacggacgcgacggtggcgtgaggctcgcgacgaggataggggggaggggaggggggtggggggcgggcagcgggggggggggggggggggggaggggggaggctgcgggaggagcaaagggcaggcaatcccccgtgacggcggcgtcgcctcgcggggaaccactgtgccatggcggagcagagccccgcgggggcgcccacgcccccgcccggtggctcgccgcctcacgccccccgtgcgcggcgcacgcgcgcagcggcgccacgccgccggccgccgccgacacgccaacggccactgccgcgatgccgccgccgcccgccgccgccgccgccgccgccgccgccaccgccgcggcggcaccgccaccgccgcggcgccgccaccgcgcgcgccgccggccgtccccacaaaaaccgccaacagacaacctttacccccccactcgctcccctcctttggcccaacgacgccacgacgtgcaccgctcccgctgcggccccaacgcccccccccccccattctcttccccccccccccccccctccctacacccccctcctcccccctccttcgcatccatccatcactcctccgagtcatccccctccccccgccccccccccgcttcaacacccgtgccaccaccggcgtgagggccacggtcagcgggaaccgcagcgggctgctcgccttgtgcgccacgtaggcgagcgcggcggtggagagccccgggtcgaggcggcccagcgccgccggccggccgacgggggtggcggccagcgcgtcgccgaggcggccgaccagcgccgccacgtccaccccattcgccaccgccgcgtaccagaggccaaacgacgcggccgcgagggtgaggctcgtcgcaatgtacgcgcccccatactgggcgaccagcgccttggcgtccacgccgccgccgccgccgccgccgccgccgccaccaccaccaccaccaccgccgtcaccgccagaaggggtggggggtggcgtcgtgtcgggcggcgtcggtggtgcccgcgtcggcggcgacggcgtggccatggtcgtcgtcgtcgcccccgccggcgcgtgccgggcgggccgccgccccgccgggagcgccgcgccggtggtgacgcgcgccgccgctgcaggcaccgccacccgccgggggggggggggcgacgcgggcggtagggcaaacggggaggaaggcagccgccatggtcaaggggaggggggggggggggggatggagggagatgggcgccgaggcggtgaggcggaaaggggggcaggggggagttgaaagcggattggaaccggtgggggggtggggatgggcagcaggtcggggaagagggtaggggaggggggtgaagcgggtggagggacggggcggcgatgggtgccgcgttggcaaatggctggcggtggtgggggggagctcaagtgacgagcagaggcgcgcgggaaggcgggtcgactgcacccggtgctggagcaggcgccgagcgcggtggtggtggaggcagacggcgcgtcggataccgctacaaacgccggcgatttcccatctgagagtgtctgtccatttgtcttttcaatgccacgtgtgcttcgcttagggaaatctggtacgctcgaaccgatcgtgggagcctcgggtccatacacccgccgccgtgcggccgtgtccgtccatcaccgacacagcgtcacggtccagcgtcaccagcgccccgtgagtggcggctgtcgctgcgtcctcccctcagcagcccaaaccgccacggcaccaccgcgggggggcgcgactgcgtcactttaggcgtagcagggagataggggtaagggcccgtgctgcagggggcggaccccggccggggtcctacaccgccgcccgttgcggaagggccgtttcatctgctctcccaagcagctgcggcggctgacgccgcaggtgccggccaccgtcgccaccgccgccacggcggccgcatcagtgctggcggcacttgccccagtcgtcacggcagcagcggcagcagcggccgagccgcccatgaagtgcccggctcgagtattgacaggcgcttgtgggcattcgtgggaccgcttgacgagaagcgggcgcggtgaaggaagcgccggcgcaccgcttgccgagcccgcctgatcagatgcgaggcatgcagtggcctgcaaaagtgaacgacttcggatgagaagagacacgggggagtttcgcaagctcaccttcatttgataccacatagccacaaagacgtagcgtcaacgcgtgcaccgcgcgcatgagaaaacgccctacaagaaatatacccgcgatatcgcgtaaaacgcacgaaaatcgcgggttcttgcaaccacccccacagcacccatggcagactgggctgcgagggccaatccttcctcccgtgtcatcgactcgcaacgtcgcctcggggggacgacaggtggagccgaggcgaggaaatcgtgcacccctgataatcaaaccggaccgcgataattcgcgggagcctcccatgagttgtcatgaaaacgcgacacattctgacgttgatgcagctcctttcatcgtcccgttgcgccccgagcgtcggcgacgtctataaagtcgctgcgcctgccgtcgcaaggcaggcgactgagcgcacttccatctcgcacccacgccgttgtgcccgtcgggcgtcactgcgttttcgacccccccacgccctgccggccactacccagggatctcccgctcccactcaacccccccccccccaccttctacccccgtccgagggacctcccccccctccggccgtcgacccccccccccccccccccccctgcccaaccaccccattcccacccccctctccccttcttagcaatccccccccttcctctgcccttcccccttcctgac

SEQ ID NO: 50 - DNA, 20341 bp, unidentified
  source 1..20341: mol_type = other DNA
  misc_feature 1..20341: note = Fanzor polypeptide
aggacttagatctggaaaaggccttgaaggagcgagagcgagacgagtctgcagaacgagtcctagcatgagacttaatggacgtagcgagagcgccacgcgttatatgactccgcctttagcaatcgccccactcccgacgttcagaccattctaaagacaggcaccctctgtgtcgcttgtacttacgaggcgctgtacggccgccgccaccttcttgtcaataactgcagtcggccttgcgcctgagaaggtcccgttctaacctctgcacacggccctacacactgtattcgggtaagataagagctggaccagaatcaagcgggttcaatccgctatatctgtccaatttttccgcagatttgcgttccgaaagacacagaacctccgtctcctttgaatcggcgagcggaatcgccttgttccgtcggaagcatgtcccatatggccgctttctgcttcattctgctctcaaaaggtaatgccaagtgactgaatgccgtagtcagtggcacgaatccctcacgagtcctccggcaagtattctgtctcgaagacgattttcggtgggtggcggagtggcggcacccaccaaaagcgctcgattgcttttagcgtgtcaatacggagcccataggagtcggcgttgtagtggtatgccgctacagctggtagctccagatatcacccgttatgcagctccatgtcccactctatcgtatatgcgttgaccgccttgattgcacgcatttgtgtctcatttgcgtatatagctcaatttgcacagaacacttgcaatacgtgagtaacgtagcggttaaagtgttagcgttcggttcggtatacactttttgtcagccgagcgttcgcttcccggtgagagcatagagacaacggttctgcgttcagacggccatacttatcgcacctcctctcagacgctacaggctgctcagacaccgtccagatgacccaagtaagccaggccgttcagacgctgtccagactgatgaatccctttggcacggttgctgatcgggccgctggcgccttggaaggccgctcatccaaggagatcttcatcgagcactaccactcaatgctaggacatcagtccgatcgaatcctgcgacactacatgcgtcagcattactggtggccagaaatggtgaaggaaatcgaggcttactgccgaacttgcgcatcctgccaagctagcaaacccgaacgagccgcaccgagaggaaagctacaccctatccagctcccgttcacagcatacgaagagatttcgattgatttcaccggaccgcaccctgtcagcattgatgcggacggaatcgcgagattacattttcaccgtgattgacgccgcctccggagaagtcaagctcattccgtgcatgaaggccggtttgacgagcgcaaaatgcgcccaaatcttcctcgagaaagtgtacccgcaatggggtactccgaagacgatcctgtcggaccaagacgtccgctgggtttccgcgttctggaaagcgttccacaacgctctcggaacgacgctgcacgtgtcaaccggagcggccccttgtcgagttggccgccgctccgattggccaactcggccgctccggccatctcgacaggggatccggagcttgtcccggcggccgctgcgatggctcgattccatgcagctgatttgttctaccgagcgcatgcgagagatttacagtcgaccaccctatactaccgtgatcttgtggcgcgcaaggggcgcggtgctgcgcgccgaaatctgtatggtattctcaaactcaaatgatccggatcggctggcgcggctgcaagaggcctccacttgattggttgcctcgagaacttgaagtagtcgctagatacggttgacttagccgtttaaatacaagctatagtctcgcaaatagcgatagggaggagaatagctaaggacagctagtgtcggtagaattcgcccgagggagaagaaggaagacaaaagtcacgacgagaactacgctcagagtgcggagaccgcgggtacatgtggggggaccgggacaggtacatagtcacgatggagatcacagaaaggccgtgcttgtcgatccagattcgagaggcgagagagggcaggaagtcggaggagcgaaggatgatcgcttcgctcagaggtgtgacttggcgaggtgactcagagagcgaccctttttagcggtcgcggcggcggtgcctttgcaggtacgcttgcggcgaaccgagatcttcgcggaggtcgtttcggccgtatagcgcgggagcgaggcgttcgcgagacgaggggatcgacggagcttttggggcgacgacgccacggcgaccactcccggcatgatcggctgttcggcgcgtggggtgtcatgacgaggggtaacgggagcttgatcgacctccggcgtcggtccggcgaagtgagcggcaggggcgaagagttcgggagattgagcgcgttcgtccgcgtcgctcgagctcgtcatcgacggcgtggggccatcgaagagacccaatcccgcagcgttgatcaccaccttgaggtacgcgtcatcgagactccgaatggcgggttgtccgggttgagcgggagcgtgaagggccaagtcgagatccggcacgaaaggttgaggatggtgttccccgctcgagctcgcgagcgcgttccttccgtagaggtccgcggtgccaaagccagggctatcgaggctgccttcgcgaggagagaattccgggctagtgacgggcgagtgcgtaggccgaaaaccaggcgaaggaggggacttgcgtccctcgtcggcccagcggacgaagtggcgggctgacgtggcaggaggaggcggcgcagccgactcttgcgagggcgcggctctcgcagcagcgctcgatctcgctcgcggcagcggcccttcgcctcgtgctacacatcgacaccgacgactgtgcaccccagggcacccgcccgatctctcgagtacgcccgactccgcttttgaggactcgacggcaggacctttgtcgacaacaatgcaagttggaggccctctccgctcggtcgcatgggcagcgacaccctctcactcgagagtccgcgcgcagcatgcacgcagggcaacgacggcgttcttcgacggcataggcatcatcaacctttgcccgagacggccgcaggcgctgcgatccgtcgacgatggcattggagggaggaggcgccggcacgctctcggctcgctcgggaggcgtcgtatcccaggtgggcagattccttttgagagacgcgtgtgaagagtaacatgtgctgatgcaaagactacgatgtcggcaaaaggcgaccgaccaactcggaccttgagactcgaactgtgggcccgctgcactcagaccttgggtccgacccaaggtctgagtgactgaggggcggcttttggcggcatgcctcggttgagatcgagatcgcaacaagggttgctcagcacaggcttgttcgcggagatgaactgactccgagttgcaccacagtgtagtcgccgatcgcgtgacgaaatgacgaccccgacaccgctggtgagaacgttgtgccaaaaagtatccgcgggctttcggtcgctgtttcgccgaagcagtacgccaatctgacgcgcgtgataccgcactcggttgttccaagttgacgggacaagaggctcagaatacaaggcggtatgggtggcaagagtcgcgggaacgggtgggcgtgcgagcctcgaaggcaaactgctgcaccaagtctgcactgactacgtcggtacgaagagatgtgtcacgtacggtcaagaggatgagatcgaattcaggggcggcggggtattgatcgatcacacgagatcgaaagggaaccgtctcgcgctgacccggttatcgtcgtttcgaggctggcccagagccgcgaggctatcctgctggcgatgaatggctcatgcgcagtctcaagactgaacaaggagcccgcagtgctgatcgacgctcgactccggcgagcacagaagggaagccgctcggacgcggatgccgctctcgcgtgcaacatcgccacgacgcgcatcgtgatcgaactgcgaccttggtcgaagggcgactccagtcctgacgtgcgacggacaggcgaacttgctcgagctctccctcgtcgcaatggcctcctgacttaaaacggcgtgctgtcctcgtgaccgaccgtcgataagaggagcagatggcattgacggagctaacctcaagcgctcatcgctgactgcgcgagtgcgccattctttgctacgcttgctctggagcacgcgataagctcacaagctggcagcgggccgaaatcagagcttgagcgccaaagaacccgcatgcgacgctgcgaacggaacacgcgggtaatgaactgcgacttgcttcatgcgtgacagtcaccatagcgacgcttggagtgcccgcttggaggggaaaaagtcgccgcggacaccccgcgagtgggcggacgggcgaaaggacttctccctttctcgctctaacatttgcctttactgcaaacgcttgaaggagacctcgcctcgcaccaaagcttgctctaagcgctcatatcacccatttccaaccccgccggctgcctccgctctcaacctccgactctcgaggcgcacgaaccccttctcccgttgtcccctcgacgacaaccgccgaatgctgctgccgcgcacgcagctcttgcttgcgctcgcggcttccatcgtactcgcctcgttaaccgcccgcctcgccaactggacgggaacaggaaaacagcagtccttcggagtccgcggagccggcctcgtgcacggacccttgtgagtacattgagccagttttaccgcgcggcaaaggaaactgatgcctacaatccacaacacagcgacatgggccagaagaccctcatggcgcacttgcggggcatcgcgcgcgagcagctccagacggcgcacgcgacgaccatgatggagaccgggaccggcatcaaggccacactcgggctggtcccgaggagctttggcggaagtgagttggacagctgcttactcatagccagcctcgactgaccagtggaccatcggaacagacgagtatgtcgttgtccgcgacctgaaccccgtacgattccagcttcgccaagggacgctccagtcggcgacgtgggtgagggacaagtccgccacgaacgtcgccaacaacctcgcagctgccgagcgagccaagatcgaagagatggaccgcgagatccgcgaggtcctgggcgccgagaccgtcatcatcaacattgtcgacggcgacaagaggccggaggcaaaggcagctaccctctccgaccgtcaccgtcgcttctcgcggaggcaccaccaggaatcgaagctgccctgcgggaagaagcgcgtcgagctcgaacagaccccgcccaacgactcggactggatccaccgcgctgtgagtcctttgtctggtccagtcacacacataacggagcgggagctcacgcaaactttcagaacagggcgacgagaagacgatctactttgttgcgcccgacgaagcagatcgcctagtacagcatcttgtgacgcagtcgttcgacacaccaaagtacgacctccccgccaactctcccttcgccaacagcaacatcgatcggctcatcgacatcgtcaagcgatacccgccgtggcgtcgaattatccatacgcgcgacctcgatgcagtcatgcacacgacggcgtgcgaggcatggttcgtcctcctcacctcgtggtcaaaagtcgaggagggggcggtccttacctcggacgccacggtactcgaagacatgctcgagccgtacgttgccgagggagcgcagcggctgcattccgtccagcgcgatgtttctgctgccgctccctctgcaccaaggactggccgtggcggcgccctaggcaagaaggcgccgctgccagctcgtccaaacctccccgtgctcttgactcagctcggcgcacagtcggcattccgcccaacatccctcgacagattgccaaccgaacgacgccggggcgatacaatcgtcgtctttctccccggcgtcgacgctctcccaggcttcggcagagatcaatgtcgccgtgcgcgcgtgtcgagccttctgggaaacgactacaccggcagcggcatcaaaggcatctcttgggcgctcgtctcgagcggtctcggcgagtctttgctttcgatgagggaagaggactggtccgaccctcaaaagctcgagtcgcaggtctcttccctcgtctccctcctcgcctccaccgccgccagagccaagacgtggcgggctggaggcgactttggcgaggtcgccaagatctcgagcaagagcacgtcgatcgggcgcgagcagatcctggacctgatcgagtcggtgcgcgttattcgaggtgagaacgtcaactacgtcgcctcgacgttctaccacaacggcgatccgcgcggacccctgcagttcaagcaagctccgccgtcgactcgcccaaatcgctacgacgtcgactcccgccagccaagccatccctacctctctcgcccaggtccgcaacacgtcgtgccacaaggtctgaaccagtcgccgacgctgccgacgagcatcgtcaacccacgcctctcgaacccgctacaaccgtctcggacggtgcccgctccgggcgagaccgatccctcccgtccaaagatgtcgaagattcgtgttcggccgctgcagatgggaggaagcgggcagagcgtgttcatggctgcgcgaacgcatggtcccgagctcactcctctcgacgacaagaccatcgcgcgaatcatacaagcagacgccagccttcctgtcgaggtcaacgacgacgacgacgcggtcgactcggaactggagattgttcccgaagatgacgacgacgacgacgacgaagacgacttcacagcagtgccaaagcaaaaaggaaagctcaatcgtgtggagtcgtactttgcaacgatcacctcgccgggcaagaaccatgccgccgcgagtcgcaagatcagcgacatcacagagtcgccccgaccagtctcgaccgcttcggcttctgccaacaatgccggccgcagcggcgcacaacagaccgccacgcgtatcacgcgtctcacatcggcaagagctcctccgccagagccgtcgaggcgcaaagatcgcgaaccagtgcccgcgccccggcagacccgactcgcggggaatcccgcgatcaccgaacaagaggcagctctcgcatcgccagacccgatgctcctcatcatgtcgctcgccgtcaagctcgggaatcgctttgtccacagtgcgtttgcgttcttgctggaactgctgctggaacagggggaggcagggatgatggcgacgagggatctgctactccagcggaaccgagcggcgcagtgcctcggtcgtcttgctgctggcggagcataccgtgcggcgggggagcagtggttcccgcggcaaacccttgttatctctgagctggagaaggtacgtccggtcatacggtcagaatcgagatggacaagagaactgactacagtctctgagcaggaggccgtcaactcggccctcgcctccggtctcgtgcctcctcctcgactctcggtcaaggcgttcacaatagcctacgctcccttccaaaccaacctgaccgaatggccgcgaacgcacacgcgagacgaactcgtcaacttgggccagttcgtcgcgcgcgacctgtccaagaacgcagcagaagcgctgagcaaagtcctgcggaaggcgcacaaggcgttctcgctcgatccggcatcggaggctgccctgcagtcggcaaacatcgaggcttccgctcgattccgcgcgggcctcgggaactggttgggcggggtgctcgcgactgctccgttcagccaggcgtcggctcacgcaggcgccgcgaacgaagaggacaagggactgccgagtcgagaaaagaccacgtcgtacaacttgcgaaagggcacgaccggcaagagcggcgacacgcttcagcaacagcacggcctcggcccgaagatcgacccgactgacccgcgcgaaccccccgctctcgacctcgggaaagagaccgaaaagtcgctcgagcagatgatcaaaaagctcgtcgactcggtcccgcctggcagcatgttcaatcgatcagatatgcatgacgcgctactgcaagacatcaccacgatcgcgcagcgccttctagcatgccgggaccggcatctcgagatggcgctggtgctgctcagatacaagaagatcgagaacgcgacgaccatggccttcgacgacgtccttgcagggaaaatgccagagatgggggccggaacgcttgccaaggggttgctagctctggtgatgagactgcgacagatgagaacgctatcggggatcgagctcataccggtgagctgactggcacggcggcgtcgagcatagtcaaagggagactgactggcttgtccttttgacagtatttcgacccgcaatgggtcgatgtagacctgtacaccctcctccagtccggccaccggcaccgcttcaaggtgctctgcacagatctcgaaagaacctgtaccaagatcgcatgcggcctcctcccgttcgtcgatgaagacgaagggagaagagtcgagctctttgacctcttcaggcgggtgttcgaagtgtggcggattgacgaggacgaccccgacaacagagacaaggactcgccttggtcctggatcgaggccgagaggacacggtcgacgagcatccgcctggtcgtcaagaaggagagcgtgtccctcgtcgccaacctcgatcgggtcctgcgcattgtgtttggcgtggaggagaccttctacacctacatgaggcggaccggagctcaagtcgaggtgatgaaccagctcttcgatcatcgaatgttgccgaacaagttcgttcccaccgggcacatgcgcatgtcctcaacaaaggtccagttcaccggagtcgacattacgaagatgaccaaacttggacgagaggcgctgccggagaagagtatggctgtctgatgccgaaaagaattgagctgcgctgactcgccctacccagatctcgacgcaggaaccgcatgggcgcacgtctcacaactaccgctcactcaactgaaggtcaaggagtactttgccaagatgatgccgtcctttcagcgtcgcgtcgtcaacggcgagatcgtgtttgtaccgatcgtcgccatcgcaaaacccgacgcagacgtgatgctctcggaacggcgcgatccattgccgcccagatccgctcctcaggaagggctctcgcgcaaagagcgacggcgcgagcggcagcggcaagacgccctggaccgagatcgctccccggtcgacctccgaacgccggtacgcgagaaggcgccaccaagtcgaacgcgaaaggggataccggtgtcttggccaaacctgcgattcgaggggggaaggaagttggtcaatgactttcttggagacaccccgctcgaccacatccactccgccagcatcgacaccggcgtcgtctgtccagtcgcgaccttcatctcgaatccggttcgggacggcttaccaacgcagcgtgccgaggcggtggcgacctattcgcgtgagactctgctcacccagcagcgtcagaccagccgccaagcttcacacctcaactcgtatctgtcgaaccagttcgactttacccgatgggcggatccagcttccacagatgttcgagcgtcgggtacgtcgccaatgccagaaccggatccgatgcaagaccctctgctggtgaccggtctgcacttgctcaagagcatgcactcggtcttcgacgggcggtcgatccagagcaaggtcgagcgcaaggccgaggtcagttcggtggcatctcagcacgtcgatctgatattgggtggcaaggatcgctggaccgaagaggaccgcaagacgcgcaaggtcgttgtcatggtcggctcagcggacgatctcgcgaaatcttccggaatgaagggtgctgtcaccgccaacgtccttgtgcgggaaatctctgccgagctcgcgcgccgcagggtcaacttcatgatctgcgttgttcccgagaactacacatcccaacggtgcccgaacccggactgcgtcgatgcgcagggtcgccgatctcggtacgtttgctctcgtgtactctgagggtgatgcagctgaccgactggtgatctttggggacagagcggagaacccgcgtcaccagggtggaggaccaaactaccgtctcctccaatgccagcgatgtagggcggtcttccaccgggacggagtcggggctgccaacattgggagtatggggtggtgcctgctgcggagtgggttgcagctgtggggggagaactggatgggaccaggaggaaaaaaacttgcggaagcgaaaaatccctaaaaaaggggggatcaatgggatctacttgtagaaccctcgctttctccgtgatcaatctgacttctatctcctgtgtgcggtaaccacaaacaggcgcttgcgcttgcgcttccacgtccgcaaagaggcgcttggcgcttctgctcccctatggccccggcctgcttgagactccgtgtgtggactcgcatggtacagatcgacgggtctgaccgttgagaatgccggacaacgcgccggcgcgtgcgacagagcgcccgaagctttggagccggatcgggattgccggatttctcccctctcaacggtggaaagggcgtctacagatgcacatgtaccccctagtctgatcaagcttgcaccccgcggttctgccgtatccaacggtctgcgacgacgctggcacaagggcctttttcggcgaaagaggcgcttctcgcaactcgccgacggttcccgcagggatgctgggtaactctgggacggttgtaaccttcaaatggactgtatctaccgttttcaacaccagaatacgttcgtgggagaggcggcgaggccgacgactgccctggccgagtcttggagcacccgccccggcctctgcacggtcgaaaatcccaaaactctccctcatacgaccaaaaatcgtcaccgagatgctatgcttgatgtacggccccgcgccgagctctccggaacagtccgggacccaattcctgactttctcgccactcagtctcagtgttccaacttctaagcgcattgtgggtctggttacttctttcatcttgttgacagcatcagaactgacatgtaccatgttgacggattccgtcgtatcttcagaccgagctggcaaacatgattctgagccaggaaaagccggtgagttcagtgtgatgaagccatggcttgtcctgaacagttctctttgtgaatgcattcttctgaaatttgctgcttacagagaaatgactcggccgagggccggcaagcggtgagctcgagacttccaagccgaagaagcgcctgagccctctgctcaacactctgcagagccgagcaagggcagcggaccgcatgcgataccgagagcagcattgggagttctgaatgcgagaggtttgagagcccctcaaaggttgtctgaggaggagggaagaggaagagggagaggtggcaaagccggcttgctcctttttgatacgcgagcgaggtgcagcgaccgcggtgtctcttactcttgcgacactgcccacgggccgcttttcgagaaaggtgttccggcggcggccggccttaacaaaaccaaatccaggacgcgcgagaacgctcaagtcgagacaaggagacgctctcatgcgcgagggcactgaccttgacgggatcccagccctttgaatgcgctacaaagagtgtgtttcccagtgtccagccaagcaaacccgcggctgcagctgcgaggtgcgcaagttcaggagaaggtgcgcaagttcaggagattccaagacgtgacctcccgttgttcactcgttcgcacgcgtccaccaggttattgtatctgcaattttagctcgacggagcgaagccctgctcatgtatttgactatggagcatttgactgtgctgcattgcccacattcttgcagacacgggcaagtcagagaagaagaaaccgagcgcgagttgcgccacccgcaaataccctccggactgaaccgctgaagggccgacgacctgtccctgaccagtagaagtgtcgggatcccttgacttacgaccagcaggtcttgcatgtcgcccagaatcgtcaaaactgattcctcctggttgcgctcaaaagccggatggtcaggccgtgtagacccaaatcgcctgaaacttcgcaccctgggcccctataggtcaaagtccagccggccacaagctcagcccatttcaacggcggtagaggtctgccgagcgaggcgcttgtgggaaattggactagagctgtaagccttgtcgtgcagcatatcgacaatctgaacggtcaaaataatcgtgaaggtgtttgaagctgttcaggcgaaaaagatatccatagagcgcatgcttgctgagatcaggcaagcgcctcttagttgtaattaccgtcgtgcttgccagttccgacccagcctggctcaccagctcgagatacatgctggatcgctgacccttgtgctccgcccccctccagaatcttcttcttcggtatgtctgcagcggagtctgaagtcctcgacgcgaagttgccaagtcccccaagatgaaaattaacgttcttttgttcgtgcaggatatgatcaaggaatgatgggcggcgtcaacggcgctcttgactacgtgaccacgatgggactgggatacgtcacgccgggcgtagatggggccaagccgaccgccaccgtcacgcagtcgacgaagcaggtgagtcgtcggcaacgcatctatcttgtttttgtcccgccggccacgatacctttactgaactgctgtttgcatacagggaggaatcgtctcggcctactgtacgtcccgatcgtgtctccttcccgttttcaacctgacaccggtttctctccagacctcggaactcttttgggatgcttgctcggcgggtggctcggcgataggctcggtcgcaagaagaccatctggattgggtgcatttggatcactatcggagctcccttgcaggtgagtcggagttcactcttgccaccgttccgaaagccgcgatttcactttcgccaccgttccgaaatgaactcccgccaccgctccggaagctggcgctgacctccctctctctccgacaggcagctgcacagaacgtcccctggatggtcatggcgcggatcatcaccggagtcggcacgggccacctcaacgcgatcgtcccagtctggtccgccgaaacttccggtcatctctctcgcgggttcttcattgcgcttgaattcacgctcaacatattcggcgtggtcggtctatggttattcattcgtcttctgacccgcgtcctcgtggctgacgaagttgattcaccgccgccccaggttgtcgcatactggctcggttcgtttctcccgcgtctattgccgaaggagacggcgctgagtgaacgcgtcatacagagtatggactgtccttcatcggcgacgggaacacccagatccgctggcggttcccaatcgcgttccagctcgtgtaagtttcgcttacccgaccgtcgcagcagatcagacatactgatgtacgccggctctatagacctcttctcggcctcgcaatctgcaccttcttcatgcccggtacgcatttcgcctttttccggagcggacttcctcgctgactctcccgacaattgcagaatcgcctcgatggctcctcaaggcagggtatcgcgacgaggcgctgcatgtcctcactcgcttgcgctccgaagacggtcagatcaacgcggaagcccaggccgaatttgacgagatcgaccgagcgattcaaatcgacggtgcggcagaacccggctacatcgacatgacattccgctcgcacggcaagctgcatctgtcacgaagggtacgtcagattggcaaacagcgatgaaagctccgactgaccgaatcgctgttaccaacagactcagctcgcgatgtgagatcaatttgtctcctgctttccgttcctcgcgctgaccttttctctcgttctcagctggatccagatccttcaagagtggggcggtatcgccgctatcacgggtgagttccttatcgggctggtcggacgagaaaagcgcctgacgattcttttcccttcagtctaccaaccggtcatcttcggtctcgccggcttcgacgcttcgaaggcaggctgggtatcgggagtcaacacgatcacctacatgttttctacgtgagtattcaccttctccttgccacttggcgagacgtggtcgctgcaactgagtcgattttcttttgcagtcttatctgcgtcttcactctcgaccgtatcggtcgccgtgtcacgctcttctggggtacgttccacttggtcttttctttcttcggcttgctcttgaagcgatcactgacgaaacatgaccatgcgcaggcggcgcggttcaggctttcgcgctcatcatggcgggcgtcttcgtccaccttctcaccgttcaccccgaaaagacggctcagtacggaggtgctgctaccgctatggtgttccttgtgcgtcaagaaatgttgtctcactgtcacagactcggaatttgctgaccgggtctttcttctccagtacaccgcaactttcggcgcaacttgtgagaagtctcgccgcttcttctttgagcgaaatgaacctgacctttgtttcactacttcttaccgaaagggctcaccgtaccctggatctaccccgtgagtggcgatgccttccgccaagcgtagtcttcacattgctgacgccactcgtcttcaggccgaaatctggcccgtcaacgcacgagcgaaaggaaacgctatgggagtcgtcggatggtcgatcggtaacggatggtgcaccctcctggtccccgtcatgttcgacaagattaaggaggtcagtcccggtttttttgccgtccgtcgtcttcgctctgcctcaggtatgctgactgcctgcggtctacagaatgccctctacatcttcggcattgctaatattctcgctatcgctgtcgtgtgggcattctaccccgagaccgcgaaccgcactctcgaaggtgcgctcgtccgttcctcttccaaacgctcgcaaccccttctgactttcgagccttgccgtcttcacacagagatcgacttccttttcttcagcgacagctggttcgtgtggcacgccgaggcagagtactcgcgcctcaagaaggaactcgaggtcaccggcgaggtcccggacgatctcaagacgtcgacccacctcaaggagaagatcagcctcgacagcgccgcggcttgaacacaagagcactttccgtcggttctctagactcgtgtatatataaattctttgcctcgatcttcgcaatgtaccttcttgatgggagttcggtcctttcggtccttgatcctcttccaccttagacacattgttaccatgaggcgtctctccacgtcggaagtacggcacgctgccaacagtgcgggcgatgcgagataattgaatgggtcgcagagcaacttatgaagtctacgagatgtcaacattgacgcgattgacattcgggcgactccccgcttggcctcttcgctctcacccggcacgccaccgccacagtcctggggcctgcaagggggtcaacgtccttgcgttgcttgattgagaccggctggacgtgaaacggacgcgctctcaagcggcgccaccggcgacaagagatccgtgctggacgaggaccgtgtcgtcaaacctcgagcggtcgtgacaagatgcctgtggtcaccaacccgatcacacccacgctgagcgtctctgaactacgagcgctcgcgaaccggcacgcgctgccgcccatcgtggattctcaactcgccaagacggtgacgctgcgcacgacccgcccgcttcgcgcaggcaagacgcgccagtacagtctacccgaaatcgactttcaactcttggaggccttgggagacggcttactcgaggcgagcatatgccgagtcttgtacacgaacgtcacgagtcgggctgaccgttccgcagtgctgttctccgtgagttgggtttgcgtggtctttactgccgttcagggggtcgcgtggcttattagggtatgctccccatgcaggcttatcggagtgtactccgcaacaatgggctactcgcccagctctcgcacggctaccgccttcatctgacgatgtcgccgcctctcgaccccgcgggcacggcagcaggcgcgccgttctcggtcagcgtgaccaagattctcgccgactcgttcgaagcatacatcggagggttgacgcaggcatcgggcgagcaagtcgcgaggtcgtggctcgaaccactcttgatcgacctgatgggtctgatctatccggccgtggaaggaccggatgcggtttcccgcggtgagtgtcaaagatgcgctggcgttcccgcgctgcagagctgaagaccctttcctttttacaggccagcgtacgccccgtaccgaaccgaacgccacgcctcgcaccgaacccgtcgccgccgaacccgtcgcccagcgacctccgaagcgtccgcgcgacgacgcatagcaaacatggcagtgtcgctcttctcttttgcttgcttgactagcttgacttcgagcctgtgtgaattcgattcgaacagcaattctgcggcgagcttgcaccaagtcaccagagatccagaacgaaagagagactggctacgagagctgtcttcgttcagtggcttttggggtgccaagagtatagtagggcgtagaagaagctgaaaagagggaccgagaaagaacacgatgacaactctgtccatttcgctacacacgtctgcaaacccgttctacatgctcgtgtccacccggcaaagctcagtcgcgaccagcgcacacctcgccacgggaaaagatcccgagattgtctatatgatatccttgaaaaccggctcgaaacacttgtgtccttcagtggaagggcacgttgcgaatgcgaccgcccgagccaaattgccggtgcggcagcgcgacttcaaggtcgcgacgaacgcggcgagtcaggcgcttcgagtcggccttggcgagcgagcaacccttgaccggtccggggcagacggcgtcgatcgagcccgacttggtgacggcgttggtgacgcactgctggacctgcgagatgcacgagacgtacgcggcgccgtacgaagtctggttgttgaagaacgactcgagcgacgagttgagttcggcttgcgtgaggttgtgcgtgttcgcggtcgagttgttgagcagagtcgacgagtagtcgacgaggtcggtgaagaaggacgaggggaggtagccgtcgtactgctgcgcgatcgagaggatcgtcgtctgcgtgacgacgggagcggcggactgggtgatacattcctgagcggcggtggcgttgccggctgttgagaaggtcgacttgggtcagccatgcgatctcgacaacacgtccataaggtcatcgagacgcactggagatgagttccgcagcgcacgactgcaagatctcggcggcggtgaccgtgttgcccgagagcgtcgacgcgaccgagttgatcgcgttcgagatctgggcgccgacctgcgcgccgagctgagcgctcggggtcgtcgcgttctggatgttgtacgagaggatgttttcgacgctggtggtcaaggaagcgggcaagacgccgacaaactgctcgaggacgccgttcatggccgtctggagcgtcgtgtaggctccgccgggcttggtgaagcacgcgagcgaggaggtgttgccggcctgctggatcgcgtccgtgtagcactgcgagacctgctcgagagccgtgaccgagttgccggacagcgaagcgatgaccgactggatcgaagactggatctgggtgacgagggcctgctccgacgcgggcaggagcgtgccgagcaacggcgtgacggcgtcaaagacggacgagaggatcgtgttcggaaggatgccgacgaactgtgtgcgttcaagtcagtacgagcgcggaaaggcggacgcgcacgcgatgaaagctcacctgctcgaggatcgtgttgagcgtcgcctggagaccagccgagtcgctgccggtcggagtcaagcacgagtatccggagggcataccacccgcggcgagaacctccgagagacacttttcgagcgctgccgtcgtggtggcattcaagtcactctggctcatattggcggcagcaaaggcctcgtcgagagcctgcttgatgttgagggaggcagtgacggcgtccgaagttgtgatcagagtcgacgtcgagacttggagctcggtgatgttgcgagtgacggtgatgtagaccggagccggagtcggagcgaggagagccgagatggtgccgttggcggcgaccgctgtaccgttcacggatgcggtgctgttggcgacggcggtggcggtggcggtagcggtaatgttttcggccaagatggtcgtcaccgccggcttggtgtgagtgactgagggtacaaacgcgggatcagcgatcgcgcaacaaaacgacgcgaggcaaatcgggaccaactcgccagtgatggtcgtcgcgctaggtttgccgacttgcttctggatgacgctcgagatggctgtactctccgaaaggcgagtcagtacgagtgaaggggaccagagaagccataatttctgcgcaactcaccgccggaaagggcgcccgcgactgcaggcgggatgtacgagctgtcggcgaacgatccgacggcttcggcggcacccttggcgacagtctgcggcgaagcgccctggaccttgggcgccggcttcgacttgatcttggacgcgttcttggtccacgacttggacgaggcggacgagggagacttgggcttggaggcggtctgatccgacttgtggacgacgggtgcggcgttataagagttgtcttgcgaggaggtggaggacgacgagccggacgacttggacgacgacgacgacgacgacgacttgtgggaagcctgtttcttcttgctcgacgatgacgactttttcggcgacgggttgacgagcttctgaacctcagggacggtgtactcgcccggcttgtggatcacgcccgggtgatcggagcaaggttcgggcgacgcggcgaccaagagcgcgagtgacgagagggcgagcgaggtgaggctgaaggaacgcatgacggagtcgagttggtcttggccggtgtgtgtgagggggtggtagtacgagggagtgtgcgacgcgtcgggtgaaaggggacagggaaagaaagtgtgaaggtccgcgggacgaagcgagcgtgaatttaaaggaacgagtggaaggtccgcgggcgaagtgcgcggtgggggtccgagagccgctttgtgacgagagtgcaggaaaggaggagatggagaaggagagaaagcgagaaagagagaagggcgcaagacgcgaagaaagtcgcgtcgcgtcgtaaaagcgcgccgccgaaagattcacgtgcgcgtcgagatgatcggatcggcggccgacccgcatgcattatggccatcgcaactgtatgtattgcgaggctgcaaagcacacagagttgtacagaggccgagcgagcatcccgtccaacaaactcgggtcggttccagcaaatcgctcggagcgactcggaaggcgaggtaccagcgtagcctcagccacagtggacagcggactccgacgaagcctatcaggtcgtacgatgaagcatagtcggccggtcgctgagagttagagcggcggtctatgtgctgttccagggatggccttggatgacgtcggcggttgagctgcctggtctggcgaggacggcgggccgcgtgctatggcgaggagaggcatggtacgaataactggccgatgtgtccccgcagcaggcagtctagccggttgagtgatccggagcaaagtcgaggagagaaaaagagaagcgtcgctgctcccgac

SEQ ID NO: 51 - DNA, 21152 bp, unidentified
  source 1..21152: mol_type = other DNA
  misc_feature 1..21152: note = Fanzor polypeptide
ccggcgcgtcatcctcgcctccgacatctaccgcgggatactccttcagccggtctttcaggacaaccccatccctgatggcctcacccacgccaacgtcatggaccggtggagcgaggccggcggcatgttcgccgtctcactcttcaccgacattgccgtctttcgcctccttggaccttccctaatgttgtagactagtagaccttatttgttgtttgttgttagtcttattctcccccagacagactcgtcagctcgtgttacagagacgagtcagcagaagaggagagcaggcattggggacctttacacaccgcgtgtaaaaaaaatcccgcgaagtctgcaaacgggcttttctgtacggtcgcggggcccatctctgccctatactacgtatacacttatcgctacaacatacgcgactgctgcaactgtgtgccgtacccctcaacttcaccggacttgccattcggctgtgaaaattcctgagatgcagagggcactcgtctcaagcggatgcgagacgaggctactctgctgacagggagatgaccgtagagagacactcaacaataacactgaatcgagcgtagattgcgagatgtgagcggtgaagaagaaaagagaggggagcccgagggcgagctacgacaaagtgcgcccgagatcctcctccaacctccacttgccgcctcatccgaataacgtgtcgtcgtcttgatcttgagcccgagagtatggtagtagtctagggggagagatcaagtcagcgagggttcgaatgaaaaagcgagcgagtgaaaaggacttagatctggaaaaggccttgaaggagcgagagcgagacgagtctgcagaacgagtcctagcatgagacttaatggacgtagcgagagcgccacgcgttatatgactccgcctttagcaatcgccccactcccgacgttcagaccattctaaagacaggcaccctctgtgtcgcttgtacttacgaggcgctgtacggccgccgccaccttcttgtcaataactgcagtcggccttgcgcctgagaaggtcccgttctaacctctgcacacggccctacacactgtattcgggtaagataagagctggaccagaatcaagcgggttcaatccgctatatctgtccaatttttccgcagatttgcgttccgaaagacacagaacctccgtctcctttgaatcggcgagcggaatcgccttgttccgtcggaagcatgtcccatatggccgctttctgcttcattctgctctcaaaaggtaatgccaagtgactgaatgccgtagtcagtggcacgaatccctcacgagtcctccggcaagtattctgtctcgaagacgattttcggtgggtggcggagtggcggcacccaccaaaagcgctcgattgcttttagcgtgtcaatacggagcccataggagtcggcgttgtagtggtatgccgctacagctggtagctccagatatcacccgttatgcagctccatgtcccactctatcgtatatgcgttgaccgccttgattgcacgcatttgtgtctcatttgcgtatatagctcaatttgcacagaacacttgcaatacgtgagtaacgtagcggttaaagtgttagcgttcggttcggtatacactttttgtcagccgagcgttcgcttcccggtgagagcatagagacaacggttctgcgttcagacggccatacttatcgcacctcctctcagacgctacaggctgctcagacaccgtccagatgacccaagtaagccaggccgttcagacgctgtccagactgatgaatccctttggcacggttgctgatcgggccgctggcgccttggaaggccgctcatccaaggagatcttcatcgagcactaccactcaatgctaggacatcagtccgatcgaatcctgcgacactacatgcgtcagcattactggtggccagaaatggtgaaggaaatcgaggcttactgccgaacttgcgcatcctgccaagctagcaaacccgaacgagccgcaccgagaggaaagctacaccctatccagctcccgttcacagcatacgaagagatttcgattgatttcaccggaccgcaccctgtcagcattgatgcggacggaatcgcgagattacattttcaccgtgattgacgccgcctccggagaagtcaagctcattccgtgcatgaaggccggtttgacgagcgcaaaatgcgcccaaatcttcctcgagaaagtgtacccgcaatggggtactccgaagacgatcctgtcggaccaagacgtccgctgggtttccgcgttctggaaagcgttccacaacgctctcggaacgacgctgcacgtgtcaaccggagcggccccttgtcgagttggccgccgctccgattggccaactcggccgctccggccatctcgacaggggatccggagcttgtcccggcggccgctgcgatggctcgattccatgcagctgatttgttctaccgagcgcatgcgagagatttacagtcgaccaccctatactaccgtgatcttgtggcgcgcaaggggcgcggtgctgcgcgccgaaatctgtatggtattctcaaactcaaatgatccggatcggctggcgcggctgcaagaggcctccacttgattggttgcctcgagaacttgaagtagtcgctagatacggttgacttagccgtttaaatacaagctatagtctcgcaaatagcgatagggaggagaatagctaaggacagctagtgtcggtagaattcgcccgagggagaagaaggaagacaaaagtcacgacgagaactacgctcagagtgcggagaccgcgggtacatgtggggggaccgggacaggtacatagtcacgatggagatcacagaaaggccgtgcttgtcgatccagattcgagaggcgagagagggcaggaagtcggaggagcgaaggatgatcgcttcgctcagaggtgtgacttggcgaggtgactcagagagcgaccctttttagcggtcgcggcggcggtgcctttgcaggtacgcttgcggcgaaccgagatcttcgcggaggtcgtttcggccgtatagcgcgggagcgaggcgttcgcgagacgaggggatcgacggagcttttggggcgacgacgccacggcgaccactcccggcatgatcggctgttcggcgcgtggggtgtcatgacgaggggtaacgggagcttgatcgacctccggcgtcggtccggcgaagtgagcggcaggggcgaagagttcgggagattgagcgcgttcgtccgcgtcgctcgagctcgtcatcgacggcgtggggccatcgaagagacccaatcccgcagcgttgatcaccaccttgaggtacgcgtcatcgagactccgaatggcgggttgtccgggttgagcgggagcgtgaagggccaagtcgagatccggcacgaaaggttgaggatggtgttccccgctcgagctcgcgagcgcgttccttccgtagaggtccgcggtgccaaagccagggctatcgaggctgccttcgcgaggagagaattccgggctagtgacgggcgagtgcgtaggccgaaaaccaggcgaaggaggggacttgcgtccctcgtcggcccagcggacgaagtggcgggctgacgtggcaggaggaggcggcgcagccgactcttgcgagggcgcggctctcgcagcagcgctcgatctcgctcgcggcagcggcccttcgcctcgtgctacacatcgacaccgacgactgtgcaccccagggcacccgcccgatctctcgagtacgcccgactccgcttttgaggactcgacggcaggacctttgtcgacaacaatgcaagttggaggccctctccgctcggtcgcatgggcagcgacaccctctcactcgagagtccgcgcgcagcatgcacgcagggcaacgacggcgttcttcgacggcataggcatcatcaacctttgcccgagacggccgcaggcgctgcgatccgtcgacgatggcattggagggaggaggcgccggcacgctctcggctcgctcgggaggcgtcgtatcccaggtgggcagattccttttgagagacgcgtgtgaagagtaacatgtgctgatgcaaagactacgatgtcggcaaaaggcgaccgaccaactcggaccttgagactcgaactgtgggcccgctgcactcagaccttgggtgggtccgacccaaggtctgagtgactgaggggcggcttttggcggcatgcctcggttgagatcgagatcgcaacaagggttgctcagcacaggcttgttcgcggagatgaactgactccgagttgcaccacagtgtagtcgccgatcgcgtgacgaaatgacgaccccgacaccgctggtgagaacgttgtgccaaaaagtatccgcgggctttcggtcgctgtttcgccgaagcagtacgccaatctgacgcgcgtgataccgcactcggttgttccaagttgacgggacaagaggctcagaatacaaggcggtatgggtggcaagagtcgcgggaacgggtgggcgtgcgagcctcgaaggcaaactgctgcaccaagtctgcactgactacgtcggtacgaagagacgtgtcacgtacggtcaagaggatgagatcgaattcaggggcggcggggtattgatcgatcacacgagatcgaaagggaaccgtctcgcgctgacccggttatcgtcgtttcgaggctggcccagagccgcgaggctatcctgctggcgatgaatggctcatgcgcagtctcaagactgaacaaggagcccgcagtgctgatcgacgctcgactccggcgagcacagaagggaagccgctcggacgcggatgccgctctcgcgtgcaacatcgccacgacgcgcatcgtgatcgaactgcgaccttggtcgaagggcgactccagtcctgacgtgcgacggacaggcgaacttgctcgagctctccctcgtcgcaatggcctcctgacttaaaacggcgtgctgtcctcgtgaccgaccgtcgataagaggagcagatggcattgacggagctaacctcaagcgctcatcgctgactgcgcgagtgcgccattctttgctacgcttgctctggagcacgcgataagctcacaagctggcagcgggccgaaatcagagcttgagcgccaaagaacccgcatgcgacgctgcgaacggaacacgcgggtaatgaactgcgacttgcttcatgcgtgacagtcaccatagcgacgcttggagtgcccgcttggaggggaaaaagtcgccgcggacaccccgcgagtgggcggacgggcgaaaggacttctccctttctcgctctaacatttgcctttactgcaaacgcttgaaggagacctcgcctcgcaccaaagcttgctctaagcgctcatatcacccatttccaaccccgccggctgcctccgctctcaacctccgactctcgaggcgcacgaaccccttctcccgttgtcccctcgacgacaaccgccgaatgctgctgccgcgcacgcagctcttgcttgtgctcgcggcttccatcgtactcgcctcgttaaccgcccgcctcgccaactggacgggaacaggaaaacagcagtccttcggagtccgcggagccggcctcgtgcacggacccttgtgagtacattgagccaagttttaccgcgcggcaaaggaaactgatgcctacaatccacaacacagcgacatgggccagaagaccctcatggcgcacttgcggggcatcgcgcgcgagcagctccagacggcgcacgcgacgaccatgatggagaccgggaccggcatcaaggccacactcgggctggtcccgaggagctttggcggaagtgagttggacagctgcttactcatagccagcctcgactgaccagtggaccatcggaacagacgagtatgtcgttgtccgcgacctgaaccccgtacgattccagcttcgccaagggacgctccagtcggcgacgtgggtgagggacaagtccgccacgaacgtcgccaacaacctcgcagctgccgagcgagccaagatcgaagagatggaccgcgagatccgcgaggtcctgggcgccgagaccgtcatcatcaacattgtcgacggcgacaagaggccggaggcaaaggcagctaccctctccgaccgtcaccgtcgcttctcgcggaggcaccaccaggaatcgaagctgccctgcgggaagaagcgcgtcgagctcgaacagaccccgcccaacgactcggactggatccaccgcgctgtgagtcctttgtctggtccagtcacacacataacggagcgggagctcacgcaaactttcaaaacagggcgacgagaagacgatctactttgttgcgcccgacgaagcagatcgcctagtacagcatcttgtgacgcagtcgttcgacacaccaaagtacgacctccccgccaactctcccttcgccaacagcaacatcgatcggctcatcgacatcgtcaagcgatacccgccgtggcgtcgaattatccatacgcgcgacctcgatgcagtcatgcacacgacggcgtgcgaggcatggttcgtcctcctcacctcgtggtcaaaagtcgaggagggggcggtccttacctcggacgccacggtactcgaagacatgctcgagccgtacgttgccgagggagcgcagcggctgcattccgtccagcgcgatgtttctgctgccgctccctctgcaccaaggactggccgtggcggcgccctaggcaagaaggcgccgctgccagctcgtccaaacctccccgtgctcttgactcagctcggcgcacagtcggcattccgcccaacatccctcgacagattgccaaccgaacgacgccggggcgatacaatcgtcgtctttctccccggcgtcgacgctctcccaggcttcggcagagatcaatgtcgccgtgcgcgcgtgtcgagccttctgggaaacgactacaccggcagcggcatcaaaggcatctcttgggcgctcgtctcgagcggtctcggcgagtctttgctttcgatgagggaagaggactggtccgaccctcaaaagctcgagtcgcaggtctcttccctcgtctccctcctcgcctccaccgccgccagagccaagacgtggcgggctggaggcgactttggcgaggtcgccaagatctcgagcaagagcacgtcgatcgggcgcgagcagatcctggacctgatcgagtcggtgcgcgttattcgaggtgagaacgtcaactacgtcgcctcgacgttctaccacaacggcgatccgcgcggacccctgcagttcaagcaagctccgccgtcgactcgcccaaatcgctacgacgtcgactcccgccagccaagccatccctacctctctcgcccaggtccgcaacacgtcgtgccacaaggtctgaaccagtcgccgacgctgccgacgagcatcgtcaacccacgcctctcgaacccgctacaaccgtctcggacggtgcccgctccgggcgagaccgatccctcccgtccaaagatgtcgaagattcgtgttcggccgctgcagatgggaggaagcgggcagagcgtgttcatggctgcgcgaacgcatggtcccgagctcactcctctcgacgacaagaccatcgcgcgaatcatacaagcagacgccagccttcctgtcgaggtcaacgacgacgacgacgcggtcgactcggaactggagattgttcccgaagatgacgacgacgacgacgacgaagacgacttcacagcagtgccaaagcaaaaaggaaagctcaatcgtgtggagtcgtactttgcaacgatcacctcgccgggcaagaaccatgccgccgcgagtcgcaagatcagcgacatcacagagtcgccccgaccagtctcgaccgcttcggcttctgccaacaatgccggccgcagcggcgcacaacagaccgccacgcgtatcacgcgtctcacatcggcaagagctcctccgccagaaccgtcgaggcgcaaagatcgcgaaccagtgcccgcgccccggcagacccgactcgcggggaatcccgcgatcaccgaacaagaggcagctctcgcatcgccagacccgatgctcctcatcatgtcgctcgccgtcaagctcgggaatcgctttgtccacagtgcgtttgcgttcttgctggaactgctgctggaacagggggaggcagggatgatggcgacgagggatctgctactccagcggaaccgagcggcgcagtgcctcggtcgtcttgctgctggcggagcataccgtgcggcgggggagcagtggttcccgcggcaaacccttgttatctctgagctggagaaggtacgtccggtcatacggtcagaatcgagatggacaagagaactgactacagtctctgagcaggaggccgtcaactcggccctcgcctccggtctcgtgcctcctcctcgactctcggtcaaggcgttcacaatagcctacgctcccttccaaaccaacctgaccgaatggccgcgaacgcacacgcgagacgaactcgtcaacttgggccagttcgtcgcgcgcgacctgtccaagaacgcagcagaagcgctgagcaaagtcctgcggaaggcgcacaaggcgttctcgctcgatccggcatcggaggctgccctgcagtcggcaaacatcgaggcttccgctcgattccgcgcgggcctcgggaactggttgggcggggtgctcgcgactgctccgttcagccaggcgtcggctcacgcaggcgccgcgaacgaagaggacaagggactgccgagtcgagaaaagaccacgtcgtacaacttgcgaaagggcacgaccggcaagagcggcgacacgcttcagcaacagcacggcctcggcccgaagatcgacccgactgacccgcgcgaaccccccgctctcgacctcgggaaagagaccgaaaagtcgctcgagcagatgatcaaaaagctcgtcgactcggtcccgcctggcagcatgttcaatcgatcagatatgcatgacgcgctactgcaagacatcaccacgatcgcgcagcgccttctagcatgccgggaccggcatctcgagatggcgctggtgctgctcagatacaagaagatcgagaacgcgacgaccatggccttcgacgacgtccttgcagggaaaatgccagagatgggggccggaacgcttgccaaggggttgctagctctggtgatgagactgcgacagatgagaacgctatcggggatcgagctcataccggtgagctgactggcacggcggcgtcgagcatagtcaaagggagactgactggcttgtccttttgacagtatttcgacccgcaatgggtcgatgtagacctgtacaccctcctccagtccggccaccggcaccgcttcaaggtgctctgcacagatctcgaaagaacctgtaccaagatcgcatgcggcctcctcccgttcgtcgatgaagacgaagggagaagagtcgagctctttgacctcttcaggcgggtgttcgaagtgtggcggattgacgaggacgaccccgacaacagagacaaggactcgccttggtcctggatcgaggccgagaggacacggtcgacgagcatccgcctggtcgtcaagaaggagagcgtgtccctcgtcgccaacctcgatcgggtcctgcgcattgtgtttggcgtggaggagaccttctacacctacatgaggcggaccggagctcaagtcgaggtgatgaaccagctcttcgatcatcgaatgttgccgaacaagttcgttcccaccgggcacatgcgcatgtcctcaacaaaggtccagttcaccggagtcgacattacgaagatgaccaaacttggacgagaggcgctgccggagaagagtatggctgtctgatgccgaaaagaattgagctgcgctgactcgccctacccagatctcgacgcaggaaccgcatgggcgcacgtctcacaactaccgctcactcaactgaaggtcaaggagtactttgccaagatgatgccgtcctttcagcgtcgcgtcgtcaacggcgagatcgtgtttgtaccgatcgtcgccatcgcaaaacccgacgcagacgtgatgctctcggaacggcgcgatccattgccgcccagatccgctcctcaggaagggctctcgcgcaaagagcgacggcgcgagcggcagcggcaagacgccctggaccgagatcgctccccggtcgacctccgaacgccggtacgcgagaaggcgccaccaagtcgaacgcgaaaggggataccggtgtcttggccaaacctgcgattcgaggggggaaggaagttggtcaatgactttcttggagacaccccgctcgaccacatccactccgccagcatcgacaccggcgtcgtctgtccagtcgcgaccttcatctcgaatccggttcgggacggcttaccaacgcagcgtgccgaggcggtggcgacctattcgcgtgagactctgctcacccagcagcgtcagaccagccgccaagcttcacacctcaactcgtatctgtcgaaccagttcgactttacccgatgggcggatccagcttccacagatgttcgagcgtcgggtacgtcgccaatgccagaaccggatccgatgcaagaccctctgctggtgaccggtctgcacttgctcaagagcatgcactcggtcttcgacgggcggtcgatccagagcaaggtcgagcgcaaggccgaggtcagttcggtggcatctcagcacgtcgatctgatattgggtggcaaggatcgctggaccgaagaggaccgcaagacgcgcaaggtcgttgtcatggtcggctcagcggacgatctcgcgaaatcttccggaatgaagggtgctgtcaccgccaacgtccttgtgcgggaaatctctgccgagctcgcgcgccgcagggtcaacttcatgatctgcgttgttcccgagaactacacatcccaacggtgcccgaacccggactgcgtcgatgcgcagggtcgccgatctcggtacgtttgctctcgtgtactctgagggtgatgcagctgaccgactggtgatctttggggacagagcggagaacccgcgtcaccagggtggaggaccaaactaccgtctcctccaatgccagcgatgtagggcggtcttccaccgggacggagtcggggctgccaacattgggagtatggggtggtgcctgctgcggagtgggttgcagctgtggggggagaactggatgggaccaggaggaaaaaaacttgcggaagcgaaaaatccctaaaaaaggggggatcaatgggatctacttgtagaaccctcgctttctccgtgatcaatctgacttctatctcctgtgtgcggtaaccacaaacaggcgcttgcgcttgcgcttccacgtccgcaaagaggcgcttggcgcttctgctcccctatggccccggcctgcttgagactccgtgtgtggactcgcatggtacagatcgacgggtctgaccgttgagaatgccggacaacgcgccggcgcgtgcgacagagcgcccgaagctttggagccggatcgggattgccggatttctcccctctcaacggtggaaagggcgtctacagatgcacatgtaccccctagtctgatcaagcttgcaccccgcggttctgccgtatccaacggtctgcgacgacgctggcacaagggcctttttcggcgaaagaggcgcttctcgcaactcgccgacggttcccgcagggatgctgggtaactctgggacggttgtaaccttcaaatggactgtatctaccgttttcaacaccagaatacgttcgtgggagaggcggcgaggccgacgactgccctggccgagtcttggagcacccgccccggcctctgcacggtcgaaaatcccaaaactctccctcatacgaccaaaaatcgtcaccgagatgctatgcttgatgtacggccccgcgccgagctctccggaacagtccgggacccaattcctgactttctcgccactcagtctcagtgttccaacttctaagcgcattgtgggtctggttacttctttcatcttgttgacagcatcagaactgacatgtaccatgttgacggattccgtcgtatcttcagaccgagctggcaaacatgattctgagccaggaaaagccggtgagttcagtgtgatgaagccatggcttgtcctgaacagttctctttgtgaatgcattcttctgaaatttgctgcttacagagaaatgactcggccgagggccggcaagcggtgagctcgagacttccaagccgaagaagcgcctgagccctctgctcaacactctgcagagccgagcaagggcagcggaccgcatgcgataccgagagcagcattgggagttctgaatgcgagaggtttgagagcccctcaaaggttgtctgaggaggagggaagaggaagagggagaggtggcaaagccggcttgctcctttttgatacgcgagcgaggtgcagcgaccgcggtgtctcttactcttgcgacactgcccacgggccgcttttcgagaaaggtgttccggcggcggccggccttaacaaaaccaaatccaggacgcgcgagaacgctcaagtcgagacaaggagacgctctcatgcgcgagggcactgaccttgacgggatcccagccctttgaatgcgctacaaagagtgtgtttcccagtgtccagccaagcaaacccgcggctgcagctgcgaggtgcgcaagttcaggagaaggtgcgcaagttcaggagattccaagacgtgacctcccgttgttcactcgttcgcacgcgtccaccaggttattgtatctgcaattttagctcgacggagcgaagccctgctcatgtatttgactatggagcatttgactgtgctgcattgcccacattcttgcagacacgggcaagtcagagaagaagaaaccgagcgcgagttgcgccacccgcaaataccctccggactgaaccgctgaagggccgacgacctgtccctgaccagtagaagtgtcgggatcccttgacttacgaccagcaggtcttgcatgtcgcccagaatcgtcaaaactgattcctcctggttgcgctcaaaagccggatggtcaggccgtgtagacccaaatcgcctgaaacttcgcaccctgggcccctataggtcaaagtccagccggccacaagctcagcccatttcaacggcggtagaggtctgccgagcgaggcgcttgtgggaaattggactagagctgtaagccttgtcgtgcagcatatcgacaatctgaacggtcaaaataatcgtgaaggtgtttgaagctgttcaggcgaaaaagatatccatagagcgcatgcttgctgagatcaggcaagcgcctcttagttgtaattaccgtcgtgcgtgccagttccgacccagcctggctcaccagctcgagatacatgctggatcgctgacccttgtgctccgcccccctccagaatcttcttcttcggtatgtctgcagcggagtctgaagtcctcgacgcgaagttgccaagtcccccaagatgaaaattaacgttcttttgttcgtgcaggatatgatcaaggaatgatgggcggcgtcaacggcgctcttgactacgtgaccacgatgggactgggatacgtcacgccgggcgtagatggggccaagccgaccgccaccgtcacgcagtcgacgaagcaggtgagtcgtcggcaacgcatctatcttgtttttgtcccgccggccacgatacctttactgaactgctgtttgcatacagggaggaatcgtctcggcctactgtacgtcccgatcgtgtctccttcccgttttcaacctgacaccggtttctctccagacctcggaactcttttgggatgcttgctcggcgggtggctcggcgataggctcggtcgcaagaagaccatctggattgggtgcatttggatcactatcggagctcccttgcaggtgagtcggagttcactcttgccaccgttccgaaagccgcgatttcactttcgccaccgttccgaaatgaactcccgccaccgctccggaagctggcgctgacctccctctctctccgacaggcagctgcacagaacgtcccctggatggtcatggcgcggatcatcaccggagtcggcacgggccacctcaacgcgatcgtcccagtctggtccgccgaaacttccggtcatctctctcgcgggttcttcattgcgcttgaattcacgctcaacatattcggcgtggtcggtctatggttattcattcgtcttctgacccgcgtcctcgtggctgacgaagttgattcaccgccgccccaggttgtcgcatactggctcggttcgtttctcccgcgtctattgccgaaggagacggcgctgagtgaacgcgtcatacagagtatggactgtccttcatcggcgacgggaacacccagatccgctggcggttcccaatcgcgttccagctcgtgtaagtttcgcttacccgaccgtcgcagcagatcagacatactgatgtacgccggctctatagacctcttctcggcctcgcaatctgcaccttcttcatgcccggtacgcatttcgcctttttccggagcggacttcctcgctgactctcccgacaattgcagaatcgcctcgatggctcctcaaggcagggtatcgcgacgaggcgctgcatgtcctcactcgcttgcgctccgaagacggtcagatcaacgcggaagcccaggccgaatttgacgagatcgaccgagcgattcaaatcgacggtgcggcagaacccggctacatcgacatgacattccgctcgcacggcaagctgcatctgtcacgaagggtacgtcagattggcaaacagcgatgaaagctccgactgaccgaatcgctgttaccaacagactcagctcgcgatgtgagatcaatttgtctcctgctttccgttcctcgcgctgaccttttctctcgttctcagctggatccagatccttcaagagtggggcggtatcgccgctatcacgggtgagttccttatcgggctggtcggacgagaaaagcgcctgacgattcttttcccttcagtctaccaaccggtcatcttcggtctcgccggcttcgacgcttcgaaggcaggctgggtatcgggagtcaacacgatcacctacatgttttctacgtgagtattcaccttctccttgccacttggcgagacgtggtcgctgcaactgagtcgattttcttttgcagtcttatctgcgtcttcactctcgaccgtatcggtcgccgtgtcacgctcttctggggtacgttccacttggtcttttctttcttcggcttgctcttgaagcgatcactgacgaaacatgaccatgcgcaggcggcgcggttcaggctttcgcgctcatcatggcgggcgtcttcgtccaccttctcaccgttcaccccgaaaagacggctcagtacggaggtgctgctaccgctatggtgttccttgtgcgtcaagaaatgttgtctcactgtcacagactcggaatttgctgaccgggtctttcttttccagtacaccgcaactttcggcgcaacttgtgagaagtctcgccgcttcttctttgagcgaaatgaacctgacctttgtttcactacttcttaccgaaagggctcaccgtaccctggatctaccccgtgagtggcgatgccttccgccaagcgtagtcttcacattgctgacgccactcgtcttcaggccgaaatctggcccgtcaacgcacgagcgaaaggaaacgctatgggagtcgtcggatggtcgatcggtaacggatggtgcaccctcctggtccccgtcatgttcgacaagattaaggaggtcagtcccggtttttttgccgtccgtcgtcttcgctctgcctcaggtatgctgactgcctgcggtctacagaatgccctctacatcttcggcattgctaatattctcgctatcgctgtcgtgtgggcattctaccccgagaccgcgaaccgcactctcgaaggtgcgctcgtccgttcctcttccaaacgctcgcaaccccttctgactttcgagccttgccgtcttcacacagagatcgacttccttttcttcagcgacagctggttcgtgtggcacgccgaggcagagtactcgcgcctcaagaaggaactcgaggtcaccggcgaggtcccggacgatctcaagacgtcgacccacctcaaggagaagatcagcctcgacagcgccgcggcttgaacacaagagcactttccgtcggttctctagactcgtgtatatataaattctttgcctcgatcttcgcaatgtaccttcttgatgggagttcggtcctttcggtccttgatcctcttccaccttagacacattgttaccatgaggcgtctctccacgtcggaagtacggcacgctgccaacagtgcgggcgatgcgagataattgaatgggtcgcagagcaacttatgaagtctacgagatgtcaacattgacgcgattgacattcgggcgactccccgcttggcctcttcgctctcacccggcacgccaccgccacagtcctggggcctgcaagggggtcaacgtccttgcgttgcttgattgagaccggctggacgtgaaacggacgcgctctcaagcggcgccaccggcgacaagagatccgtgctggacgaggaccgtgtcgtcaaacctcgagcggtcgtgacaagatgcctgtggtcaccaacccgatcacacccacgctgagcgtctctgaactacgggcgctcgcgaaccggcacgcgctgccgcccatcgtggattctcaactcgccaagacggtgacgctgcgcacgacccgcccgcttcgcgcaggcaagacgcgccagtacagtctacccgaaatcgactttcaactcttggaggccttgggagacggcttactcgaggcgagcatatgccgagtcttgtacacgaacgtcacgagtcgggctgaccgttccgcagtgctgttctccgtgagttgggtttgcgtggtctttactgccgttcagggggtcgcgtggcttgttagggtatgctccccatgcaggcttatcggagtgtactccgcaacaatgggctactcgcccagctctcgcacggctaccgccttcatctgacgatgtcgccgcctctcgaccccgcgggcacggcagcaggcgcgccgttctcggtcagcgtgaccaagattctcgccgactcgttcgaagcatacatcggagggttgacgcaggcatcgggcgagcaagtcgcgaggtcgtggctcgaaccactcttgatcgacctgatgggtctgatctatccggccgtggaaggaccggatgcggtttcccgcggtgagtgtcaaagatgcgctggcgttcccgcgctgcagagctgaagaccctttcctttttacaggccagcgtacgccccgtaccgaaccgaacgccacgcctcgcaccgaacccgtcgccgccgaacccgtcgcccagcgacctccgaagcgtccgcgcgacgacgcatagcaaacatggcagtgtcgctcttctcttttgcttgcttgactagcttgacttcgagcctgtgtgaattcgattcgaacagcaattctgcggcgagcttgcaccaagtcaccagagatccagaacgaaagagagactggctacgagagctgtcttcgttcagtggcttttggggtgccaagagtatagtagggcgtagaagaagctgaaaagagggaccgagaaagaacacgatgacaactctgtccatttcgctacacacgtctgcaaacccgttctacatgctcgtgtccacccggcaaagctcagtcgcgaccagcgcacacctcgccacgggaaaagatcccgagattgtctatatgatatccttgaaaaccggctcgaaacacttgtgtccttcagtggaagggcacgttgcgaatgcgaccgcccgagccaaattgccggtgcggcagcgcgacttcaaggtcgcgacgaacgcggcgagtcaggcgcttcgagtcggccttggcgagcgagcaacccttgaccggtccggggcagacggcgtcgatcgagcccgacttggtgacggcgttggtgacgcactgctggacctgcgagatgcacgagacgtacgcggcgccgtacgaagtctggttgttgaagaacgactcgagcgacgagttgagttcggcttgcgtgaggttgtgcgcgttcgcggtcgagttgagcagagtggacgagtagtcgacgaggtcggcgaagaaggacgaggggaggtagccgtcgtactgctgtgcgatcgagaggatcgtcgtctgcgtgacgacgggagcggcggactgggtgatacattcctgagcggcggtggcgttgccggctgtcgagaaggtcgacttgggtcagctcattggatctcgaaagaagggcagaaggtcatcgagacgcactggatatgagttccgcagcgcacgactgcaagatctcggcggcggtgaccgtgttgcccgagagcgacgacgcgaccgagttgatcgcgttcgagatctgggcgccgacctgcgcgccgagctgagcgctcggggtcgtcgcgttctggatgttgtacgagaggatgttttcgacgctggtggtcaaggaagcgggcaagacgccgacaaactgctcgaggacgccgttcatggccgtctggagcgtcgtgtaggctccgccgggcttggtgaagcacgcgagcgaggaggtgttgccggcctgctggatcgcgtccgtgtagcactgcgagacctgctcgagagccgtgaccgagttgccggacagcgaagcgatgaccgactggatcgaagactggatctgagtgacgagggcctgctccgacgctggcaagagagtgccgagcaagggcgtaacggcgtcaaagacggacgagaggatcgtgttcggaaggatgccgacgaactgtgtgcgttcaagtcagtacgagcgcggaaaggcggacgcgcacgcgatgaaagctcacctgctcgaggatcgtgttgagcgtcgcctggagaccagccgagtcgctgccggtcggagtcaagcacgagtatccggagggcatgccgcccgccgcgagaacctccgagagacacttttcgagcgcggccgtcgtggtggcgttcaggtcgctctggctcagattcgcggcggcaaaagcctcgtcgagagcctgcttgatgttgagcgaggcagtgacggcgtccgaagttgtgatcagagtcgaagtcgagacttggagctcggtgatgttgcgagtgacggtgatgtaaaccggagccggagtcggagcgaggagagccgagatggtgccgttggcggcgaccgctgtaccgttcacggatgcggtgctgttggcgacggcactggcggtggcggtagcagtgatgttgttggccaagatggtcgttacggcaggcttggtgtgggtgactggagggagcgattcgggatcagcaatcgcgcgagaaagaagacgcgaagaaaatcgggaccaactcaccggtgatggtagtcgcgctaggcttgccgacttgcttctggatgacgctcgagatggctgtatcccccgaaacgcgagtcagtaaaggtggaagacagcaaggatttccgcgaaactcaccgccggaaagggcgcccgcgactgccggcgggatgtacgagctgttggcgaacgatccgacggcttcggcggcacccttggcgacagtctgcggcgaagcgccccggaccttgggcgccggcttcgacttgatcttggacgcgttcttggtccacgacttggacgagccggacgagggagacttgggcttggaggcggtctgatccgacttgttgacgacgggtgcggcgttattagagttgtcttgcgaggaggaggaggacgacgagcccgacgacttggacgacgacgacgacgacgacgacttgtgggaagcctgcttcttcttgctcgacgatgacgactttttcggcgacgggttgacgagcttctgaacctcgggtacggtgtactcgcccggcttgtggatcacgcccgggtgatcggagcaaggttcgggcgaggcggcgaccaagagcgcgagtgacgagagggcgagcgaggtgaggctgaaggaacgcatgacggagtcgagttggtcttggccggtgtgtgtgagggggtggtagtacgagggagtgtgcgacgcgtcgggtgaaaggggacagggaaagaaagtgtgaaggtccgcgggacgaagcgagcgtaaatttaaaggaacgagtggaaggtccgcgggcgaagtgcgcggtgggggtccgagagccgctttgtgacgagagtgcaggaaaggaggagatggagaaggagagaaagcgagaaagagagaagggcgcaagacgcgaagaaagtcgcgtcgcgtcgtaaaagcgcgccgccgaaagattcacgtgcgcgtcgagatgatcggatcggcggccgacccgcatgcattatggccatcgcaactgtatgtattgcgaggctgcaaagcacacagagttgtacagaggccgagcgagcatcccgtccaacaaactcgggtcggttccagcaaatcgctcggagcgactcggaaggcgaggtaccagcgtagcctcagccacaggggacagcggactccgacgaagcctatcaggtcgtacgatgaagcatagtcggccggtcgctgagagttagagcggcggtctatgtgctgttccagggatggccttggatgacgtcggcggttgagctgcctggtctggcgaggacggcgggccgcgtgctatggcgaggagaggcatggtacgaataactggccgatgtgtccccgcagcaggcagtctagccggttgagtgatccggagcaaagtccaacaaagtcgaggagagaaaaagagaagcgtcgctgctcccgac

SEQ ID NO: 52 - DNA, 21152 bp, unidentified
  source 1..21152: mol_type = other DNA
  misc_feature 1..21152: note = Fanzor polypeptide
ccggcgcgtcatcctcgcctccgacatctaccgcgggatactccttcagccggtctttcaggacaaccccatccctgatggcctcacccacgccaacgtcatggaccggtggagcgaggccggcggcatgttcgccgtctcactcttcaccgacattgccgtctttcgcctccttggaccttccctaatgttgtagactagtagaccttatttgttgtttgttgttagtcttattctcccccagacagactcgtcagctcgtgttacagagacgagtcagcagaagaggagagcaggcattggggacctttacacaccgcgtgtaaaaaaaatcccgcgaagtctgcaaacgggcttttctgtacggtcgcggggcccatctctgccctatactacgtatacacttatcgctacaacatacgcgactgctgcaactgtgtgccgtacccctcaacttcaccggacttgccattcggctgtgaaaattcctgagatgcagagggcactcgtctcaagcggatgcgagacgaggctactctgctgacagggagatgaccgtagagagacactcaacaataacactgaatcgagcgtagattgcgagatgtgagcggtgaagaagaaaagagaggggagcccgagggcgagctacgacaaagtgcgcccgagatcctcctccaacctccacttgccgcctcatccgaataacgtgtcgtcgtcttgatcttgagcccgagagtatggtagtagtctagggggagagatcaagtcagcgagggttcgaatgaaaaagcgagcgagtgaaaaggacttagatctggaaaaggccttgaaggagcgagagcgagacgagtctgcagaacgagtcctagcatgagacttaatggacgtagcgagagcgccacgcgttatatgactccgcctttagcaatcgccccactcccgacgttcagaccattctaaagacaggcaccctctgtgtcgcttgtacttacgaggcgctgtacggccgccgccaccttcttgtcaataactgcagtcggccttgcgcctgagaaggtcccgttctaacctctgcacacggccctacacactgtattcgggtaagataagagctggaccagaatcaagcgggttcaatccgctatatctgtccaatttttccgcagatttgcgttccgaaagacacagaacctccgtctcctttgaatcggcgagcggaatcgccttgttccgtcggaagcatgtcccatatggccgctttctgcttcattctgctctcaaaaggtaatgccaagtgactgaatgccgtagtcagtggcacgaatccctcacgagtcctccggcaagtattctgtctcgaagacgattttcggtgggtggcggagtggcggcacccaccaaaagcgctcgattgcttttagcgtgtcaatacggagcccataggagtcggcgttgtagtggtatgccgctacagctggtagctccagatatcacccgttatgcagctccatgtcccactctatcgtatatgcgttgaccgccttgattgcacgcatttgtgtctcatttgcgtatatagctcaatttgcacagaacacttgcaatacgtgagtaacgtagcggttaaagtgttagcgttcggttcggtatacactttttgtcagccgagcgttcgcttcccggtgagagcatagagacaacggttctgcgttcagacggccatacttatcgcacctcctctcagacgctacaggctgctcagacaccgtccagatgacccaagtaagccaggccgttcagacgctgtccagactgatgaatccctttggcacggttgctgatcgggccgctggcgccttggaaggccgctcatccaaggagatcttcatcgagcactaccactcaatgctaggacatcagtccgatcgaatcctgcgacactacatgcgtcagcattactggtggccagaaatggtgaaggaaatcgaggcttactgccgaacttgcgcatcctgccaagctagcaaacccgaacgagccgcaccgagaggaaagctacaccctatccagctcccgttcacagcatacgaagagatttcgattgatttcaccggaccgcaccctgtcagcattgatgcggacggaatcgcgagattacattttcaccgtgattgacgccgcctccggagaagtcaagctcattccgtgcatgaaggccggtttgacgagcgcaaaatgcgcccaaatcttcctcgagaaagtgtacccgcaatggggtactccgaagacgatcctgtcggaccaagacgtccgctgggtttccgcgttctggaaagcgttccacaacgctctcggaacgacgctgcacgtgtcaaccggagcggccccttgtcgagttggccgccgctccgattggccaactcggccgctccggccatctcgacaggggatccggagcttgtcccggcggccgctgcgatggctcgattccatgcagctgatttgttctaccgagcgcatgcgagagatttacagtcgaccaccctatactaccgtgatcttgtggcgcgcaaggggcgcggtgctgcgcgccgaaatctgtatggtattctcaaactcaaatgatccggatcggctggcgcggctgcaagaggcctccacttgattggttgcctcgagaacttgaagtagtcgctagatacggttgacttagccgtttaaatacaagctatagtctcgcaaatagcgatagggaggagaatagctaaggacagctagtgtcggtagaattcgcccgagggagaagaaggaagacaaaagtcacgacgagaactacgctcagagtgcggagaccgcgggtacatgtggggggaccgggacaggtacatagtcacgatggagatcacagaaaggccgtgcttgtcgatccagattcgagaggcgagagagggcaggaagtcggaggagcgaaggatgatcgcttcgctcagaggtgtgacttggcgaggtgactcagagagcgaccctttttagcggtcgcggcggcggtgcctttgcaggtacgcttgcggcgaaccgagatcttcgcggaggtcgtttcggccgtatagcgcgggagcgaggcgttcgcgagacgaggggatcgacggagcttttggggcgacgacgccacggcgaccactcccggcatgatcggctgttcggcgcgtggggtgtcatgacgaggggtaacgggagcttgatcgacctccggcgtcggtccggcgaagtgagcggcaggggcgaagagttcgggagattgagcgcgttcgtccgcgtcgctcgagctcgtcatcgacggcgtggggccatcgaagagacccaatcccgcagcgttgatcaccaccttgaggtacgcgtcatcgagactccgaatggcgggttgtccgggttgagcgggagcgtgaagggccaagtcgagatccggcacgaaaggttgaggatggtgttccccgctcgagctcgcgagcgcgttccttccgtagaggtccgcggtgccaaagccagggctatcgaggctgccttcgcgaggagagaattccgggctagtgacgggcgagtgcgtaggccgaaaaccaggcgaaggaggggacttgcgtccctcgtcggcccagcggacgaagtggcgggctgacgtggcaggaggaggcggcgcagccgactcttgcgagggcgcggctctcgcagcagcgctcgatctcgctcgcggcagcggcccttcgcctcgtgctacacatcgacaccgacgactgtgcaccccagggcacccgcccgatctctcgagtacgcccgactccgcttttgaggactcgacggcaggacctttgtcgacaacaatgcaagttggaggccctctccgctcggtcgcatgggcagcgacaccctctcactcgagagtccgcgcgcagcatgcacgcagggcaacgacggcgttcttcgacggcataggcatcatcaacctttgcccgagacggccgcaggcgctgcgatccgtcgacgatggcattggagggaggaggcgccggcacgctctcggctcgctcgggaggcgtcgtatcccaggtgggcagattccttttgagagacgcgtgtgaagagtaacatgtgctgatgcaaagactacgatgtcggcaaaaggcgaccgaccaactcggaccttgagactcgaactgtgggcccgctgcactcagaccttgggtgggtccgacccaaggtctgagtgactgaggggcggcttttggcggcatgcctcggttgagatcgagatcgcaacaagggttgctcagcacaggcttgttcgcggagatgaactgactccgagttgcaccacagtgtagtcgccgatcgcgtgacgaaatgacgaccccgacaccgctggtgagaacgttgtgccaaaaagtatccgcgggctttcggtcgctgtttcgccgaagcagtacgccaatctgacgcgcgtgataccgcactcggttgttccaagttgacgggacaagaggctcagaatacaaggcggtatgggtggcaagagtcgcgggaacgggtgggcgtgcgagcctcgaaggcaaactgctgcaccaagtctgcactgactacgtcggtacgaagagacgtgtcacgtacggtcaagaggatgagatcgaattcaggggcggcggggtattgatcgatcacacgagatcgaaagggaaccgtctcgcgctgacccggttatcgtcgtttcgaggctggcccagagccgcgaggctatcctgctggcgatgaatggctcatgcgcagtctcaagactgaacaaggagcccgcagtgctgatcgacgctcgactccggcgagcacagaagggaagccgctcggacgcggatgccgctctcgcgtgcaacatcgccacgacgcgcatcgtgatcgaactgcgaccttggtcgaagggcgactccagtcctgacgtgcgacggacaggcgaacttgctcgagctctccctcgtcgcaatggcctcctgacttaaaacggcgtgctgtcctcgtgaccgaccgtcgataagaggagcagatggcattgacggagctaacctcaagcgctcatcgctgactgcgcgagtgcgccattctttgctacgcttgctctggagcacgcgataagctcacaagctggcagcgggccgaaatcagagcttgagcgccaaagaacccgcatgcgacgctgcgaacggaacacgcgggtaatgaactgcgacttgcttcatgcgtgacagtcaccatagcgacgcttggagtgcccgcttggaggggaaaaagtcgccgcggacaccccgcgagtgggcggacgggcgaaaggacttctccctttctcgctctaacatttgcctttactgcaaacgcttgaaggagacctcgcctcgcaccaaagcttgctctaagcgctcatatcacccatttccaaccccgccggctgcctccgctctcaacctccgactctcgaggcgcacgaaccccttctcccgttgtcccctcgacgacaaccgccgaatgctgctgccgcgcacgcagctcttgcttgcgctcgcggcttccatcgtactcgcctcgttaaccgcccgcctcgccaactggacgggaacaggaaaacagcagtccttcggagtccgcggagccggcctcgtgcacggacccttgtgagtacattgagccaagttttaccgcgcggcaaaggaaactgatgcctacaatccacaacacagcgacatgggccagaagaccctcatggcgcacttgcggggcatcgcgcgcgagcagctccagacggcgcacgcgacgaccatgatggagaccgggaccggcatcaaggccacactcgggctggtcccgaggagctttggcggaagtgagttggacagctgcttactcatagccagcctcgactgaccagtggaccatcggaacagacgagtatgtcgttgtccgcgacctgaaccccgtacgattccagcttcgccaagggacgctccagtcggcgacgtgggtgagggacaagtccgccacgaacgtcgccaacaacctcgcagctgccgagcgagccaagatcgaagagatggaccgcgagatccgcgaggtcctgggcgccgagaccgtcatcatcaacattgtcgacggcgacaagaggccggaggcaaaggcagctaccctctccgaccgtcaccgtcgcttctcgcggaggcaccaccaggaatcgaagctgccctgcgggaagaagcgcgtcgagctcgaacagaccccgcccaacgactcggactggatccaccgcgctgtgagtcctttgtctggtccagtcacacacataacggagcgggagctcacgcaaactttcaaaacagggcgacgagaagacgatctactttgttgcgcccgacgaagcagatcgcctagtacagcatcttgtgacgcagtcgttcgacacaccaaagtacgacctccccgccaactctcccttcgccaacagcaacatcgatcggctcatcgacatcgtcaagcgatacccgccgtggcgtcgaattatccatacgcgcgacctcgatgcagtcatgcacacgacggcgtgcgaggcatggttcgtcctcctcacctcgtggtcaaaagtcgaggagggggcggtccttacctcggacgccacggtactcgaagacatgctcgagccgtacgttgccgagggagcgcagcggctgcattccgtccagcgcgatgtttctgctgccgctccctctgcaccaaggactggccgtggcggcgccctaggcaagaaggcgccgctgccagctcgtccaaacctccccgtgctcttgactcagctcggcgcacagtcggcattccgcccaacatccctcgacagattgccaaccgaacgacgccggggcgatacaatcgtcgtctttctccccggcgtcgacgctctcccaggcttcggcagagatcaatgtcgccgtgcgcgcgtgtcgagccttctgggaaacgactacaccggcagcggcatcaaaggcatctcttgggcgctcgtctcgagcggtctcggcgagtctttgctttcgatgagggaagaggactggtccgaccctcaaaagctcgagtcgcaggtctcttccctcgtctccctcctcgcctccaccgccgccagagccaagacgtggcgggctggaggcgactttggcgaggtcgccaagatctcgagcaagagcacgtcgatcgggcgcgagcagatcctggacctgatcgagtcggtgcgcgttattcgaggtgagaacgtcaactacgtcgcctcgacgttctaccacaacggcgatccgcgcggacccctgcagttcaagcaagctccgccgtcgactcgcccaaatcgctacgacgtcgactcccgccagccaagccatccctacctctctcgcccaggtccgcaacacgtcgtgccacaaggtctgaaccagtcgccgacgctgccgacgagcatcgtcaacccacgcctctcgaacccgctacaaccgtctcggacggtgcccgctccgggcgagaccgatccctcccgtccaaagatgtcgaagattcgtgttcggccgctgcagatgggaggaagcgggcagagcgtgttcatggctgcgcgaacgcatggtcccgagctcactcctctcgacgacaagaccatcgcgcgaatcatacaagcagacgccagccttcctgtcgaggtcaacgacgacgacgacgcggtcgactcggaactggagattgttcccgaagatgacgacgacgacgacgacgaagacgacttcacagcagtgccaaagcaaaaaggaaagctcaatcgtgtggagtcgtactttgcaacgatcacctcgccgggcaagaaccatgccgccgcgagtcgcaagatcagcgacatcacagagtcgccccgaccagtctcgaccgcttcggcttctgccaacaatgccggccgcagcggcgcacaacagaccgccacgcgtatcacgcgtctcacatcggcaagagctcctccgccagaaccgtcgaggcgcaaagatcgcgaaccagtgcccgcgccccggcagacccgactcgcggggaatcccgcgatcaccgaacaagaggcagctctcgcatcgccagacccgatgctcctcatcatgtcgctcgccgtcaagctcgggaatcgctttgtccacagtgcgtttgcgttcttgctggaactgctgctggaacagggggaggcagggatgatggcgacgagggatctgctactccagcggaaccgagcggcgcagtgcctcggtcgtcttgctgctggcggagcataccgtgcggcgggggagcagtggttcccgcggcaaacccttgttatctctgagctggagaaggtacgtccggtcatacggtcagaatcgagatggacaagagaactgactacagtctctgagcaggaggccgtcaactcggccctcgcctccggtctcgtgcctcctcctcgactctcggtcaaggcgttcacaatagcctacgctcccttccaaaccaacctgaccgaatggccgcgaacgcacacgcgagacgaactcgtcaacttgggccagttcgtcgcgcgcgacctgtccaagaacgcagcagaagcgctgagcaaagtcctgcggaaggcgcacaaggcgttctcgctcgatccggcatcggaggctgccctgcagtcggcaaacatcgaggcttccgctcgattccgcgcgggcctcgggaactggttgggcggggtgctcgcgactgctccgttcagccaggcgtcggctcacgcaggcgccgcgaacgaagaggacaagggactgccgagtcgagaaaagaccacgtcgtacaacttgcgaaagggcacgaccggcaagagcggcgacacgcttcagcaacagcacggcctcggcccgaagatcgacccgactgacccgcgcgaaccccccgctctcgacctcgggaaagagaccgaaaagtcgctcgagcagatgatcaaaaagctcgtcgactcggtcccgcctggcagcatgttcaatcgatcagatatgcatgacgcgctactgcaagacatcaccacgatcgcgcagcgccttctagcatgccgggaccggcatctcgagatggcgctggtgctgctcagatacaagaagatcgagaacgcgacgaccatggccttcgacgacgtccttgcagggaaaatgccagagatgggggccggaacgcttgccaaggggttgctagctctggtgatgagactgcgacagatgagaacgctatcggggatcgagctcataccggtgagctgactggcacggcggcgtcgagcatagtcaaagggagactgactggcttgtccttttgacagtatttcgacccgcaatgggtcgatgtagacctgtacaccctcctccagtccggccaccggcaccgcttcaaggtgctctgcacagatctcgaaagaacctgtaccaagatcgcatgcggcctcctcccgttcgtcgatgaagacgaagggagaagagtcgagctctttgacctcttcaggcgggtgttcgaagtgtggcggattgacgaggacgaccccgacaacagagacaaggactcgccttggtcctggatcgaggccgagaggacacggtcgacgagcatccgcctggtcgtcaagaaggagagcgtgtccctcgtcgccaacctcgatcgggtcctgcgcattgtgtttggcgtggaggagaccttctacacctacatgaggcggaccggagctcaagtcgaggtgatgaaccagctcttcgatcatcgaatgttgccgaacaagttcgttcccaccgggcacatgcgcatgtcctcaacaaaggtccagttcaccggagtcgacattacgaagatgaccaaacttggacgagaggcgctgccggagaagagtatggctgtctgatgccgaaaagaattgagctgcgctgactcgccctacccagatctcgacgcaggaaccgcatgggcgcacgtctcacaactaccgctcactcaactgaaggtcaaggagtactttgccaagatgatgccgtcctttcagcgtcgcgtcgtcaacggcgagatcgtgtttgtaccgatcgtcgccatcgcaaaacccgacgcagacgtgatgctctcggaacggcgcgatccattgccgcccagatccgctcctcaggaagggctctcgcgcaaagagcgacggcgcgagcggcagcggcaagacgccctggaccgagatcgctccccggtcgacctccgaacgccggtacgcgagaaggcgccaccaagtcgaacgcgaaaggggataccggtgtcttggccaaacctgcgattcgaggggggaaggaagttggtcaatgactttcttggagacaccccgctcgaccacatccactccgccagcatcgacaccggcgtcgtctgtccagtcgcgaccttcatctcgaatccggttcgggacggcttaccaacgcagcgtgccgaggcggtggcgacctattcgcgtgagactctgctcacccagcagcgtcagaccagccgccaagcttcacacctcaactcgtatctgtcgaaccagttcgactttacccgatgggcggatccagcttccacagatgttcgagcgtcgggtacgtcgccaatgccagaaccggatccgatgcaagaccctctgctggtgaccggtctgcacttgctcaagagcatgcactcggtcttcgacgggcggtcgatccagagcaaggtcgagcgcaaggccgaggtcagttcggtggcatctcagcacgtcgatctgatattgggtggcaaggatcgctggaccgaagaggaccgcaagacgcgcaaggtcgttgtcatggtcggctcagcggacgatctcgcgaaatcttccggaatgaagggtgctgtcaccgccaacgtccttgtgcgggaaatctctgccgagctcgcgcgccgcagggtcaacttcatgatctgcgttgttcccgagaactacacatcccaacggtgcccgaacccggactgcgtcgatgcgcagggtcgccgatctcggtacgtttgctctcgtgtactctgagggtgatgcagctgaccgactggtgatctttggggacagagcggagaacccgcgtcaccagggtggaggaccaaactaccgtctcctccaatgccagcgatgtagggcggtcttccaccgggacagagtcggggctgccaacattgggagtatggggtggtgcctgctgcggagtgggttgcagctgtggggggagaactggatgggaccaggaggaaaaaaacttgcggaagcgaaaaatccctaaaaaaggggggatcaatgggatctacttgtagaaccctcgctttctccgtgatcaatctgacttctatctcctgtgtgcggtaaccacaaacaggcgcttgcgcttgcgcttccacgtccgcaaagaggcgcttggcgcttctgctcccctatggccccggcctgcttgagactccgtgtgtggactcgcatggtacagatcgacgggtctgaccgttgagaatgccggacaacgcgccggcgcgtgcgacagagcgcccgaagctttggagccggatcgggattgccggatttctcccctctcaacggtggaaagggcgtctacagatgcacatgtaccccctagtctgatcaagcttgcaccccgcggttctgccgtatccaacggtctgcgacgacgctggcacaagggcctttttcggcgaaagaggcgcttctcgcaactcgccgacggttcccgcagggatgctgggtaactctgggacggttgtaaccttcaaatggactgtatctaccgttttcaacaccagaatacgttcgtgggagaggcggcgaggccgacgactgccctggccgagtcttggagcacccgccccggcctctgcacggtcgaaaatcccaaaactctccctcatacgaccaaaaatcgtcaccgagatgctatgcttgatgtacggccccgcgccgagctctccggaacagtccgggacccaattcctgactttctcgccactcagtctcagtgttccaacttctaagcgcattgtgggtctggttacttctttcatcttgttgacagcatcagaactgacatgtaccatgttgacggattccgtcgtatcttcagaccgagctggcaaacatgattctgagccaggaaaagccggtgagttcagtgtgatgaagccatggcttgtcctgaacagttctctttgtgaatgcattcttctgaaatttgctgcttacagagaaatgactcggccgagggccggcaagcggtgagctcgagacttccaagccgaagaagcgcctgagccctctgctcaacactctgcagagccgagcaagggcagcggaccgcatgcgataccgagagcagcattgggagttctgaatgcgagaggtttgagagcccctcaaaggttgtctgaggaggagggaagaggaagagggagaggtggcaaagccggcttgctcctttttgatacgcgagcgaggtgcagcgaccgcggtgtctcttactcttgcgacactgcccacgggccgcttttcgagaaaggtgttccggcggcggccggccttaacaaaaccaaatccaggacgcgcgagaacgctcaagtcgagacaaggagacgctctcatgcgcgagggcactgaccttgacgggatcccagccctttgaatgcgctacaaagagtgtgtttcccagtgtccagccaagcaaacccgcggctgcagctgcgaggtgcgcaagttcaggagaaggtgcgcaagttcaggagattccaagacgtgacctcccgttgttcactcgttcgcacgcgtccaccaggttattgtatctgcaattttagctcgacggagcgaagccctgctcatgtatttgactatggagcatttgactgtgctgcattgcccacattcttgcagacacgggcaagtcagagaagaagaaaccgagcgcgagttgcgccacccgcaaataccctccggactgaaccgctgaagggccgacgacctgtccctgaccagtagaagtgtcgggatcccttgacttacgaccagcaggtcttgcatgtcgcccagaatcgtcaaaactgattcctcctggttgcgctcaaaagccggatggtcaggccgtgtagacccaaatcgcctgaaacttcgcaccctgggcccctataggtcaaagtccagccggccacaagctcagcccatttcaacggcggtagaggtctgccgagcgaggcgcttgtgggaaattggactagagctgtaagccttgtcgtgcagcatatcgacaatctgaacggtcaaaataatcgtgaaggtgtttgaagctgttcaggcgaaaaagatatccatagagcgcatgcttgctgagatcaggcaagcgcctcttagttgtaattaccgtcgtgcgtgccagttccgacccagcctggctcaccagctcgagatacatgctggatcgctgacccttgtgctccgcccccctccagaatcttcttcttcggtatgtctgcagcggagtctgaagtcctcgacgcgaagttgccaagtcccccaagatgaaaattaacgttcttttgttcgtgcaggatatgatcaaggaatgatgggcggcgtcaacggcgctcttgactacgtgaccacgatgggactgggatacgtcacgccgggcgtagatggggccaagccgaccgccaccgtcacgcagtcgacgaagcaggtgagtcgtcggcaacgcatctatcttgtttttgtcccgccggccacgatacctttactgaactgctgtttgcatacagggaggaatcgtctcggcctactgtacgtcccgatcgtgtctccttcccgttttcaacctgacaccggtttctctccagacctcggaactcttttgggatgcttgctcggcgggtggctcggcgataggctcggtcgcaagaagaccatctggattgggtgcatttggatcactatcggagctcccttgcaggtgagtcggagttcactcttgccaccgttccgaaagccgcgatttcactttcgccaccgttccgaaatgaactcccgccaccgctccggaagctggcgctgacctccctctctctccgacaggcagctgcacagaacgtcccctggatggtcatggcgcggatcatcaccggagtcggcacgggccacctcaacgcgatcgtcccagtctggtccgccgaaacttccggtcatctctctcgcgggttcttcattgcgcttgaattcacgctcaacatattcggcgtggtcggtctatggttattcattcgtcttctgacccgcgtcctcgtggctgacgaagttgattcaccgccgccccaggttgtcgcatactggctcggttcgtttctcccgcgtctattgccgaaggagacggcgctgagtgaacgcgtcatacagagtatggactgtccttcatcggcgacgggaacacccagatccgctggcggttcccaatcgcgttccagctcgtgtaagtttcgcttacccgaccgtcgcagcagatcagacatactgatgtacgccggctctatagacctcttctcggcctcgcaatctgcaccttcttcatgcccggtacgcatttcgcctttttccggagcggacttcctcgctgactctcccgacaattgcagaatcgcctcgatggctcctcaaggcagggtatcgcgacgaggcgctgcatgtcctcactcgcttgcgctccgaagacggtcagatcaacgcggaagcccaggccgaatttgacgagatcgaccgagcgattcaaatcgacggtgcggcagaacccggctacatcgacatgacattccgctcgcacggcaagctgcatctgtcacgaagggtacgtcagattggcaaacagcgatgaaagctccgactgaccgaatcgctgttaccaacagactcagctcgcgatgtgagatcaatttgtctcctgctttccgttcctcgcgctgaccttttctctcgttctcagctggatccagatccttcaagagtggggcggtatcgccgctatcacgggtgagttccttatcgggctggtcggacgagaaaagcgcctgacgattcttttcccttcagtctaccaaccggtcatcttcggtctcgccggcttcgacgcttcgaaggcaggctgggtatcgggagtcaacacgatcacctacatgttttctacgtgagtattcaccttctccttgccacttggcgagacgtggtcgctgcaactgagtcgattttcttttgcagtcttatctgcgtcttcactctcgaccgtatcggtcgccgtgtcacgctcttctggggtacgttccacttggtcttttctttcttcggcttgctcttgaagcgatcactgacgaaacatgaccatgcgcaggcggcgcggttcaggctttcgcgctcatcatggcgggcgtcttcgtccaccttctcaccgttcaccccgaaaagacggctcagtacggaggtgctgctaccgctatggtgttccttgtgcgtcaagaaatgttgtctcactgtcacagactcggaatttgctgaccgggtctttcttctccagtacaccgcaactttcggcgcaacttgtgagaagtctcgccgcttcttctttgagcgaaatgaacctgacctttgtttcactacttcttaccgaaagggctcaccgtaccctggatctaccccgtgagtggcgatgccttccgccaagcgtagtcttcacattgctgacgccactcgtcttcaggccgaaatctggcccgtcaacgcacgagcgaaaggaaacgctatgggagtcgtcggatggtcgatcggtaacggatggtgcaccctcctggtccccgtcatgttcgacaagattaaggaggtcagtcccggtttttttgccgtccgtcgtcttcgctctgcctcaggtatgctgactgcctgcggtctacagaatgccctctacatcttcggcattgctaatattctcgctatcgctgtcgtgtgggcattctaccccgagaccgcgaaccgcactctcgaaggtgcgctcgtccgttcctcttccaaacgctcgcaaccccttctgactttcgagccttgccgtcttcacacagagatcgacttccttttcttcagcgacagctggttcgtgtggcacgccgaggcagagtactcgcgcctcaagaaggaactcgaggtcaccggcgaggtcccggacgatctcaagacgtcgacccacctcaaggagaagatcagcctcgacagcgccgcggcttgaacacaagagcactttccgtcggttctctagactcgtgtatatataaattctttgcctcgatcttcgcaatgtaccttcttgatgggagttcggtcctttcggtccttgatcctcttccaccttagacacattgttaccatgaggcgtctctccacgtcggaagtacggcacgctgccaacagtgcgggcgatgcgagataattgaatgggtcgcagagcaacttatgaagtctacgagatgtcaacattgacgcgattgacattcgggcgactccccgcttggcctcttcgctctcacccggcacgccaccgccacagtcctggggcctgcaagggggtcaacgtccttgcgttgcttgattgagaccggctggacgtgaaacggacgcgctctcaagcggcgccaccggcgacaagagatccgtgctggacgaggaccgtgtcgtcaaacctcgagcggtcgtgacaagatgcctgtggtcaccaacccgatcacacccacgctgagcgtctctgaactacgggcgctcgcgaaccggcacgcgctgccgcccatcgtggattctcaactcgccaagacggtgacgctgcgcacgacccgcccgcttcgcgcaggcaagacgcgccagtacagtctacccgaaatcgactttcaactcttggaggccttgggagacggcttactcgaggcgagcatatgccgagtcttgtacacgaacgtcacgagtcgggctgaccgttccgcagtgctgttctccgtgagttgggtttgcgtggtctttactgccgttcagggggtcgcgtggcttgttagggtatgctccccatgcaggcttatcggagtgtactccgcaacaatgggctactcgcccagctctcgcacggctaccgccttcatctgacgatgtcgccgcctctcgaccccgcgggcacggcagcaggcgcgccgttctcggtcagcgtgaccaagattctcgccgactcgttcgaagcatacatcggagggttgacgcaggcatcgggcgagcaagtcgcgaggtcgtggctcgaaccactcttgatcgacctgatgggtctgatctatccggccgtggaaggaccggatgcggtttcccgcggtgagtgtcaaagatgcgctggcgttcccgcgctgcagagctgaagaccctttcctttttacaggccagcgtacgccccgtaccgaaccgaacgccacgcctcgcaccgaacccgtcgccgccgaacccgtcgcccagcgacctccgaagcgtccgcgcgacgacgcatagcaaacatggcagtgtcgctcttctcttttgcttgcttgactagcttgacttcgagcctgtgtgaattcgattcgaacagcaattctgcggcgagcttgcaccaagtcaccagagatccagaacgaaagagagactggctacgagagctgtcttcgttcagtggcttttggggtgccaagagtatagtagggcgtagaagaagctgaaaagagggaccgagaaagaacacgatgacaactctgtccatttcgctacacacgtctgcaaacccgttctacatgctcgtgtccacccggcaaagctcagtcgcgaccagcgcacacctcgccacgggaaaagatcccgagattgtctatatgatatccttgaaaaccggctcgaaacacttgtgtccttcagtggaagggcacgttgcgaatgcgaccgcccgagccaaattgccggtgcggcagcgcgacttcaaggtcgcgacgaacgcggcgagtcaggcgcttcgagtcggccttggcgagcgagcaacccttgaccggtccggggcagacggcgtcgatcgagcccgacttggtgacggcgttggtgacgcactgctggacctgcgagatgcacgagacgtacgcagcgccgtacgaagtctggttgttgaagaacgactcgagcgacgagttgagttcggcttgcgtgaggttgtgcgcgttcgcggtcgagttgagcagagtggacgagtagtcgacgaggtcggcgaagaaggacgaggggaggtagccgtcgtactgctgtgcgatcgagaggatcgtcgtctgcgtgacgacgggagcggcggactgggtgatacattcctgagcggcggtggcgttgccggctgtcgagaaggtcgacttgggtcagctcattggatctcgaaagaagggcagaaggtcatcgagacgcactggatatgagttccgcagcgcacgactgcaagatctcggcggcggtgaccgtgttgcccgagagcgacgacgcgaccgagttgatcgcgttcgagatctgggcgccgacctgcgcgccgagctgagcgctcggggtcgtcgcgttctggatgttgtacgagaggatgttttcgacgctggtggtcaaggaagcgggcaagacgccgacaaactgctcgaggacgccgttcatggccgtctggagcgtcgtgtaggctccgccgggcttggtgaagcacgcgagcgaggaggtgttgccggcctgctggatcgcgtccgtgtagcactgcgagacctgctcgagagccgtgaccgagttgccggacagcgaagcgatgaccgactggatcgaagactggatctgagtgacgagggcctgctccgacgctggcaagagagtgccgagcaagggcgtaacggcgtcaaagacggacgagaggatcgtgttcggaaggatgccgacgaactgtgtgcgttcaagtcagtacgagcgcggaaaggcggacgcgcacgcgatgaaagctcacctgctcgaggatcgtgttgagcgtcgcctggagaccagccgagtcgctgccggtcggagtcaagcacgagtatccggagggcatgccgcccgccgcgagaacctccgagagacacttttcgagcgcggccgtcgtggtggcgttcaggtcgctctggctcagattcgcggcggcaaaagcctcgtcgagagcctgcttgatgttgagcgaggcagtgacggcgtccgaagttgtgatcagagtcgaagtcgagacttggagctcggtgatgttgcgagtgacggtgatgtaaaccggagccggagtcggagcgaggagagccgagatggtgccgttggcggcgaccgctgtaccgttcacggatgcggtgctgttggcgacggcactggcggtggcggtagcagtgatgttgttggccaagatggtcgttacggcaggcttggtgtgggtgactggagggagcgattcgggatcagcaatcgcgcgagaaagaagacgcgaagaaaatcgggaccaactcaccggtgatggtagtcgcgctaggcttgccgacttgcttctggatgacgctcgagatggctgtatcccccgaaacgcgagtcagtaaaggtggaagacagcaaggatttccgcgaaactcaccgccggaaagggcgcccgcgactgccggcgggatgtacgagctgttggcgaacgatccgacggcttcggcggcacccttggcgacagtctgcggcgaagcgccccggaccttgggcgccggcttcgacttgatcttggacgcgttcttggtccacgacttggacgagccggacgagggagacttgggcttggaggcggtctgatccgacttgttgacgacgggtgcggcgttattagagttgtcttgcgaggaggaggaggacgacgagcccgacgacttggacgacgacgacgacgacgacgacttgtgggaagcctgcttcttcttgctcgacgatgacgactttttcggcgacgggttgacgagcttctgaacctcgggtacggtgtactcgcccggcttgtggatcacgcccgggtgatcggagcaaggttcgggcgaggcggcgaccaagagcgcgagtgacgagagggcgagcgaggtgaggctgaaggaacgcatgacggagtcgagttggtcttggccggtgtgtgtgagggggtggtagtacgagggagtgtgcgacgcgtcgggtgaaaggggacagggaaagaaagtgtgaaggtccgcgggacgaagcgagcgtaaatttaaaggaacgagtggaaggtccgcgggcgaagtgcgcggtgggggtccgagagccgctttgtgacgagagtgcaggaaaggaggagatggagaaggagagaaagcgagaaagagagaagggcgcaagacgcgaagaaagtcgcgtcgcgtcgtaaaagcgcgccgccgaaagattcacgtgcgcgtcgagatgatcggatcggcggccgacccgcatgcattatggccatcgcaactgtatgtattgcgaggctgcaaagcacacagagttgtacagaggccgagcgagcatcccgtccaacaaactcgggtcggttccagcaaatcgctcggagcgactcggaaggcgaggtaccagcgtagcctcagccacaggggacagcggactccgacgaagcctatcaggtcgtacgatgaagcatagtcggccggtcgctgagagttagagcggcggtctatgtgctgttccagggatggccttggatgacgtcggcggttgagctgcctggtctggcgaggacggcgggccgcgtgctatggcgaggagaggcatggtacgaataactggccgatgtgtccccgcagcaggcagtctagccggttgagtgatccggagcaaagtccaacaaagtcgaggagagaaaaagagaagcgtcgctgctcccgac

SEQ ID NO: 53 - DNA, 21152 bp, unidentified; identical to SEQ ID NO: 52
  source 1..21152: mol_type = other DNA
  misc_feature 1..21152: note = Fanzor polypeptide

SEQ ID NO: 54 - DNA, 21152 bp, unidentified; identical to SEQ ID NO: 52
  source 1..21152: mol_type = other DNA
  misc_feature 1..21152: note = Fanzor polypeptide

SEQ ID NO: 55 - DNA, 21152 bp, Rhodotorula sp.
  source 1..21152: mol_type = other DNA
cgtccgcgccggcgcgtcatcctcgcctccgacatctaccgcgggatactccttcagccggtctttcaggacaaccccatccctgatggcctcacccacgccaacgtcatggaccggtggagcgaggccggcggcatgttcgccgtctcactcttcaccgacattgccgtctttcgcctccttggaccttccctaatgttgtagactagtagaccttatttgttgtttgttgttagtcttattctcccccagacagactcgtcagctcgtgttacagagacgagtcagcagaagaggagagcaggcattggggacctttacacaccgcgtgtaaaaaaaatcccgcgaagtctgcaaacgggcttttctgtacggtcgcggggcccatctctgccctatactacgtatacacttatcgctacaacatacgcgactgctgcaactgtgtgccgtacccctcaacttcaccggacttgccattcggctgtgaaaattcctgagatgcagagggcactcgtctcaagcggatgcgagacgaggctactctgctgacagggagatgaccgtagagagacactcaacaataacactgaatcgagcgtagattgcgagatgtgagcggtgaagaagaaaagagaggggagcccgagggcgagctacgacaaagtgcgcccgagatcctcctccaacctccacttgccgcctcatccgaataacgtgtcgtcgtcttgatcttgagcccgagagtatggtagtagtctagggggagagatcaagtcagcgagggttcgaatgaaaaagcgagcgagtgaaaaggacttagatctggaaaaggccttgaaggagcgagagcgagacgagtctgcagaacgagtcctagcatgagacttaatggacgtagcgagagcgccacgcgttatatgactccgcctttagcaatcgccccactcccgacgttcagaccattctaaagacaggcaccctctgtgtcgcttgtacttacgaggcgctgtacggccgccgccaccttcttgtcaataactgcagtcggccttgcgcctgagaaggtcccgttctaacctctgcacacggccctacacactgtattcgggtaagataagagctggaccagaatcaagcgggttcaatccgctatatctgtccaatttttccgcagatttgcgttccgaaagacacagaacctccgtctcctttgaatcggcgagcggaatcgccttgttccgtcggaagcatgtcccatatggccgctttctgcttcattctgctctcaaaaggtaatgccaagtgactgaatgccgtagtcagtggcacgaatccctcacgagtcctccggcaagtattctgtctcgaagacgattttcggtgggtggcggagtggcggcacccaccaaaagcgctcgattgcttttagcgtgtcaatacggagcccataggagtcggcgttgtagtggtatgccgctacagctggtagctccagatatcacccgttatgcagctccatgtcccactctatcgtatatgcgttgaccgccttgattgcacgcatttgtgtctcatttgcgtatatagctcaatttgcacagaacacttgcaatacgtgagtaacgtagcggttaaagtgttagcgttcggttcggtatacactttttgtcagccgagcgttcgcttcccggtgagagcatagagacaacggttctgcgttcagacggccatacttatcgcacctcctctcagacgctacaggctgctcagacaccgtccagatgacccaagtaagccaggccgttcagacgctgtccagactgatgaatccctttggcacggttgctgatcgggccgctggcgccttggaaggccgctcatccaaggagatcttcatcgagcactaccactcaatgctaggacatcagtccgatcgaatcctgcgacactacatgcgtcagcattactggtggccagaaatggtgaaggaaatcgaggcttactgccgaacttgcgcatcctgccaagctagcaaacccgaacgagccgcaccgagaggaaagctacaccctatccagctcccgttcacagcatacgaagagatttcgattgatttcaccggaccgcaccctgtcagcattgatgcggacggaatcgcgagattacattttcaccgtgattgacgccgcctccggagaagtcaagctcattccgtgcatgaaggccggtttgacgagcgcaaaatgcgcccaaatcttcctcgagaaagtgtacccgcaatggggtactccgaagacgatcctgtcggaccaagacgtccgctgggtttccgcgttctggaaagcgttccacaacgctctcggaacgacgctgcacgtgtcaaccggagcggccccttgtcgagttggccgccgctccgattggccaactcggccgctccggccatctcgacaggggatccggagcttgtcccggcggccgctgcgatggctcgattccatgcagctgatttgttctaccgagcgcatgcgagagatttacagtcgaccaccctatactaccgtgatcttgtggcgcgcaaggggcgcggtgctgcgcgccgaaatctgtatggtattctcaaactcaaatgatccggatcggctggcgcggctgcaagaggcctccacttgattggttgcctcgagaacttgaagtagtcgctagatacggttgacttagccgtttaaatacaagctatagtctcgcaaatagcgatagggaggagaatagctaaggacagctagtgtcggtagaattcgcccgagggagaagaaggaagacaaaagtcacgacgagaactacgctcagagtgcggagaccgcgggtacatgtggggggaccgggacaggtacatagtcacgatggagatcacagaaaggccgtgcttgtcgatccagattcgagaggcgagagagggcaggaagtcggaggagcgaaggatgatcgcttcgctcagaggtgtgacttggcgaggtgactcagagagcgaccctttttagcggtcgcggcggcggtgcctttgcaggtacgcttgcggcgaaccgagatcttcgcggaggtcgtttcggccgtatagcgcgggagcgaggcgttcgcgagacgaggggatcgacggagcttttggggcgacgacgccacggcgaccactcccggcatgatcggctgttcggcgcgtggggtgtcatgacgaggggtaacgggagcttgatcgacctccggcgtcggtccggcgaagtgagcggcaggggcgaagagttcgggagattgagcgcgttcgtccgcgtcgctcgagctcgtcatcgacggcgtggggccatcgaagagacccaatcccgcagcgttgatcaccaccttgaggtacgcgtcatcgagactccgaatggcgggttgtccgggttgagcgggagcgtgaagggccaagtcgagatccggcacgaaaggttgaggatggtgttccccgctcgagctcgcgagcgcgttccttccgtagaggtccgcggtgccaaagccagggctatcgaggctgccttcgcgaggagagaattccgggctagtgacgggcgagtgcgtaggccgaaaaccaggcgaaggaggggacttgcgtccctcgtcggcccagcggacgaagtggcgggctgacgtggcaggaggaggcggcgcagccgactcttgcgagggcgcggctctcgcagcagcgctcgatctcgctcgcggcagcggcccttcgcctcgtgctacacatcgacaccgacgactgtgcaccccagggcacccgcccgatctctcgagtacgcccgactccgcttttgaggactcgacggcaggacctttgtcgacaacaatgcaagttggaggccctctccgctcggtcgcatgggcagcgacaccctctcactcgagagtccgcgcgcagcatgcacgcagggcaacgacggcgttcttcgacggcataggcatcatcaacctttgcccgagacggccgcaggcgctgcgatccgtcgacgatggcattggagggaggaggcgccggcacgctctcggctcgctcgggaggcgtcgtatcccaggtgggcagattccttttgagagacgcgtgtgaagagtaacatgtgctgatgcaaagactacgatgtcggcaaaaggcgaccgaccaactcggaccttgagactcgaactgtgggcccgctgcactcagaccttgggtccgacccaaggtctgagtgactgaggggcggcttttggcggcatgcctcggttgagatcgagatcgcaacaagggttgctcagcacaggcttgttcgcggagatgaactgactccgagttgcaccacagtgtagtcgccgatcgcgtgacgaaatgacgaccccgacaccgctggtgagaacgttgtgccaaaaagtatccgcgggctttcggtcgctgtttcgccgaagcagtacgccaatctgacgcgcgtgataccgcactcggttgttccaagttgacgggacaagaggctcagaatacaaggcggtatgggtggcaagagtcgcgggaacgggtgggcgtgcgagcctcgaaggcaaactgctgcaccaagtctgcactgactacgtcggtacgaagagatgtgtcacgtacggtcaagaggatgagatcgaattcaggggcggcggggtattgatcgatcacacgagatcgaaagggaaccgtctcgcgctgacccggttatcgtcgtttcgaggctggcccagagccgcgaggctatcctgctggcgatgaatggctcatgcgcagtctcaagactgaacaaggagcccgcagtgctgatcgacgctcgactccggcgagcacagaagggaagccgctcggacgcggatgccgctctcgcgtgcaacatcgccacgacgcgcatcgtgatcgaactgcgaccttggtcgaagggcgactccagtcctgacgtgcgacggacaggcgaacttgctcgagctctccctcgtcgcaatggcctcctgacttaaaacggcgtgctgtcctcgtgaccgaccgtcgataagaggagcagatggcattgacggagctaacctcaagcgctcatcgctgactgcgcgagtgcgccattctttgctacgcttgctctggagcacgcgataagctcacaagctggcagcgggccgaaatcagagcttgagcgccaaagaacccgcatgcgacgctgcgaacggaacacgcgggtaatgaactgcgacttgcttcatgcgtgacagtcaccatagcgacgcttggagtgcccgcttggaggggaaaaagtcgccgcggacaccccgcgagtgggcggacgggcgaaaggacttctccctttctcgctctaacatttgcctttactgcaaacgcttgaaggagacctcgcctcgcaccaaagcttgctctaagcgctcatatcacccatttccaaccccgccggctgcctccgctctcaacctccgactctcgaggcgcacgaaccccttctcccgttgtcccctcgacgacaaccgccgaatgctgctgccgcgcacgcagctcttgcttgcgctcgcggcttccatcgtactcgcctcgttaaccgcccgcctcgccaactggacgggaacaggaaaacagcagtccttcggagtccgcggagccggcctcgtgcacggacccttgtgagtacattgagccagttttaccgcgcggcaaaggaaactgatgcctacaatccacaacacagcgacatgggccagaagaccctcatggcgcacttgcggggcatcgcgcgcgagcagctccagacggcgcacgcgacgaccatgatggagaccgggaccggcatcaaggccacactcgggctggtcccgaggagctttggcggaagtgagttggacagctgcttactcatagccagcctcgactgaccagtggaccatcggaacagacgagtatgtcgttgtccgcgacctgaaccccgtacgattccagcttcgccaagggacgctccagtcggcgacgtgggtgagggacaagtccgccacgaacgtcgccaacaacctcgcagctgccgagcgagccaagatcgaagagatggaccgcgagatccgcgaggtcctgggcgccgagaccgtcatcatcaacattgtcgacggcgacaagaggccggaggcaaaggcagctaccctctccgaccgtcaccgtcgcttctcgcggaggcaccaccaggaatcgaagctgccctgcgggaagaagcgcgtcgagctcgaacagaccccgcccaacgactcggactggatccaccgcgctgtgagtcctttgtctggtccagtcacacacataacggagcgggagctcacgcaaactttcaaaacagggcgacgagaagacgatctactttgttgcgcccgacgaagcagatcgcctagtacagcatcttgtgacgcagtcgttcgacacaccaaagtacgacctccccgccaactctcccttcgccaacagcaacatcgatcggctcatcgacatcgtcaagcgatacccgccgtggcgtcgaattatccatacgcgcgacctcgatgcagtcatgcacacgacggcgtgcgaggcatggttcgtcctcctcacctcgtggtcaaaagtcgaggagggggcggtccttacctcggacgccacggtactcgaagacatgctcgagccgtacgttgccgagggagcgcagcggctgcattccgtccagcgcgatgtttctgctgccgctccctctgcaccaaggactggccgtggcggcgccctaggcaagaaggcgccgctgccagctcgtccaaacctccccgtgctcttgactcagctcggcgcacagtcggcattccgcccaacatccctcgacagattgccaaccgaacgacgccggggcgatacaatcgtcgtctttctccccggcgtcgacgctctcccaggcttcggcagagatcaatgtcgccgtgcgcgcgtgtcgagccttctgggaaacgactacaccggcagcggcatcaaaggcatctcttgggcgctcgtctcgagcggtctcggcgagtctttgctttcgatgagggaagaggactggtccgaccctcaaaagctcgagtcgcaggtctcttccctcgtctccctcctcgcctccaccgccgccagagccaagacgtggcgggctggaggcgactttggcgaggtcgccaagatctcgagcaagagcacgtcgatcgggcgcgagcagatcctggacctgatcgagtcggtgcgcgttattcgaggtgagaacgtcaactacgtcgcctcgacgttctaccacaacggcgatccgcgcggacccctgcagttcaagcaagctccgccgtcgactcgcccaaatcgctacgacgtcgactcccgccagccaagccatccctacctctctcgcccaggtccgcaacacgtcgtgccacaaggtctgaaccagtcgccgacgctgccgacgagcatcgtcaacccacgcctctcgaacccgctacaaccgtctcggacggtgcccgctccgggcgagaccgatccctcccgtccaaagatgtcgaagattcgtgttcggccgctgcagatgggaggaagcgggcagagcgtgttcatggctgcgcgaacgcatggtcccgagctcactcctctcgacgacaagaccatcgcgcgaatcatacaagcagacgccagccttcctgtcgaggtcaacgacgacgacgacgcggtcgactcggaactggagattgttcccgaagatgacgacgacgacgacgacgaagacgacttcacagcagtgccaaagcaaaaaggaaagctcaatcgtgtggagtcgtactttgcaacgatcacctcgccgggcaagaaccatgccgccgcgagtcgcaagatcagcgacatcacagagtcgccccgaccagtctcgaccgcttcggcttctgccaacaatgccggccgcagcggcgcacaacagaccgccacgcgtatcacgcgtctcacatcggcaagagctcctccgccagagccgtcgaggcgcaaagatcgcgaaccagtgcccgcgccccggcagacccgactcgcggggaatcccgcgatcaccgaacaagaggcagctctcgcatcgccagacccgatgctcctcatcatgtcgctcgccgtcaagctcgggaatcgctttgtccacagtgcgtttgcgttcttgctggaactgctgctggaacagggggaggcagggatgatggcgacgagggatctgctactccagcggaaccgagcggcgcagtgcctcggtcgtcttgctgctggcggagcataccgtgcggcgggggagcagtggttcccgcggcaaacccttgttatctctgagctggagaaggtacgtccggtcatacggtcagaatcgagatggacaagagaactgactacagtctctgagcaggaggccgtcaactcggccctcgcctccggtctcgtgcctcctcctcgactctcggtcaaggcgttcacaatagcctacgctcccttccaaaccaacctgaccgaatggccgcgaacgcacacgcgagacgaactcgtcaacttgggccagttcgtcgcgcgcgacctgtccaagaacgcagcagaagcgctgagcaaagtcctgcggaaggcgcacaaggcgttctcgctcgatccggcatcggaggctgccctgcagtcggcaaacatcgaggcttccgctcgattccgcgcgggcctcgggaactggttgggcggggtgctcgcgactgctccgttcagccaggcgtcggctcacgcaggcgccgcgaacgaagaggacaagggactgccgagtcgagaaaagaccacgtcgtacaacttgcgaaagggcacgaccggcaagagcggcgacacgcttcagcaacagcacggcctcggcccgaagatcgacccgactgacccgcgcgaaccccccgctctcgacctcgggaaagagaccgaaaagtcgctcgagcagatgatcaaaaagctcgtcgactcggtcccgcctggcagcatgttcaatcgatcagatatgcatgacgcgctactgcaagacatcaccacgatcgcgcagcgccttctagcatgccgggaccggcatctcgagatggcgctggtgctgctcagatacaagaagatcgagaacgcgacgaccatggccttcgacgacgtccttgcagggaaaatgccagagatgggggccggaacgcttgccaaggggttgctagctctggtgatgagactgcgacagatgagaacgctatcggggatcgagctcataccggtgagctgactggcacggcggcgtcgagcatagtcaaagggagactgactggcttgtccttttgacagtatttcgacccgcaatgggtcgatgtagacctgtacaccctcctccagtccggccaccggcaccgcttcaaggtgctctgcacagatctcgaaagaacctgtaccaagatcgcatgcggcctcctcccgttcgtcgatgaagacgaagggagaagagtcgagctctttgacctcttcaggcgggtgttcgaagtgtggcggattgacgaggacgaccccgacaacagagacaaggactcgccttggtcctggatcgaggccgagaggacacggtcgacgagcatccgcctggtcgtcaagaaggagagcgtgtccctcgtcgccaacctcgatcgggtcctgcgcattgtgtttggcgtggaggagaccttctacacctacatgaggcggaccggagctcaagtcgaggtgatgaaccagctcttcgatcatcgaatgttgccgaacaagttcgttcccaccgggcacatgcgcatgtcctcaacaaaggtccagttcaccggagtcgacattacgaagatgaccaaacttggacgagaggcgctgccggagaagagtatggctgtctgatgccgaaaagaattgagctgcgctgactcgccctacccagatctcgacgcaggaaccgcatgggcgcacgtctcacaactaccgctcactcaactgaaggtcaaggagtactttgccaagatgatgccgtcctttcagcgtcgcgtcgtcaacggcgagatcgtgtttgtaccgatcgtcgccatcgcaaaacccgacgcagacgtgatgctctcggaacggcgcgatccattgccgcccagatccgctcctcaggaagggctctcgcgcaaagagcgacggcgcgagcggcagcggcaagacgccctggaccgagatcgctccccggtcgacctccgaacgccggtacgcgagaaggcgccaccaagtcgaacgcgaaaggggataccggtgtcttggccaaacctgcgattcgaggggggaaggaagttggtcaatgactttcttggagacaccccgctcgaccacatccactccgccagcatcgacaccggcgtcgtctgtccagtcgcgaccttcatctcgaatccggttcgggacggcttaccaacgcagcgtgccgaggcggtggcgacctattcgcgtgagactctgctcacccagcagcgtcagaccagccgccaagcttcacacctcaactcgtatctgtcgaaccagttcgactttacccgatgggcggatccagcttccacagatgttcgagcgtcgggtacgtcgccaatgccagaaccggatccgatgcaagaccctctgctggtgaccggtctgcacttgctcaagagcatgcactcggtcttcgacgggcggtcgatccagagcaaggtcgagcgcaaggccgaggtcagttcggtggcatctcagcacgtcgatctgatattgggtggcaaggatcgctggaccgaagaggaccgcaagacgcgcaaggtcgttgtcatggtcggctcagcggacgatctcgcgaaatcttccggaatgaagggtgctgtcaccgccaacgtccttgtgcgggaaatctctgccgagctcgcgcgccgcagggtcaacttcatgatctgcgttgttcccgagaactacacatcccaacggtgcccgaacccggactgcgtcgatgcgcagggtcgccgatctcggtacgtttgctctcgtgtactctgagggtgatgcagctgaccgactggtgatctttggggacagagcggagaacccgcgtcaccagggtggaggaccaaactaccgtctcctccaatgccagcgatgtagggcggtcttccaccgggacggagtcggggctgccaacattgggagtatggggtggtgcctgctgcggagtgggttgcagctgtggggggagaactggatgggaccaggaggaaaaaaacttgcggaagcgaaaaatccctaaaaaaggggggatcaatgggatctacttgtagaaccctcgctttctccgtgatcaatctgacttctatctcctgtgtgcggtaaccacaaacaggcgcttgcgcttgcgcttccacgtccgcaaagaggcgcttggcgcttctgctcccctatggccccggcctgcttgagactccgtgtgtggactcgcatggtacagatcgacgggtctgaccgttgagaatgccggacaacgcgccggcgcgtgcgacagagcgcccgaagctttggagccggatcgggattgccggatttctcccctctcaacggtggaaagggcgtctacagatgcacatgtaccccctagtctgatcaagcttgcaccccgcggttctgccgtatccaacggtctgcgacgacgctggcacaagggcctttttcggcgaaagaggcgcttctcgcaactcgccgacggttcccgcagggatgctgggtaactctgggacggttgtaaccttcaaatggactgtatctaccgttttcaacaccagaatacgttcgtgggagaggcggcgaggccgacgactgccctggccgagtcttggagcacccgccccggcctctgcacggtcgaaaatcccaaaactctccctcatacgaccaaaaatcgtcaccgagatgctatgcttgatgtacggccccgcgccgagctctccggaacagtccgggacccaattcctgactttctcgccactcagtctcagtgttccaacttctaagcgcattgtgggtctggttacttctttcatcttgttgacagcatcagaactgacatgtaccatgttgacggattccgtcgtatcttcagaccgagctggcaaacatgattctgagccaggaaaagccggtgagttcagtgtgatgaagccatggcttgtcctgaacagttctctttgtgaatgcattcttctgaaatttgctgcttacagagaaatgactcggccgagggccggcaagcggtgagctcgagacttccaagccgaagaagcgcctgagccctctgctcaacactctgcagagccgagcaagggcagcggaccgcatgcgataccgagagcagcattgggagttctgaatgcgagaggtttgagagcccctcaaaggttgtctgaggaggagggaagaggaagagggagaggtggcaaagccggcttgctcctttttgatacgcgagcgaggtgcagcgaccgcggtgtctcttactcttgcgacactgcccacgggccgcttttcgagaaaggtgttccggcggcggccggccttaacaaaaccaaatccaggacgcgcgagaacgctcaagtcgagacaaggagacgctctcatgcgcgagggcactgaccttgacgggatcccagccctttgaatgcgctacaaagagtgtgtttcccagtgtccagccaagcaaacccgcggctgcagctgcgaggtgcgcaagttcaggagaaggtgcgcaagttcaggagattccaagacgtgacctcccgttgttcactcgttcgcacgcgtccaccaggttattgtatctgcaattttagctcgacggagcgaagccctgctcatgtatttgactatggagcatttgactgtgctgcattgcccacattcttgcagacacgggcaagtcagagaagaagaaaccgagcgcgagttgcgccacccgcaaataccctccggactgaaccgctgaagggccgacgacctgtccctgaccagtagaagtgtcgggatcccttgacttacgaccagcaggtcttgcatgtcgcccagaatcgtcaaaactgattcctcctggttgcgctcaaaagccggatggtcaggccgtgtagacccaaatcgcctgaaacttcgcaccctgggcccctataggtcaaagtccagccggccacaagctcagcccatttcaacggcggtagaggtctgccgagcgaggcgcttgtgggaaattggactagagctgtaagccttgtcgtgcagcatatcgacaatctgaacggtcaaaataatcgtgaaggtgtttgaagctgttcaggcgaaaaagatatccatagagcgcatgcttgctgagatcaggcaagcgcctcttagttgtaattaccgtcgtgcttgccagttccgacccagcctggctcaccagctcgagatacatgctggatcgctgacccttgtgctccgcccccctccagaatcttcttcttcggtatgtctgcagcggagtctgaagtcctcgacgcgaagttgccaagtcccccaagatgaaaattaacgttcttttgttcgtgcaggatatgatcaaggaatgatgggcggcgtcaacggcgctcttgactacgtgaccacgatgggactgggatacgtcacgccgggcgtagatggggccaagccgaccgccaccgtcacgcagtcgacgaagcaggtgagtcgtcggcaacgcatctatcttgtttttgtcccgccggccacgatacctttactgaactgctgtttgcatacagggaggaatcgtctcggcctactgtacgtcccgatcgtgtctccttcccgttttcaacctgacaccggtttctctccagacctcggaactcttttgggatgcttgctcggcgggtggctcggcgataggctcggtcgcaagaagaccatctggattgggtgcatttggatcactatcggagctcccttgcaggtgagtcggagttcactcttgccaccgttccgaaagccgcgatttcactttcgccaccgttccgaaatgaactcccgccaccgctccggaagctggcgctgacctccctctctctccgacaggcagctgcacagaacgtcccctggatggtcatggcgcggatcatcaccggagtcggcacgggccacctcaacgcgatcgtcccagtctggtccgccgaaacttccggtcatctctctcgcgggttcttcattgcgcttgaattcacgctcaacatattcggcgtggtcggtctatggttattcattcgtcttctgacccgcgtcctcgtggctgacgaagttgattcaccgccgccccaggttgtcgcatactggctcggttcgtttctcccgcgtctattgccgaaggagacggcgctgagtgaacgcgtcatacagagtatggactgtccttcatcggcgacgggaacacccagatccgctggcggttcccaatcgcgttccagctcgtgtaagtttcgcttacccgaccgtcgcagcagatcagacatactgatgtacgccggctctatagacctcttctcggcctcgcaatctgcaccttcttcatgcccggtacgcatttcgcctttttccggagcggacttcctcgctgactctcccgacaattgcagaatcgcctcgatggctcctcaaggcagggtatcgcgacgaggcgctgcatgtcctcactcgcttgcgctccgaagacggtcagatcaacgcggaagcccaggccgaatttgacgagatcgaccgagcgattcaaatcgacggtgcggcagaacccggctacatcgacatgacattccgctcgcacggcaagctgcatctgtcacgaagggtacgtcagattggcaaacagcgatgaaagctccgactgaccgaatcgctgttaccaacagactcagctcgcgatgtgagatcaatttgtctcctgctttccgttcctcgcgctgaccttttctctcgttctcagctggatccagatccttcaagagtggggcggtatcgccgctatcacgggtgagttccttatcgggctggtcggacgagaaaagcgcctgacgattcttttcccttcagtctaccaaccggtcatcttcggtctcgccggcttcgacgcttcgaaggcaggctgggtatcgggagtcaacacgatcacctacatgttttctacgtgagtattcaccttctccttgccacttggcgagacgtggtcgctgcaactgagtcgattttcttttgcagtcttatctgcgtcttcactctcgaccgtatcggtcgccgtgtcacgctcttctggggtacgttccacttggtcttttctttcttcggcttgctcttgaagcgatcactgacgaaacatgaccatgcgcaggcggcgcggttcaggctttcgcgctcatcatggcgggcgtcttcgtccaccttctcaccgttcaccccgaaaagacggctcagtacggaggtgctgctaccgctatggtgttccttgtgcgtcaagaaatgttgtctcactgtcacagactcggaatttgctgaccgggtctttcttctccagtacaccgcaactttcggcgcaacttgtgagaagtctcgccgcttcttctttgagcgaaatgaacctgacctttgtttcactacttcttaccgaaagggctcaccgtaccctggatctaccccgtgagtggcgatgccttccgccaagcgtagtcttcacattgctgacgccactcgtcttcaggccgaaatctggcccgtcaacgcacgagcgaaaggaaacgctatgggagtcgtcggatggtcgatcggtaacggatggtgcaccctcctggtccccgtcatgttcgacaagattaaggaggtcagtcccggtttttttgccgtccgtcgtcttcgctctgcctcaggtatgctgactgcctgcggtctacagaatgccctctacatcttcggcattgctaatattctcgctatcgctgtcgtgtgggcattctaccccgagaccgcgaaccgcactctcgaaggtgcgctcgtccgttcctcttccaaacgctcgcaaccccttctgactttcgagccttgccgtcttcacacagagatcgacttccttttcttcagcgacagctggttcgtgtggcacgccgaggcagagtactcgcgcctcaagaaggaactcgaggtcaccggcgaggtcccggacgatctcaagacgtcgacccacctcaaggagaagatcagcctcgacagcgccgcggcttgaacacaagagcactttccgtcggttctctagactcgtgtatatataaattctttgcctcgatcttcgcaatgtaccttcttgatgggagttcggtcctttcggtccttgatcctcttccaccttagacacattgttaccatgaggcgtctctccacgtcggaagtacggcacgctgccaacagtgcgggcgatgcgagataattgaatgggtcgcagagcaacttatgaagtctacgagatgtcaacattgacgcgattgacattcgggcgactccccgcttggcctcttcgctctcacccggcacgccaccgccacagtcctggggcctgcaagggggtcaacgtccttgcgttgcttgattgagaccggctggacgtgaaacggacgcgctctcaagcggcgccaccggcgacaagagatccgtgctggacgaggaccgtgtcgtcaaacctcgagcggtcgtgacaagatgcctgtggtcaccaacccgatcacacccacgctgagcgtctctgaactacgagcgctcgcgaaccggcacgcgctgccgcccatcgtggattctcaactcgccaagacggtgacgctgcgcacgacccgcccgcttcgcgcaggcaagacgcgccagtacagtctacccgaaatcgactttcaactcttggaggccttgggagacggcttactcgaggcgagcatatgccgagtcttgtacacgaacgtcacgagtcgggctgaccgttccgcagtgctgttctccgtgagttgggtttgcgtggtctttactgccgttcagggggtcgcgtggcttattagggtatgctccccatgcaggcttatcggagtgtactccgcaacaatgggctactcgcccagctctcgcacggctaccgccttcatctgacgatgtcgccgcctctcgaccccgcgggcacggcagcaggcgcgccgttctcggtcagcgtgaccaagattctcgccgactcgttcgaagcatacatcggagggttgacgcaggcatcgggcgagcaagtcgcgaggtcgtggctcgaaccactcttgatcgacctgatgggtctgatctatccggccgtggaaggaccggatgcggtttcccgcggtgagtgtcaaagatgcgctggcgttcccgcgctgcagagctgaagaccctttcctttttacaggccagcgtacgccccgtaccgaaccgaacgccacgcctcgcaccgaacccgtcgccgccgaacccgtcgcccagcgacctccgaagcgtccgcgcgacgacgcatagcaaacatggcagtgtcgctcttctcttttgcttgcttgactagcttgacttcgagcctgtgtgaattcgattcgaacagcaattctgcggcgagcttgcaccaagtcaccagagatccagaacgaaagagagactggctacgagagctgtcttcgttcagtggcttttggggtgccaagagtatagtagggcgtagaagaagctgaaaagagggaccgagaaagaacacgatgacaactctgtccatttcgctacacacgtctgcaaacccgttctacatgctcgtgtccacccggcaaagctcagtcgcgaccagcgcacacctcgccacgggaaaagatcccgagattgtctatatgatatccttgaaaaccggctcgaaacacttgtgtccttcagtggaagggcacgttgcgaatgcgaccgcccgagccaaattgccggtgcggcagcgcgacttcaaggtcgcgacgaacgcggcgagtcaggcgcttcgagtcggccttggcgagcgagcaacccttgaccggtccggggcagacggcgtcgatcgagcccgacttggtgacggcgttggtgacgcactgctggacctgcgagatgcacgagacgtacgcggcgccgtacgaagtctggttgttgaagaacgactcgagcgacgagttgagttcggcttgcgtgaggttgtgcgtgttcgcggtcgagttgttgagcagagtcgacgagtagtcgacgaggtcggtgaagaaggacgaggggaggtagccgtcgtactgctgcgcgatcgagaggatcgtcgtctgcgtgacgacgggagcggcggactgggtgatacattcctgagcggcggtggcgttgccggctgttgagaaggtcgacttgggtcagccatgcgatctcgacaacacgtccataaggtcatcgagacgcactggagatgagttccgcagcgcacgactgcaagatctcggcggcggtgaccgtgttgcccgagagcgtcgacgcgaccgagttgatcgcgttcgagatctgggcgccgacctgcgcgccgagctgagcgctcggggtcgtcgcgttctggatgttgtacgagaggatgttttcgacgctggtggtcaaggaagcgggcaagacgccgacaaactgctcgaggacgccgttcatggccgtctggagcgtcgtgtaggctccgccgggcttggtgaagcacgcgagcgaggaggtgttgccggcctgctggatcgcgtccgtgtagcactgcgagacctgctcgagagccgtgaccgagttgccggacagcgaagcgatgaccgactggatcgaagactggatctgggtgacgagggcctgctccgacgcgggcaggagcgtgccgagcaacggcgtgacggcgtcaaagacggacgagaggatcgtgttcggaaggatgccgacgaactgtgtgcgttcaagtcagtacgagcgcggaaaggcggacgcgcacgcgatgaaagctcacctgctcgaggatcgtgttgagcgtcgcctggagaccagccgagtcgctgccggtcggagtcaagcacgagtatccggagggcataccacccgcggcgagaacctccgagagacacttttcgagcgctgccgtcgtggtggcattcaagtcactctggctcatattggcggcagcaaaggcctcgtcgagagcctgcttgatgttgagggaggcagtgacggcgtccgaagttgtgatcagagtcgacgtcgagacttggagctcggtgatgttgcgagtgacggtgatgtagaccggagccggagtcggagcgaggagagccgagatggtgccgttggcggcgaccgctgtaccgttcacggatgcggtgctgttggcgacggcggtggcggtggcggtagcggtaatgttttcggccaagatggtcgtcaccgccggcttggtgtgagtgactgagggtacaaacgcgggatcagcgatcgcgcaacaaaacgacgcgaggcaaatcgggaccaactcgccagtgatggtcgtcgcgctaggtttgccgacttgcttctggatgacgctcgagatggctgtactctccgaaaggcgagtcagtacgagtgaaggggaccagagaagccataatttctgcgcaactcaccgccggaaagggcgcccgcgactgcaggcgggatgtacgagctgtcggcgaacgatccgacggcttcggcggcacccttggcgacagtctgcggcgaagcgccctggaccttgggcgccggcttcgacttgatcttggacgcgttcttggtccacgacttggacgaggcggacgagggagacttgggcttggaggcggtctgatccgacttgtggacgacgggtgcggcgttataagagttgtcttgcgaggaggtggaggacgacgagccggacgacttggacgacgacgacgacgacgacgacttgtgggaagcctgtttcttcttgctcgacgatgacgactttttcggcgacgggttgacgagcttctgaacctcagggacggtgtactcgcccggcttgtggatcacgcccgggtgatcggagcaaggttcgggcgacgcggcgaccaagagcgcgagtgacgagagggcgagcgaggtgaggctgaaggaacgcatgacggagtcgagttggtcttggccggtgtgtgtgagggggtggtagtacgagggagtgtgcgacgcgtcgggtgaaaggggacagggaaagaaagtgtgaaggtccgcgggacgaagcgagcgtgaatttaaaggaacgagtggaaggtccgcgggcgaagtgcgcggtgggggtccgagagccgctttgtgacgagagtgcaggaaaggaggagatggagaaggagagaaagcgagaaagagagaagggcgcaagacgcgaagaaagtcgcgtcgcgtcgtaaaagcgcgccgccgaaagattcacgtgcgcgtcgagatgatcggatcggcggccgacccgcatgcattatggccatcgcaactgtatgtattgcgaggctgcaaagcacacagagttgtacagaggccgagcgagcatcccgtccaacaaactcgggtcggttccagcaaatcgctcggagcgactcggaaggcgaggtaccagcgtagcctcagccacagtggacagcggactccgacgaagcctatcaggtcgtacgatgaagcatagtcggccggtcgctgagagttagagcggcggtctatgtgctgttccagggatggccttggatgacgtcggcggttgagctgcctggtctggcgaggacggcgggccgcgtgctatggcgaggagaggcatggtacgaataactggccgatgtgtccccgcagcaggcagtctagccggttgagtgatccggagcaaagtcgaggagagaaaaagagaagcgtcgctgctccc

SEQ ID NO: 56 - DNA, 21152 bp, Rhodotorula sp.
  source 1..21152: mol_type = other DNA
gcgccggcgcgtcatcctcgcctccgacatctaccgcgggatactccttcagccggtctttcaggacaaccccatccctgatggcctcacccacgccaacgtcatggaccggtggagcgaggccggcggcatgttcgccgtctcactcttcaccgacattgccgtctttcgcctccttggaccttccctaatgttgtagactagtagaccttatttgttgtttgttgttagtcttattctcccccagacagactcgtcagctcgtgttacagagacgagtcagcagaagaggagagcaggcattggggacctttacacaccgcgtgtaaaaaaaatcccgcgaagtctgcaaacgggcttttctgtacggtcgcggggcccatctctgccctatactacgtatacacttatcgctacaacatacgcgactgctgcaactgtgtgccgtacccctcaacttcaccggacttgccattcggctgtgaaaattcctgagatgcagagggcactcgtctcaagcggatgcgagacgaggctactctgctgacagggagatgaccgtagagagacactcaacaataacactgaatcgagcgtagattgcgagatgtgagcggtgaagaagaaaagagaggggagcccgagggcgagctacgacaaagtgcgcccgagatcctcctccaacctccacttgccgcctcatccgaataacgtgtcgtcgtcttgatcttgagcccgagagtatggtagtagtctagggggagagatcaagtcagcgagggttcgaatgaaaaagcgagcgagtgaaaaggacttagatctggaaaaggccttgaaggagcgagagcgagacgagtctgcagaacgagtcctagcatgagacttaatggacgtagcgagagcgccacgcgttatatgactccgcctttagcaatcgccccactcccgacgttcagaccattctaaagacaggcaccctctgtgtcgcttgtacttacgaggcgctgtacggccgccgccaccttcttgtcaataactgcagtcggccttgcgcctgagaaggtcccgttctaacctctgcacacggccctacacactgtattcgggtaagataagagctggaccagaatcaagcgggttcaatccgctatatctgtccaatttttccgcagatttgcgttccgaaagacacagaacctccgtctcctttgaatcggcgagcggaatcgccttgttccgtcggaagcatgtcccatatggccgctttctgcttcattctgctctcaaaaggtaatgccaagtgactgaatgccgtagtcagtggcacgaatccctcacgagtcctccggcaagtattctgtctcgaagacgattttcggtgggtggcggagtggcggcacccaccaaaagcgctcgattgcttttagcgtgtcaatacggagcccataggagtcggcgttgtagtggtatgccgctacagctggtagctccagatatcacccgttatgcagctccatgtcccactctatcgtatatgcgttgaccgccttgattgcacgcatttgtgtctcatttgcgtatatagctcaatttgcacagaacacttgcaatacgtgagtaacgtagcggttaaagtgttagcgttcggttcggtatacactttttgtcagccgagcgttcgcttcccggtgagagcatagagacaacggttctgcgttcagacggccatacttatcgcacctcctctcagacgctacaggctgctcagacaccgtccagatgacccaagtaagccaggccgttcagacgctgtccagactgatgaatccctttggcacggttgctgatcgggccgctggcgccttggaaggccgctcatccaaggagatcttcatcgagcactaccactcaatgctaggacatcagtccgatcgaatcctgcgacactacatgcgtcagcattactggtggccagaaatggtgaaggaaatcgaggcttactgccgaacttgcgcatcctgccaagctagcaaacccgaacgagccgcaccgagaggaaagctacaccctatccagctcccgttcacagcatacgaagagatttcgattgatttcaccggaccgcaccctgtcagcattgatgcggacggaatcgcgagattacattttcaccgtgattgacgccgcctccggagaagtcaagctcattccgtgcatgaaggccggtttgacgagcgcaaaatgcgcccaaatcttcctcgagaaagtgtacccgcaatggggtactccgaagacgatcctgtcggaccaagacgtccgctgggtttccgcgttctggaaagcgttccacaacgctctcggaacgacgctgcacgtgtcaaccggagcggccccttgtcgagttggccgccgctccgattggccaactcggccgctccggccatctcgacaggggatccggagcttgtcccggcggccgctgcgatggctcgattccatgcagctgatttgttctaccgagcgcatgcgagagatttacagtcgaccaccctatactaccgtgatcttgtggcgcgcaaggggcgcggtgctgcgcgccgaaatctgtatggtattctcaaactcaaatgatccggatcggctggcgcggctgcaagaggcctccacttgattggttgcctcgagaacttgaagtagtcgctagatacggttgacttagccgtttaaatacaagctatagtctcgcaaatagcgatagggaggagaatagctaaggacagctagtgtcggtagaattcgcccgagggagaagaaggaagacaaaagtcacgacgagaactacgctcagagtgcggagaccgcgggtacatgtggggggaccgggacaggtacatagtcacgatggagatcacagaaaggccgtgcttgtcgatccagattcgagaggcgagagagggcaggaagtcggaggagcgaaggatgatcgcttcgctcagaggtgtgacttggcgaggtgactcagagagcgaccctttttagcggtcgcggcggcggtgcctttgcaggtacgcttgcggcgaaccgagatcttcgcggaggtcgtttcggccgtatagcgcgggagcgaggcgttcgcgagacgaggggatcgacggagcttttggggcgacgacgccacggcgaccactcccggcatgatcggctgttcggcgcgtggggtgtcatgacgaggggtaacgggagcttgatcgacctccggcgtcggtccggcgaagtgagcggcaggggcgaagagttcgggagattgagcgcgttcgtccgcgtcgctcgagctcgtcatcgacggcgtggggccatcgaagagacccaatcccgcagcgttgatcaccaccttgaggtacgcgtcatcgagactccgaatggcgggttgtccgggttgagcgggagcgtgaagggccaagtcgagatccggcacgaaaggttgaggatggtgttccccgctcgagctcgcgagcgcgttccttccgtagaggtccgcggtgccaaagccagggctatcgaggctgccttcgcgaggagagaattccgggctagtgacgggcgagtgcgtaggccgaaaaccaggcgaaggaggggacttgcgtccctcgtcggcccagcggacgaagtggcgggctgacgtggcaggaggaggcggcgcagccgactcttgcgagggcgcggctctcgcagcagcgctcgatctcgctcgcggcagcggcccttcgcctcgtgctacacatcgacaccgacgactgtgcaccccagggcacccgcccgatctctcgagtacgcccgactccgcttttgaggactcgacggcaggacctttgtcgacaacaatgcaagttggaggccctctccgctcggtcgcatgggcagcgacaccctctcactcgagagtccgcgcgcagcatgcacgcagggcaacgacggcgttcttcgacggcataggcatcatcaacctttgcccgagacggccgcaggcgctgcgatccgtcgacgatggcattggagggaggaggcgccggcacgctctcggctcgctcgggaggcgtcgtatcccaggtgggcagattccttttgagagacgcgtgtgaagagtaacatgtgctgatgcaaagactacgatgtcggcaaaaggcgaccgaccaactcggaccttgagactcgaactgtgggcccgctgcactcagaccttgggtgggtccgacccaaggtctgagtgactgaggggcggcttttggcggcatgcctcggttgagatcgagatcgcaacaagggttgctcagcacaggcttgttcgcggagatgaactgactccgagttgcaccacagtgtagtcgccgatcgcgtgacgaaatgacgaccccgacaccgctggtgagaacgttgtgccaaaaagtatccgcgggctttcggtcgctgtttcgccgaagcagtacgccaatctgacgcgcgtgataccgcactcggttgttccaagttgacgggacaagaggctcagaatacaaggcggtatgggtggcaagagtcgcgggaacgggtgggcgtgcgagcctcgaaggcaaactgctgcaccaagtctgcactgactacgtcggtacgaagagacgtgtcacgtacggtcaagaggatgagatcgaattcaggggcggcggggtattgatcgatcacacgagatcgaaagggaaccgtctcgcgctgacccggttatcgtcgtttcgaggctggcccagagccgcgaggctatcctgctggcgatgaatggctcatgcgcagtctcaagactgaacaaggagcccgcagtgctgatcgacgctcgactccggcgagcacagaagggaagccgctcggacgcggatgccgctctcgcgtgcaacatcgccacgacgcgcatcgtgatcgaactgcgaccttggtcgaagggcgactccagtcctgacgtgcgacggacaggcgaacttgctcgagctctccctcgtcgcaatggcctcctgacttaaaacggcgtgctgtcctcgtgaccgaccgtcgataagaggagcagatggcattgacggagctaacctcaagcgctcatcgctgactgcgcgagtgcgccattctttgctacgcttgctctggagcacgcgataagctcacaagctggcagcgggccgaaatcagagcttgagcgccaaagaacccgcatgcgacgctgcgaacggaacacgcgggtaatgaactgcgacttgcttcatgcgtgacagtcaccatagcgacgcttggagtgcccgcttggaggggaaaaagtcgccgcggacaccccgcgagtgggcggacgggcgaaaggacttctccctttctcgctctaacatttgcctttactgcaaacgcttgaaggagacctcgcctcgcaccaaagcttgctctaagcgctcatatcacccatttccaaccccgccggctgcctccgctctcaacctccgactctcgaggcgcacgaaccccttctcccgttgtcccctcgacgacaaccgccgaatgctgctgccgcgcacgcagctcttgcttgcgctcgcggcttccatcgtactcgcctcgttaaccgcccgcctcgccaactggacgggaacaggaaaacagcagtccttcggagtccgcggagccggcctcgtgcacggacccttgtgagtacattgagccaagttttaccgcgcggcaaaggaaactgatgcctacaatccacaacacagcgacatgggccagaagaccctcatggcgcacttgcggggcatcgcgcgcgagcagctccagacggcgcacgcgacgaccatgatggagaccgggaccggcatcaaggccacactcgggctggtcccgaggagctttggcggaagtgagttggacagctgcttactcatagccagcctcgactgaccagtggaccatcggaacagacgagtatgtcgttgtccgcgacctgaaccccgtacgattccagcttcgccaagggacgctccagtcggcgacgtgggtgagggacaagtccgccacgaacgtcgccaacaacctcgcagctgccgagcgagccaagatcgaagagatggaccgcgagatccgcgaggtcctgggcgccgagaccgtcatcatcaacattgtcgacggcgacaagaggccggaggcaaaggcagctaccctctccgaccgtcaccgtcgcttctcgcggaggcaccaccaggaatcgaagctgccctgcgggaagaagcgcgtcgagctcgaacagaccccgcccaacgactcggactggatccaccgcgctgtgagtcctttgtctggtccagtcacacacataacggagcgggagctcacgcaaactttcaaaacagggcgacgagaagacgatctactttgttgcgcccgacgaagcagatcgcctagtacagcatcttgtgacgcagtcgttcgacacaccaaagtacgacctccccgccaactctcccttcgccaacagcaacatcgatcggctcatcgacatcgtcaagcgatacccgccgtggcgtcgaattatccatacgcgcgacctcgatgcagtcatgcacacgacggcgtgcgaggcatggttcgtcctcctcacctcgtggtcaaaagtcgaggagggggcggtccttacctcggacgccacggtactcgaagacatgctcgagccgtacgttgccgagggagcgcagcggctgcattccgtccagcgcgatgtttctgctgccgctccctctgcaccaaggactggccgtggcggcgccctaggcaagaaggcgccgctgccagctcgtccaaacctccccgtgctcttgactcagctcggcgcacagtcggcattccgcccaacatccctcgacagattgccaaccgaacgacgccggggcgatacaatcgtcgtctttctccccggcgtcgacgctctcccaggcttcggcagagatcaatgtcgccgtgcgcgcgtgtcgagccttctgggaaacgactacaccggcagcggcatcaaaggcatctcttgggcgctcgtctcgagcggtctcggcgagtctttgctttcgatgagggaagaggactggtccgaccctcaaaagctcgagtcgcaggtctcttccctcgtctccctcctcgcctccaccgccgccagagccaagacgtggcgggctggaggcgactttggcgaggtcgccaagatctcgagcaagagcacgtcgatcgggcgcgagcagatcctggacctgatcgagtcggtgcgcgttattcgaggtgagaacgtcaactacgtcgcctcgacgttctaccacaacggcgatccgcgcggacccctgcagttcaagcaagctccgccgtcgactcgcccaaatcgctacgacgtcgactcccgccagccaagccatccctacctctctcgcccaggtccgcaacacgtcgtgccacaaggtctgaaccagtcgccgacgctgccgacgagcatcgtcaacccacgcctctcgaacccgctacaaccgtctcggacggtgcccgctccgggcgagaccgatccctcccgtccaaagatgtcgaagattcgtgttcggccgctgcagatgggaggaagcgggcagagcgtgttcatggctgcgcgaacgcatggtcccgagctcactcctctcgacgacaagaccatcgcgcgaatcatacaagcagacgccagccttcctgtcgaggtcaacgacgacgacgacgcggtcgactcggaactggagattgttcccgaagatgacgacgacgacgacgacgaagacgacttcacagcagtgccaaagcaaaaaggaaagctcaatcgtgtggagtcgtactttgcaacgatcacctcgccgggcaagaaccatgccgccgcgagtcgcaagatcagcgacatcacagagtcgccccgaccagtctcgaccgcttcggcttctgccaacaatgccggccgcagcggcgcacaacagaccgccacgcgtatcacgcgtctcacatcggcaagagctcctccgccagaaccgtcgaggcgcaaagatcgcgaaccagtgcccgcgccccggcagacccgactcgcggggaatcccgcgatcaccgaacaagaggcagctctcgcatcgccagacccgatgctcctcatcatgtcgctcgccgtcaagctcgggaatcgctttgtccacagtgcgtttgcgttcttgctggaactgctgctggaacagggggaggcagggatgatggcgacgagggatctgctactccagcggaaccgagcggcgcagtgcctcggtcgtcttgctgctggcggagcataccgtgcggcgggggagcagtggttcccgcggcaaacccttgttatctctgagctggagaaggtacgtccggtcatacggtcagaatcgagatggacaagagaactgactacagtctctgagcaggaggccgtcaactcggccctcgcctccggtctcgtgcctcctcctcgactctcggtcaaggcgttcacaatagcctacgctcccttccaaaccaacctgaccgaatggccgcgaacgcacacgcgagacgaactcgtcaacttgggccagttcgtcgcgcgcgacctgtccaagaacgcagcagaagcgctgagcaaagtcctgcggaaggcgcacaaggcgttctcgctcgatccggcatcggaggctgccctgcagtcggcaaacatcgaggcttccgctcgattccgcgcgggcctcgggaactggttgggcggggtgctcgcgactgctccgttcagccaggcgtcggctcacgcaggcgccgcgaacgaagaggacaagggactgccgagtcgagaaaagaccacgtcgtacaacttgcgaaagggcacgaccggcaagagcggcgacacgcttcagcaacagcacggcctcggcccgaagatcgacccgactgacccgcgcgaaccccccgctctcgacctcgggaaagagaccgaaaagtcgctcgagcagatgatcaaaaagctcgtcgactcggtcccgcctggcagcatgttcaatcgatcagatatgcatgacgcgctactgcaagacatcaccacgatcgcgcagcgccttctagcatgccgggaccggcatctcgagatggcgctggtgctgctcagatacaagaagatcgagaacgcgacgaccatggccttcgacgacgtccttgcagggaaaatgccagagatgggggccggaacgcttgccaaggggttgctagctctggtgatgagactgcgacagatgagaacgctatcggggatcgagctcataccggtgagctgactggcacggcggcgtcgagcatagtcaaagggagactgactggcttgtccttttgacagtatttcgacccgcaatgggtcgatgtagacctgtacaccctcctccagtccggccaccggcaccgcttcaaggtgctctgcacagatctcgaaagaacctgtaccaagatcgcatgcggcctcctcccgttcgtcgatgaagacgaagggagaagagtcgagctctttgacctcttcaggcgggtgttcgaagtgtggcggattgacgaggacgaccccgacaacagagacaaggactcgccttggtcctggatcgaggccgagaggacacggtcgacgagcatccgcctggtcgtcaagaaggagagcgtgtccctcgtcgccaacctcgatcgggtcctgcgcattgtgtttggcgtggaggagaccttctacacctacatgaggcggaccggagctcaagtcgaggtgatgaaccagctcttcgatcatcgaatgttgccgaacaagttcgttcccaccgggcacatgcgcatgtcctcaacaaaggtccagttcaccggagtcgacattacgaagatgaccaaacttggacgagaggcgctgccggagaagagtatggctgtctgatgccgaaaagaattgagctgcgctgactcgccctacccagatctcgacgcaggaaccgcatgggcgcacgtctcacaactaccgctcactcaactgaaggtcaaggagtactttgccaagatgatgccgtcctttcagcgtcgcgtcgtcaacggcgagatcgtgtttgtaccgatcgtcgccatcgcaaaacccgacgcagacgtgatgctctcggaacggcgcgatccattgccgcccagatccgctcctcaggaagggctctcgcgcaaagagcgacggcgcgagcggcagcggcaagacgccctggaccgagatcgctccccggtcgacctccgaacgccggtacgcgagaaggcgccaccaagtcgaacgcgaaaggggataccggtgtcttggccaaacctgcgattcgaggggggaaggaagttggtcaatgactttcttggagacaccccgctcgaccacatccactccgccagcatcgacaccggcgtcgtctgtccagtcgcgaccttcatctcgaatccggttcgggacggcttaccaacgcagcgtgccgaggcggtggcgacctattcgcgtgagactctgctcacccagcagcgtcagaccagccgccaagcttcacacctcaactcgtatctgtcgaaccagttcgactttacccgatgggcggatccagcttccacagatgttcgagcgtcgggtacgtcgccaatgccagaaccggatccgatgcaagaccctctgctggtgaccggtctgcacttgctcaagagcatgcactcggtcttcgacgggcggtcgatccagagcaaggtcgagcgcaaggccgaggtcagttcggtggcatctcagcacgtcgatctgatattgggtggcaaggatcgctggaccgaagaggaccgcaagacgcgcaaggtcgttgtcatggtcggctcagcggacgatctcgcgaaatcttccggaatgaagggtgctgtcaccgccaacgtccttgtgcgggaaatctctgccgagctcgcgcgccgcagggtcaacttcatgatctgcgttgttcccgagaactacacatcccaacggtgcccgaacccggactgcgtcgatgcgcagggtcgccgatctcggtacgtttgctctcgtgtactctgagggtgatgcagctgaccgactggtgatctttggggacagagcggagaacccgcgtcaccagggtggaggaccaaactaccgtctcctccaatgccagcgatgtagggcggtcttccaccgggacggagtcggggctgccaacattgggagtatggggtggtgcctgctgcggagtgggttgcagctgtggggggagaactggatgggaccaggaggaaaaaaacttgcggaagcgaaaaatccctaaaaaaggggggatcaatgggatctacttgtagaaccctcgctttctccgtgatcaatctgacttctatctcctgtgtgcggtaaccacaaacaggcgcttgcgcttgcgcttccacgtccgcaaagaggcgcttggcgcttctgctcccctatggccccggcctgcttgagactccgtgtgtggactcgcatggtacagatcgacgggtctgaccgttgagaatgccggacaacgcgccggcgcgtgcgacagagcgcccgaagctttggagccggatcgggattgccggatttctcccctctcaacggtggaaagggcgtctacagatgcacatgtaccccctagtctgatcaagcttgcaccccgcggttctgccgtatccaacggtctgcgacgacgctggcacaagggcctttttcggcgaaagaggcgcttctcgcaactcgccgacggttcccgcagggatgctgggtaactctgggacggttgtaaccttcaaatggactgtatctaccgttttcaacaccagaatacgttcgtgggagaggcggcgaggccgacgactgccctggccgagtcttggagcacccgccccggcctctgcacggtcgaaaatcccaaaactctccctcatacgaccaaaaatcgtcaccgagatgctatgcttgatgtacggccccgcgccgagctctccggaacagtccgggacccaattcctgactttctcgccactcagtctcagtgttccaacttctaagcgcattgtgggtctggttacttctttcatcttgttgacagcatcagaactgacatgtaccatgttgacggattccgtcgtatcttcagaccgagctggcaaacatgattctgagccaggaaaagccggtgagttcagtgtgatgaagccatggcttgtcctgaacagttctctttgtgaatgcattcttctgaaatttgctgcttacagagaaatgactcggccgagggccggcaagcggtgagctcgagacttccaagccgaagaagcgcctgagccctctgctcaacactctgcagagccgagcaagggcagcggaccgcatgcgataccgagagcagcattgggagttctgaatgcgagaggtttgagagcccctcaaaggttgtctgaggaggagggaagaggaagagggagaggtggcaaagccggcttgctcctttttgatacgcgagcgaggtgcagcgaccgcggtgtctcttactcttgcgacactgcccacgggccgcttttcgagaaaggtgttccggcggcggccggccttaacaaaaacaaatccaggacgcgcgagaacgctcaagtcgagacaaggagacgctctcatgcgcgagggcactgaccttgacgggatcccagccctttgaatgcgctacaaagagtgtgtttcccagtgtccagccaagcaaacccgcggctgcagctgcgaggtgcgcaagttcaggagaaggtgcgcaagttcaggagattccaagacgtgacctcccgttgttcactcgttcgcacgcgtccaccaggttattgtatctgcaattttagctcgacggagcgaagccctgctcatgtatttgactatggagcatttgactgtgctgcattgcccacattcttgcagacacgggcaagtcagagaagaagaaaccgagcgcgagttgcgccacccgcaaataccctccggactgaaccgctgaagggccgacgacctgtccctgaccagtagaagtgtcgggatcccttgacttacgaccagcaggtcttgcatgtcgcccagaatcgtcaaaactgattcctcctggttgcgctcaaaagccggatggtcaggccgtgtagacccaaatcgcctgaaacttcgcaccctgggcccctataggtcaaagtccagccggccacaagctcagcccatttcaacggcggtagaggtctgccgagcgaggcgcttgtgggaaattggactagagctgtaagccttgtcgtgcagcatatcgacaatgtgaacggtcaaaataatcgtgaaggtgtttgaagctgttcaggcgaaaaagatatccatagagcgcatgcttgctgagatcaggcaagcgcctcttagttgtaattaccgtcgtgcgtgccagttccgacccagcctggctcaccagctcgagatacatgctggatcgctgacccttgtgctccgcccccctccagaatcttcttcttcggtatgtctgcagcggagtccgaagtcctcgacgcgaagttgccaagtccaagatggaaattgacgttcttttgttcgtgcaggctatgatcaaggaatgatgggcggcgtcaacggcgctcttgactacgtgaccacgatgggactgggatacgtcacgccgggcgtagatggggccaagccgaccgccaccgtcacgcagtcgacgaagcaggtgagtcgtcggcaacgcatctatcttgtttttgtcccgccggccatgatacctttactgaactgctgtttgcatacagggaggaatcgtctcggcctactgtacgtcccgatcctgcttccctccctttcctttgctgactcgggtccatctctagatctcggaactcttttgggctgcttgctgggcggctggctcggcgataggcttggtcgcaagaagacgatctggatagggtgtgtttggattttcgtcggtgctcccttgcaggtgagtcagagttcattcttaccaccgttccaaaagcccggagtttgcttttgccaccgttccggaagccgaggctgacctccctctcttgcataggcagctgcacagaacgtcccctggatggtcatggcgcggatcatcaccggagtcggcacggggcacctcaacgcgatcgtccccgtctggtccgccgaaacttccggtcatctctctcgcgggttcttcattgcgcttgaattcactctgaatattgcgggggtcggtgagtctattaatactttctctcctctggcacgcgctctcgttgctgactgattgctcttccgcaacttcagttgtcgcgtactggctcggttcgttcctttcacgtctaatgtcgaaggaactacagcactgactgtactgacctgatacagagtatggactgtctttcatcggcgacgggaacacccagatccgctggcggttcccaatcgcgttccagctcgtgtaagtttcgcttacccgaccgtcgcagcagatcagacatactgatgtatgccggctctatagacctcttctcggcctcgcaatctgcaccttcttcatgcccggtacgcatttcaccttgttccggagcggacttcctcgctgactctcccggacaattgcagaatcgcctcgatggctcctcaaggcaggatatcgcgacgaggcgctgcatgtcctcactcgcctgcgctccgaagacggtcagatcaacgcggaagcccaggccgaatttgacgagatcgaccgagcgattcaaatcgacggcgcggcagaacccggctacatcgacatgacattccgctcgcacggcaagctgcatctgtcacgaagggtacgtcagattggcaaacagcgatgaaagctcggactgaccgaatcgcttttaccaacagactcagctcgcgatgtgagatcagtttgtctcctgctttccgttcctcgcgctgaccttttctttcgttctcagctggatccagatccttcaagagtggggcggtattgccgctatcacgggtgagagttccttatcgggctggtcggacgagaaaagcgcctgacgattcttttcccttcagtctaccaaccggtcatcttcggtctcgccggtttcgacgcgtcgaaggcaggttgggtatcgggagtcaacacgatcacctacatgttctcgacgtgcgtattccccttctccttgccgttccgagccgtgatcgccgagactgagccgtttttccctcgcagcctcatttgcgtcttcactctcgaccgtatcggtcgccgtgtcacgttgttctggggtacgttccacttggtcttgttttcgtggtcttgctctcgcaagcggctactgatctgattcctctatgcacaggtggcgcggttcaggctttcgcgctcatcatggcgggcgtcttcgtccacctgctcaccgttcaccccgaaaagacggctcagtacggaggtgctgccaccgctatggtgttcctggtacgtcgacaatttttctgatcgcggatctaaagtgagaattcgctgacgcagtctttctgcctgcagtacaccgcaactttcggcgcaacttgtaagaagtctcgccgcttcttcttcgagcgaaatggacctgacctttgtttcactacttcttaccgaaagggctcaccgtaccctggatctaccccgtgggtggcgatgccttccgccaagcgtaagtcttcacattgctgacgccactcgtatttaggccgaaatctggccggtcaacgcacgagcgaaaggaaacgctatgggagtcgtcggatggtcgatcggtaacggatggtgcaccctcctggtccccgtcatgtttgacaagatcaaagaggtcagtcccggcttttttttgccgtccgtcgtcttcgctctgcctcaggtatgctgattgcctgcggtctacagaatgccctctacatcttcggcattgctaacatcctcgctattgctgtcgtgtgggcattctaccccgagaccgccaaccgcactctcgaaggtgcgctcgtccgttcctttcccgaacgctcgcaaccccttctgactttcgaaccttgccgccttcacacagagatcgacttccttttcttcagcgacagctggttcgtgtggcacgccgaggcagagtattcgcgcctcaagaaggaactcgaggtcaccggcgaggtcccagacgatctcaagacgtcgacccacctcaaggagaagatcagcctcgacagcgccgcggcttgaacacaagagcacttgctgtcgattctctagactcgtgtatatataaattcttttttgcctcgatcttcgcaatgtaccctcttgatgggagttcggtcctttcggtccttgatcctcttccaccttagacacattgttaccatgaggcgtctctccacgtcggaagtacggcacgctgccaacagtgcgggcgatgcgagagaaggggtcgcagagcaacttatgaagtctacgagatgtcaacattgacgcgattgacattcgggcgactccccgcttggcctcttcgctctcacccagcacgccaccgccacagtcctggggcctgcaagggggtcaacgtccttgagttgcttgattgagaccggctggacgtgaaacggacgcgctctcaagcggcgccaccggcgacaagagatccgtgctggacgaggaccgtgtcgtcaaacctcgagcggtcgtgacaagatgcctgtggtcaccaacccgatcacacccacgctgagcgtctctgaactacgagcgctcgcgaaccggcacgcgctgccgcccatcgtggattctcaactcgccaagacggtgacgctgcgcacgacccgcccgcttcgcgcaggcaagacgcgccagtacagtctacccgaaatcgactttcaactcttggaggccttgggagacggcttactcgaggcgagcatatgccgagtcttgtacacgaacgtcacgagtcgggctgaccgttccgcagtgctgttctccgtgagttgggtttgcgtggtctttactgccgttcagggggtcgcgtggcttattagggtatgctccccatgcaggcttatcggagtgtactccgcaacaatgggctactcgcccagctctcgcacggctaccgccttcatctgacgatgtcgccgcctctcgaccccgcgggcacggcagcaggcgcgccgttctcggccagcgtgaccaagattctcgccgactcgttcgaagcatacatcggagggttgacgcaggcatcgggcgagcaagtcgcgaggtcgtggctcgaaccactcttgatcgacctgatgggtctgatctatccggccgtggaaggaccggatgcggtttcccgcggtgagtgtcaaagatgcgctggcgttcccgcgctgcagagctgaagaccctttcctttttgcaggccagcgtacgccccgtaccgaaccgaacgccacgcctcgcaccgaacccgtcgccgccgaacccgtcgcccagcgacctccgaagcgtccgcgcgacgacgcatagcaaacatggcagtgtcgctcttctcttttgcttgcttgactagcttgacttcgagcctgtgtcaattcgattcgaacagcaattctgcggcgagcttgcaccaagtcaccagagatccagaacgaaagagagactggctacgagagctgtcttcgttcagtggcttttggggtgccaagagtatagtagggcgtagaagaagctgaaaagagggaccgagaaagaacacgatgacaactctgtccatttcgctacacacgtctgcaaacccgttctacatgctcgtgtccacccggcaaagctcagtcgcgaccagcgcacacctcgccacgggaaaagatcccgagattgtctatatgatatccttgaaaaccggctcgaaacacttgtgtccttcagtggaagggcacgttgcgaatgcgaccgcccgagccaaattgccggtgcggcagcgcgacttcaaggtcgcgacgaacgcggcgagtcaggcgcttcgagtcggccttggcgagcgagcaacccttgaccggaccggggcagacggcgtcgatcgagcccgacttggtgacggcgttggtgacgcactgctggacctgcgagatgcacgagacgtacgcggcgccgtacgaagtctggttgttgaagaacgactcgagcgacgagttgagttcggcttgcgtgaggttgtgcgcgttcgcggtcgagttgttgagcagagtcgacgagtagtcgacgaggtcggtgaagaaggacgaggggaggtagccgtcgtactgctgcgcgatcgagaggatcgtcgtctgcgtgacgacgggagcggcggactgggtgatacattcctgagcggcggtggcgttgccggctgttgagaaggtcgacttgggtcagccatgcgatctcgacaacacgtccataaggtcgtcgcgacgcactggagatgagttcggcagcgcacgactgcaagatctcggcggcagtgaccgtgttgcccgagagcgacgacgcgaccgagttgatcgcgttcgagatctgggcgccgacctgcgcgccgagctgagcgctcggggtcgtcgcgtgctggatgttgtacgagaggatgttttcgacgctggtggtcaaagaagcgggcaagacgccgacaaactgctcgaggacgccgttcatggccatctggagcgtcgtgtaggctccgccgggcttggtgaagcacgcgagcgaggaggtgttgccggcctgctggatcgcgtccgtgtagcactgcgagacctgctcgagagccgtgaccgagttgccggacagcgaagcgatgaccgactggatcgaagactggatctgggtgacgagggcctgctccgacgcgggcaggagcgtgccgagcaacggcgtgacggcgtcaaagacggacgagaggatcgtgttcggaaggatgccgacaaactgcgaccgtctcaggtcagtatgggcgcgagaggtgaaacgcgcgcgcgcgagacaaaagcgcacctgctcgaggatggtgttgagagtcgcctggaggccggccgagtcgctgccagtcggagtcaagcacgagtacccggagggcataccgcctgcggcgagaacctccgagagacacttttcgagcgctgccgtcgtggtggcattcaagtcactctggctcaagttggcggcagcaaaggcctcgtcgagagcctgcttgatgttgagcgaggcggtgacggcgtccgaagttgtgatcagagtcgacgtcgagacttggagctcggtgatgttgcgagtgacggtgatgtaaaccggagccggagtcggagcgaggagagcggagatggtgccgttggcggcgaccgctgtaccgttcacggatgcggtgctgttggcgacggcggtggcggtggcggtagcggtaatgttttcggccaagatggtcgtcaccgccggcttggtgtgagtgactgagggtacaaacgcgggatcagcaatcgcgcgagaaagaagacgcgaagaaaatcgggaccaactcaccggtgatggtagtcgcgctaggcttgccgacttgcttctggatgacgctcgagatggctgtatcccccgaaacgcgagtcagtaaaggtggaagacagcaaggatttccgcgaaactcaccgccggaaagggcgcccgcgactgccggcgggatgtacgagctgttggcgaacgatccgacggcttcggcggcacccttggcgacagtctgcggcgaagcgccctggaccttgggcgccggcttcgacttgatcttggacgcgttcttggtccacgacttggacgaggcggacgagggagacttgggcttggaggcggtctgatccgacttgtggacgacgggtgcggcgttataagagttgtcttgcgaggaggtggaggacgacgagccggacgacttggacgacgacgacgacgacgacgacttgtgggaagcctgtttcttcttgctcgacgatgacgactttttcggcgacgggttgacgagcttctgaacctcagggacggtgtactcgcccggcttgtggatcacgcccgggtgatcggagcaaggttcgggcgacgcggcgaccaagagcgcgagtgacgagagggcgagcgaggtgaggctgaaggaacgcatgacggagtcgagttggtcttggccggtgtgtgtgagggggtggtagtacgagggagtgtgcgacgcgtcgggtgaaaggggacagggaaagaaagtgtgaaggtccgcgggacgaagcgagcgtgaatttaaaggaacgagtggaaggtccgcgggcgaagtgcgcggtgggggtccgagagccgctttgtgacgagagtgcaggaaaggaggagatggagaaggagagaaagcgagaaagagagaagggcgcaagacgcgaagaaagtcgcgtcgcgtcgtaaaagcgcgccgccgaaagattcacgtgcgcgtcgagatgatcggatcggcggccgacccgcatgcattatggccatcgcaactgtatgtattgcgaggctgcaaagcacacagagttgtacagaggccgagcgagcatcccgtccaacaaactcgggtcggttccagcaaatcgctcggagcgactcggaaggcgaggtaccagcgtagcctcagccacaggggacagcggactccgacgaagcctatcaggtcgtacgatgaagcatagtcggccggtcgctgagagttagagcggcggtctatgtgctgttgcagggatggccttggatgacgtcggcggttgagctgcctggtctggcgaggacggcgggccgcgtgctatggcgaggagaggcatggtacgaataactggccgatgtgtccccgcagcaggcagtctagccggttgagtgatccggagcaaagtcgaggagagaaaaagagaagcgtcgctgctcccgacccgcttctcccaacttgtcgtt

SEQ ID NO: 57 - DNA, 21152 bp, Rhodotorula sp.; identical to SEQ ID NO: 55
  source 1..21152: mol_type = other DNA

SEQ ID NO: 58 - DNA, 21152 bp, unidentified; identical to SEQ ID NO: 55
  misc_feature 1..21152: note = Fanzor polypeptide
  source 1..21152: mol_type = other DNA

SEQ ID NO: 59 - DNA, 21152 bp, Rhodotorula sp.
  source 1..21152: mol_type = other DNA
gcgccggcgcgtcatcctcgcctccgacatctaccgcgggatactccttcagccggtctttcaggacaaccccatccctgatggcctcacccacgccaacgtcatggaccggtggagcgaggccggcggcatgttcgccgtctcactcttcaccgacattgccgtctttcgcctccttggaccttccctaatgttgtagactagtagaccttatttgttgtttgttgttagtcttattctcccccagacagactcgtcagctcgtgttacagagacgagtcagcagaagaggagagcaggcattggggacctttacacaccgcgtgtaaaaaaaatcccgcgaagtctgcaaacgggcttttctgtacggtcgcggggcccatctctgccctatactacgtatacacttatcgctacaacatacgcgactgctgcaactgtgtgccgtacccctcaacttcaccggacttgccattcggctgtgaaaattcctgagatgcagagggcactcgtctcaagcggatgcgagacgaggctactctgctgacagggagatgaccgtagagagacactcaacaataacactgaatcgagcgtagattgcgagatgtgagcggtgaagaagaaaagagaggggagcccgagggcgagctacgacaaagtgcgcccgagatcctcctccaacctccacttgccgcctcatccgaataacgtgtcgtcgtcttgatcttgagcccgagagtatggtagtagtctagggggagagatcaagtcagcgagggttcgaatgaaaaagcgagcgagtgaaaaggacttagatctggaaaaggccttgaaggagcgagagcgagacgagtctgcagaacgagtcctagcatgagacttaatggacgtagcgagagcgccacgcgttatatgactccgcctttagcaatcgccccactcccgacgttcagaccattctaaagacaggcaccctctgtgtcgcttgtacttacgaggcgctgtacggccgccgccaccttcttgtcaataactgcagtcggccttgcgcctgagaaggtcccgttctaacctctgcacacggccctacacactgtattcgggtaagataagagctggaccagaatcaagcgggttcaatccgctatatctgtccaatttttccgcagatttgcgttccgaaagacacagaacctccgtctcctttgaatcggcgagcggaatcgccttgttccgtcggaagcatgtcccatatggccgctttctgcttcattctgctctcaaaaggtaatgccaagtgactgaatgccgtagtcagtggcacgaatccctcacgagtcctccggcaagtattctgtctcgaagacgattttcggtgggtggcggagtggcggcacccaccaaaagcgctcgattgcttttagcgtgtcaatacggagcccataggagtcggcgttgtagtggtatgccgctacagctggtagctccagatatcacccgttatgcagctccatgtcccactctatcgtatatgcgttgaccgccttgattgcacgcatttgtgtctcatttgcgtatatagctcaatttgcacagaacacttgcaatacgtgagtaacgtagcggttaaagtgttagcgttcggttcggtatacactttttgtcagccgagcgttcgcttcccggtgagagcatagagacaacggttctgcgttcagacggccatacttatcgcacctcctctcagacgctacaggctgctcagacaccgtccagatgacccaagtaagccaggccgttcagacgctgtccagactgatgaatccctttggcacggttgctgatcgggccgctggcgccttggaaggccgctcatccaaggagatcttcatcgagcactaccactcaatgctaggacatcagtccgatcgaatcctgcgacactacatgcgtcagcattactggtggccagaaatggtgaaggaaatcgaggcttactgccgaacttgcgcatcctgccaagctagcaaacccgaacgagccgcaccgagaggaaagctacaccctatccagctcccgttcacagcatacgaagagatttcgattgatttcaccggaccgcaccctgtcagcattgatgcggacggaatcgcgagattacattttcaccgtgattgacgccgcctccggagaagtcaagctcattccgtgcatgaaggccggtttgacgagcgcaaaatgcgcccaaatcttcctcgagaaagtgtacccgcaatggggtactccgaagacgatcctgtcggaccaagacgtccgctgggtttccgcgttctggaaagcgttccacaacgctctcggaacgacgctgcacgtgtcaaccggagcggccccttgtcgagttggccgccgctccgattggccaactcggccgctccggccatctcgacaggggatccggagcttgtcccggcggccgctgcgatggctcgattccatgcagctgatttgttctaccgagcgcatgcgagagatttacagtcgaccaccctatactaccgtgatcttgtggcgcgcaaggggcgcggtgctgcgcgccgaaatctgtatggtattctcaaactcaaatgatccggatcggctggcgcggctgcaagaggcctccacttgattggttgcctcgagaacttgaagtagtcgctagatacggttgacttagccgtttaaatacaagctatagtctcgcaaatagcgatagggaggagaatagctaaggacagctagtgtcggtagaattcgcccgagggagaagaaggaagacaaaagtcacgacgagaactacgctcagagtgcggagaccgcgggtacatgtggggggaccgggacaggtacatagtcacgatggagatcacagaaaggccgtgcttgtcgatccagattcgagaggcgagagagggcaggaagtcggaggagcgaaggatgatcgcttcgctcagaggtgtgacttggcgaggtgactcagagagcgaccctttttagcggtcgcggcggcggtgcctttgcaggtacgcttgcggcgaaccgagatcttcgcggaggtcgtttcggccgtatagcgcgggagcgaggcgttcgcgagacgaggggatcgacggagcttttggggcgacgacgccacggcgaccactcccggcatgatcggctgttcggcgcgtggggtgtcatgacgaggggtaacgggagcttgatcgacctccggcgtcggtccggcgaagtgagcggcaggggcgaagagttcgggagattgagcgcgttcgtccgcgtcgctcgagctcgtcatcgacggcgtggggccatcgaagagacccaatcccgcagcgttgatcaccaccttgaggtacgcgtcatcgagactccgaatggcgggttgtccgggttgagcgggagcgtgaagggccaagtcgagatccggcacgaaaggttgaggatggtgttccccgctcgagctcgcgagcgcgttccttccgtagaggtccgcggtgccaaagccagggctatcgaggctgccttcgcgaggagagaattccgggctagtgacgggcgagtgcgtaggccgaaaaccaggcgaaggaggggacttgcgtccctcgtcggcccagcggacgaagtggcgggctgacgtggcaggaggaggcggcgcagccgactcttgcgagggcgcggctctcgcagcagcgctcgatctcgctcgcggcagcggcccttcgcctcgtgctacacatcgacaccgacgactgtgcaccccagggcacccgcccgatctctcgagtacgcccgactccgcttttgaggactcgacggcaggacctttgtcgacaacaatgcaagttggaggccctctccgctcggtcgcatgggcagcgacaccctctcactcgagagtccgcgcgcagcatgcacgcagggcaacgacggcgttcttcgacggcataggcatcatcaacctttgcccgagacggccgcaggcgctgcgatccgtcgacgatggcattggagggaggaggcgccggcacgctctcggctcgctcgggaggcgtcgtatcccaggtgggcagattccttttgagagacgcgtgtgaagagtaacatgtgctgatgcaaagactacgatgtcggcaaaaggcgaccgaccaactcggaccttgagactcgaactgtgggcccgctgcactcagaccttgggtgggtccgacccaaggtctgagtgactgaggggcggcttttggcggcatgcctcggttgagatcgagatcgcaacaagggttgctcagcacaggcttgttcgcggagatgaactgactccgagttgcaccacagtgtagtcgccgatcgcgtgacgaaatgacgaccccgacaccgctggtgagaacgttgtgccaaaaagtatccgcgggctttcggtcgctgtttcgccgaagcagtacgccaatctgacgcgcgtgataccgcactcggttgttccaagttgacgggacaagaggctcagaatacaaggcggtatgggtggcaagagtcgcgggaacgggtgggcgtgcgagcctcgaaggcaaactgctgcaccaagtctgcactgactacgtcggtacgaagagacgtgtcacgtacggtcaagaggatgagatcgaattcaggggcggcggggtattgatcgatcacacgagatcgaaagggaaccgtctcgcgctgacccggttatcgtcgtttcgaggctggcccagagccgcgaggctatcctgctggcgatgaatggctcatgcgcagtctcaagactgaacaaggagcccgcagtgctgatcgacgctcgactccggcgagcacagaagggaagccgctcggacgcggatgccgctctcgcgtgcaacatcgccacgacgcgcatcgtgatcgaactgcgaccttggtcgaagggcgactccagtcctgacgtgcgacggacaggcgaacttgctcgagctctccctcgtcgcaatggcctcctgacttaaaacggcgtgctgtcctcgtgaccgaccgtcgataagaggagcagatggcattgacggagctaacctcaagcgctcatcgctgactgcgcgagtgcgccattctttgctacgcttgctctggagcacgcgataagctcacaagctggcagcgggccgaaatcagagcttgagcgccaaagaacccgcatgcgacgctgcgaacggaacacgcgggtaatgaactgcgacttgcttcatgcgtgacagtcaccatagcgacgcttggagtgcccgcttggaggggaaaaagtcgccgcggacaccccgcgagtgggcggacgggcgaaaggacttctccctttctcgctctaacatttgcctttactgcaaacgcttgaaggagacctcgcctcgcaccaaagcttgctctaagcgctcatatcacccatttccaaccccgccggctgcctccgctctcaacctccgactctcgaggcgcacgaaccccttctcccgttgtcccctcgacgacaaccgccgaatgctgctgccgcgcacgcagctcttgcttgcgctcgcggcttccatcgtactcgcctcgttaaccgcccgcctcgccaactggacgggaacaggaaaacagcagtccttcggagtccgcggagccggcctcgtgcacggacccttgtgagtacattgagccaagttttaccgcgcggcaaaggaaactgatgcctacaatccacaacacagcgacatgggccagaagaccctcatggcgcacttgcggggcatcgcgcgcgagcagctccagacggcgcacgcgacgaccatgatggagaccgggaccggcatcaaggccacactcgggctggtcccgaggagctttggcggaagtgagttggacagctgcttactcatagccagcctcgactgaccagtggaccatcggaacagacgagtatgtcgttgtccgcgacctgaaccccgtacgattccagcttcgccaagggacgctccagtcggcgacgtgggtgagggacaagtccgccacgaacgtcgccaacaacctcgcagctgccgagcgagccaagatcgaagagatggaccgcgagatccgcgaggtcctgggcgccgagaccgtcatcatcaacattgtcgacggcgacaagaggccggaggcaaaggcagctaccctctccgaccgtcaccgtcgcttctcgcggaggcaccaccaggaatcgaagctgccctgcgggaagaagcgcgtcgagctcgaacagaccccgcccaacgactcggactggatccaccgcgctgtgagtcctttgtctggtccagtcacacacataacggagcgggagctcacgcaaactttcaaaacagggcgacgagaagacgatctactttgttgcgcccgacgaagcagatcgcctagtacagcatcttgtgacgcagtcgttcgacacaccaaagtacgacctccccgccaactctcccttcgccaacagcaacatcgatcggctcatcgacatcgtcaagcgatacccgccgtggcgtcgaattatccatacgcgcgacctcgatgcagtcatgcacacgacggcgtgcgaggcatggttcgtcctcctcacctcgtggtcaaaagtcgaggagggggcggtccttacctcggacgccacggtactcgaagacatgctcgagccgtacgttgccgagggagcgcagcggctgcattccgtccagcgcgatgtttctgctgccgctccctctgcaccaaggactggccgtggcggcgccctaggcaagaaggcgccgctgccagctcgtccaaacctccccgtgctcttgactcagctcggcgcacagtcggcattccgcccaacatccctcgacagattgccaaccgaacgacgccggggcgatacaatcgtcgtctttctccccggcgtcgacgctctcccaggcttcggcagagatcaatgtcgccgtgcgcgcgtgtcgagccttctgggaaacgactacaccggcagcggcatcaaaggcatctcttgggcgctcgtctcgagcggtctcggcgagtctttgctttcgatgagggaagaggactggtccgaccctcaaaagctcgagtcgcaggtctcttccctcgtctccctcctcgcctccaccgccgccagagccaagacgtggcgggctggaggcgactttggcgaggtcgccaagatctcgagcaagagcacgtcgatcgggcgcgagcagatcctggacctgatcgagtcggtgcgcgttattcgaggtgagaacgtcaactacgtcgcctcgacgttctaccacaacggcgatccgcgcggacccctgcagttcaagcaagctccgccgtcgactcgcccaaatcgctacgacgtcgactcccgccagccaagccatccctacctctctcgcccaggtccgcaacacgtcgtgccacaaggtctgaaccagtcgccgacgctgccgacgagcatcgtcaacccacgcctctcgaacccgctacaaccgtctcggacggtgcccgctccgggcgagaccgatccctcccgtccaaagatgtcgaagattcgtgttcggccgctgcagatgggaggaagcgggcagagcgtgttcatggctgcgcgaacgcatggtcccgagctcactcctctcgacgacaagaccatcgcgcgaatcatacaagcagacgccagccttcctgtcgaggtcaacgacgacgacgacgcggtcgactcggaactggagattgttcccgaagatgacgacgacgacgacgacgaagacgacttcacagcagtgccaaagcaaaaaggaaagctcaatcgtgtggagtcgtactttgcaacgatcacctcgccgggcaagaaccatgccgccgcgagtcgcaagatcagcgacatcacagagtcgccccgaccagtctcgaccgcttcggcttctgccaacaatgccggccgcagcggcgcacaacagaccgccacgcgtatcacgcgtctcacatcggcaagagctcctccgccagaaccgtcgaggcgcaaagatcgcgaaccagtgcccgcgccccggcagacccgactcgcggggaatcccgcgatcaccgaacaagaggcagctctcgcatcgccagacccgatgctcctcatcatgtcgctcgccgtcaagctcgggaatcgctttgtccacagtgcgtttgcgttcttgctggaactgctgctggaacagggggaggcagggatgatggcgacgagggatctgctactccagcggaaccgagcggcgcagtgcctcggtcgtcttgctgctggcggagcataccgtgcggcgggggagcagtggttcccgcggcaaacccttgttatctctgagctggagaaggtacgtccggtcatacggtcagaatcgagatggacaagagaactgactacagtctctgagcaggaggccgtcaactcggccctcgcctccggtctcgtgcctcctcctcgactctcggtcaaggcgttcacaatagcctacgctcccttccaaaccaacctgaccgaatggccgcgaacgcacacgcgagacgaactcgtcaacttgggccagttcgtcgcgcgcgacctgtccaagaacgcagcagaagcgctgagcaaagtcctgcggaaggcgcacaaggcgttctcgctcgatccggcatcggaggctgccctgcagtcggcaaacatcgaggcttccgctcgattccgcgcgggcctcgggaactggttgggcggggtgctcgcgactgctccgttcagccaggcgtcggctcacgcaggcgccgcgaacgaagaggacaagggactgccgagtcgagaaaagaccacgtcgtacaacttgcgaaagggcacgaccggcaagagcggcgacacgcttcagcaacagcacggcctcggcccgaagatcgacccgactgacccgcgcgaaccccccgctctcgacctcgggaaagagaccgaaaagtcgctcgagcagatgatcaaaaagctcgtcgactcggtcccgcctggcagcatgttcaatcgatcagatatgcatgacgcgctactgcaagacatcaccacgatcgcgcagcgccttctagcatgccgggaccggcatctcgagatggcgctggtgctgctcagatacaagaagatcgagaacgcgacgaccatggccttcgacgacgtccttgcagggaaaatgccagagatgggggccggaacgcttgccaaggggttgctagctctggtgatgagactgcgacagatgagaacgctatcggggatcgagctcataccggtgagctgactggcacggcggcgtcgagcatagtcaaagggagactgactggcttgtccttttgacagtatttcgacccgcaatgggtcgatgtagacctgtacaccctcctccagtccggccaccggcaccgcttcaaggtgctctgcacagatctcgaaagaacctgtaccaagatcgcatgcggcctcctcccgttcgtcgatgaagacgaagggagaagagtcgagctctttgacctcttcaggcgggtgttcgaagtgtggcggattgacgaggacgaccccgacaacagagacaaggactcgccttggtcctggatcgaggccgagaggacacggtcgacgagcatccgcctggtcgtcaagaaggagagcgtgtccctcgtcgccaacctcgatcgggtcctgcgcattgtgtttggcgtggaggagaccttctacacctacatgaggcggaccggagctcaagtcgaggtgatgaaccagctcttcgatcatcgaatgttgccgaacaagttcgttcccaccgggcacatgcgcatgtcctcaacaaaggtccagttcaccggagtcgacattacgaagatgaccaaacttggacgagaggcgctgccggagaagagtatggctgtctgatgccgaaaagaattgagctgcgctgactcgccctacccagatctcgacgcaggaaccgcatgggcgcacgtctcacaactaccgctcactcaactgaaggtcaaggagtactttgccaagatgatgccgtcctttcagcgtcgcgtcgtcaacggcgagatcgtgtttgtaccgatcgtcgccatcgcaaaacccgacgcagacgtgatgctctcggaacggcgcgatccattgccgcccagatccgctcctcaggaagggctctcgcgcaaagagcgacggcgcgagcggcagcggcaagacgccctggaccgagatcgctccccggtcgacctccgaacgccggtacgcgagaaggcgccaccaagtcgaacgcgaaaggggataccggtgtcttggccaaacctgcgattcgaggggggaaggaagttggtcaatgactttcttggagacaccccgctcgaccacatccactccgccagcatcgacaccggcgtcgtctgtccagtcgcgaccttcatctcgaatccggttcgggacggcttaccaacgcagcgtgccgaggcggtggcgacctattcgcgtgagactctgctcacccagcagcgtcagaccagccgccaagcttcacacctcaactcgtatctgtcgaaccagttcgactttacccgatgggcggatccagcttccacagatgttcgagcgtcgggtacgtcgccaatgccagaaccggatccgatgcaagaccctctgctggtgaccggtctgcacttgctcaagagcatgcactcggtcttcgacgggcggtcgatccagagcaaggtcgagcgcaaggccgaggtcagttcggtggcatctcagcacgtcgatctgatattgggtggcaaggatcgctggaccgaagaggaccgcaagacgcgcaaggtcgttgtcatggtcggctcagcggacgatctcgcgaaatcttccggaatgaagggtgctgtcaccgccaacgtccttgtgcgggaaatctctgccgagctcgcgcgccgcagggtcaacttcatgatctgcgttgttcccgagaactacacatcccaacggtgcccgaacccggactgcgtcgatgcgcagggtcgccgatctcggtacgtttgctctcgtgtactctgagggtgatgcagctgaccgactggtgatctttggggacagagcggagaacccgcgtcaccagggtggaggaccaaactaccgtctcctccaatgccagcgatgtagggcggtcttccaccgggacagagtcggggctgccaacattgggagtatggggtggtgcctgctgcggagtgggttgcagctgtggggggagaactggatgggaccaggaggaaaaaaacttgcggaagcgaaaaatccctaaaaaaggggggatcaatgggatctacttgtagaaccctcgctttctccgtgatcaatctgacttctatctcctgtgtgcggtaaccacaaacaggcgcttgcgcttgcgcttccacgtccgcaaagaggcgcttggcgcttctgctcccctatggccccggcctgcttgagactccgtgtgtggactcgcatggtacagatcgacgggtctgaccgttgagaatgccggacaacgcgccggcgcgtgcgacagagcgcccgaagctttggagccggatcgggattgccggatttctcccctctcaacggtggaaagggcgtctacagatgcacatgtaccccctagtctgatcaagcttgcaccccgcggttctgccgtatccaacggtctgcgacgacgctggcacaagggcctttttcggcgaaagaggcgcttctcgcaactcgccgacggttcccgcagggatgctgggtaactctgggacggttgtaaccttcaaatggactgtatctaccgttttcaacaccagaatacgttcgtgggagaggcggcgaggccgacgactgccctggccgagtcttggagcacccgccccggcctctgcacggtcgaaaatcccaaaactctccctcatacgaccaaaaatcgtcaccgagatgctatgcttgatgtacggccccgcgccgagctctccggaacagtccgggacccaattcctgactttctcgccactcagtctcagtgttccaacttctaagcgcattgtgggtctggttacttctttcatcttgttgacagcatcagaactgacatgtaccatgttgacggattccgtcgtatcttcagaccgagctggcaaacatgattctgagccaggaaaagccggtgagttcagtgtgatgaagccatggcttgtcctgaacagttctctttgtgaatgcattcttctgaaatttgctgcttacagagaaatgactcggccgagggccggcaagcggtgagctcgagacttccaagccgaagaagcgcctgagccctctgctcaacactctgcagagccgagcaagggcagcggaccgcatgcgataccgagagcagcattgggagttctgaatgcgagaggtttgagagcccctcaaaggttgtctgaggaggagggaagaggaagagggagaggtggcaaagccggcttgctcctttttgatacgcgagcgaggtgcagcgaccgcggtgtctcttactcttgcgacactgcccacgggccgcttttcgagaaaggtgttccggcggcggccggccttaacaaaaccaaatccaggacgcgcgagaacgctcaagtcgagacaaggagacgctctcatgcgcgagggcactgaccttgacgggatcccagccctttgaatgcgctacaaagagtgtgtttcccagtgtccagccaagcaaacccgcggctgcagctgcgaggtgcgcaagttcaggagaaggtgcgcaagttcaggagattccaagacgtgacctcccgttgttcactcgttcgcacgcgtccaccaggttattgtatctgcaattttagctcgacggagcgaagccctgctcatgtatttgactatggagcatttgactgtgctgcattgcccacattcttgcagacacgggcaagtcagagaagaagaaaccgagcgcgagttgcgccacccgcaaataccctccggactgaaccgctgaagggccgacgacctgtccctgaccagtagaagtgtcgggatcccttgacttacgaccagcaggtcttgcatgtcgcccagaatcgtcaaaactgattcctcctggttgcgctcaaaagccggatggtcaggccgtgtagacccaaatcgcctgaaacttcgcaccctgggcccctataggtcaaagtccagccggccacaagctcagcccatttcaacggcggtagaggtctgccgagcgaggcgcttgtgggaaattggactagagctgtaagccttgtcgtgcagcatatcgacaatctgaacggtcaaaataatcgtgaaggtgtttgaagctgttcaggcgaaaaagatatccatagagcgcatgcttgctgagatcaggcaagcgcctcttagttgtaattaccgtcgtgcgtgccagttccgacccagcctggctcaccagctcgagatacatgctggatcgctgacccttgtgctccgcccccctccagaatcttcttcttcggtatgtctgcagcggagtctgaagtcctcgacgcgaagttgccaagtcccccaagatgaaaattaacgttcttttgttcgtgcaggatatgatcaaggaatgatgggcggcgtcaacggcgctcttgactacgtgaccacgatgggactgggatacgtcacgccgggcgtagatggggccaagccgaccgccaccgtcacgcagtcgacgaagcaggtgagtcgtcggcaacgcatctatcttgtttttgtcccgccggccacgatacctttactgaactgctgtttgcatacagggaggaatcgtctcggcctactgtacgtcccgatcgtgtctccttcccgttttcaacctgacaccggtttctctccagacctcggaactcttttgggatgcttgctcggcgggtggctcggcgataggctcggtcgcaagaagaccatctggattgggtgcatttggatcactatcggagctcccttgcaggtgagtcggagttcactcttgccaccgttccgaaagccgcgatttcactttcgccaccgttccgaaatgaactcccgccaccgctccggaagctggcgctgacctccctctctctccgacaggcagctgcacagaacgtcccctggatggtcatggcgcggatcatcaccggagtcggcacgggccacctcaacgcgatcgtcccagtctggtccgccgaaacttccggtcatctctctcgcgggttcttcattgcgcttgaattcacgctcaacatattcggcgtggtcggtctatggttattcattcgtcttctgacccgcgtcctcgtggctgacgaagttgattcaccgccgccccaggttgtcgcatactggctcggttcgtttctcccgcgtctattgccgaaggagacggcgctgagtgaacgcgtcatacagagtatggactgtccttcatcggcgacgggaacacccagatccgctggcggttcccaatcgcgttccagctcgtgtaagtttcgcttacccgaccgtcgcagcagatcagacatactgatgtacgccggctctatagacctcttctcggcctcgcaatctgcaccttcttcatgcccggtacgcatttcgcctttttccggagcggacttcctcgctgactctcccgacaattgcagaatcgcctcgatggctcctcaaggcagggtatcgcgacgaggcgctgcatgtcctcactcgcttgcgctccgaagacggtcagatcaacgcggaagcccaggccgaatttgacgagatcgaccgagcgattcaaatcgacggtgcggcagaacccggctacatcgacatgacattccgctcgcacggcaagctgcatctgtcacgaagggtacgtcagattggcaaacagcgatgaaagctccgactgaccgaatcgctgttaccaacagactcagctcgcgatgtgagatcaatttgtctcctgctttccgttcctcgcgctgaccttttctctcgttctcagctggatccagatccttcaagagtggggcggtatcgccgctatcacgggtgagttccttatcgggctggtcggacgagaaaagcgcctgacgattcttttcccttcagtctaccaaccggtcatcttcggtctcgccggcttcgacgcttcgaaggcaggctgggtatcgggagtcaacacgatcacctacatgttttctacgtgagtattcaccttctccttgccacttggcgagacgtggtcgctgcaactgagtcgattttcttttgcagtcttatctgcgtcttcactctcgaccgtatcggtcgccgtgtcacgctcttctggggtacgttccacttggtcttttctttcttcggcttgctcttgaagcgatcactgacgaaacatgaccatgcgcaggcggcgcggttcaggctttcgcgctcatcatggcgggcgtcttcgtccaccttctcaccgttcaccccgaaaagacggctcagtacggaggtgctgctaccgctatggtgttccttgtgcgtcaagaaatgttgtctcactgtcacagactcggaatttgctgaccgggtctttcttctccagtacaccgcaactttcggcgcaacttgtgagaagtctcgccgcttcttctttgagcgaaatgaacctgacctttgtttcactacttcttaccgaaagggctcaccgtaccctggatctaccccgtgagtggcgatgccttccgccaagcgtagtcttcacattgctgacgccactcgtcttcaggccgaaatctggcccgtcaacgcacgagcgaaaggaaacgctatgggagtcgtcggatggtcgatcggtaacggatggtgcaccctcctggtccccgtcatgttcgacaagattaaggaggtcagtcccggtttttttgccgtccgtcgtcttcgctctgcctcaggtatgctgactgcctgcggtctacagaatgccctctacatcttcggcattgctaatattctcgctatcgctgtcgtgtgggcattctaccccgagaccgcgaaccgcactctcgaaggtgcgctcgtccgttcctcttccaaacgctcgcaaccccttctgactttcgagccttgccgtcttcacacagagatcgacttccttttcttcagcgacagctggttcgtgtggcacgccgaggcagagtactcgcgcctcaagaaggaactcgaggtcaccggcgaggtcccggacgatctcaagacgtcgacccacctcaaggagaagatcagcctcgacagcgccgcggcttgaacacaagagcactttccgtcggttctctagactcgtgtatatataaattctttgcctcgatcttcgcaatgtaccttcttgatgggagttcggtcctttcggtccttgatcctcttccaccttagacacattgttaccatgaggcgtctctccacgtcggaagtacggcacgctgccaacagtgcgggcgatgcgagataattgaatgggtcgcagagcaacttatgaagtctacgagatgtcaacattgacgcgattgacattcgggcgactccccgcttggcctcttcgctctcacccggcacgccaccgccacagtcctggggcctgcaagggggtcaacgtccttgcgttgcttgattgagaccggctggacgtgaaacggacgcgctctcaagcggcgccaccggcgacaagagatccgtgctggacgaggaccgtgtcgtcaaacctcgagcggtcgtgacaagatgcctgtggtcaccaacccgatcacacccacgctgagcgtctctgaactacgggcgctcgcgaaccggcacgcgctgccgcccatcgtggattctcaactcgccaagacggtgacgctgcgcacgacccgcccgcttcgcgcaggcaagacgcgccagtacagtctacccgaaatcgactttcaactcttggaggccttgggagacggcttactcgaggcgagcatatgccgagtcttgtacacgaacgtcacgagtcgggctgaccgttccgcagtgctgttctccgtgagttgggtttgcgtggtctttactgccgttcagggggtcgcgtggcttgttagggtatgctccccatgcaggcttatcggagtgtactccgcaacaatgggctactcgcccagctctcgcacggctaccgccttcatctgacgatgtcgccgcctctcgaccccgcgggcacggcagcaggcgcgccgttctcggtcagcgtgaccaagattctcgccgactcgttcgaagcatacatcggagggttgacgcaggcatcgggcgagcaagtcgcgaggtcgtggctcgaaccactcttgatcgacctgatgggtctgatctatccggccgtggaaggaccggatgcggtttcccgcggtgagtgtcaaagatgcgctggcgttcccgcgctgcagagctgaagaccctttcctttttacaggccagcgtacgccccgtaccgaaccgaacgccacgcctcgcaccgaacccgtcgccgccgaacccgtcgcccagcgacctccgaagcgtccgcgcgacgacgcatagcaaacatggcagtgtcgctcttctcttttgcttgcttgactagcttgacttcgagcctgtgtgaattcgattcgaacagcaattctgcggcgagcttgcaccaagtcaccagagatccagaacgaaagagagactggctacgagagctgtcttcgttcagtggcttttggggtgccaagagtatagtagggcgtagaagaagctgaaaagagggaccgagaaagaacacgatgacaactctgtccatttcgctacacacgtctgcaaacccgttctacatgctcgtgtccacccggcaaagctcagtcgcgaccagcgcacacctcgccacgggaaaagatcccgagattgtctatatgatatccttgaaaaccggctcgaaacacttgtgtccttcagtggaagggcacgttgcgaatgcgaccgcccgagccaaattgccggtgcggcagcgcgacttcaaggtcgcgacgaacgcggcgagtcaggcgcttcgagtcggccttggcgagcgagcaacccttgaccggtccggggcagacggcgtcgatcgagcccgacttggtgacggcgttggtgacgcactgctggacctgcgagatgcacgagacgtacgcagcgccgtacgaagtctggttgttgaagaacgactcgagcgacgagttgagttcggcttgcgtgaggttgtgcgcgttcgcggtcgagttgagcagagtggacgagtagtcgacgaggtcggcgaagaaggacgaggggaggtagccgtcgtactgctgtgcgatcgagaggatcgtcgtctgcgtgacgacgggagcggcggactgggtgatacattcctgagcggcggtggcgttgccggctgtcgagaaggtcgacttgggtcagctcattggatctcgaaagaagggcagaaggtcatcgagacgcactggatatgagttccgcagcgcacgactgcaagatctcggcggcggtgaccgtgttgcccgagagcgacgacgcgaccgagttgatcgcgttcgagatctgggcgccgacctgcgcgccgagctgagcgctcggggtcgtcgcgttctggatgttgtacgagaggatgttttcgacgctggtggtcaaggaagcgggcaagacgccgacaaactgctcgaggacgccgttcatggccgtctggagcgtcgtgtaggctccgccgggcttggtgaagcacgcgagcgaggaggtgttgccggcctgctggatcgcgtccgtgtagcactgcgagacctgctcgagagccgtgaccgagttgccggacagcgaagcgatgaccgactggatcgaagactggatctgagtgacgagggcctgctccgacgctggcaagagagtgccgagcaagggcgtaacggcgtcaaagacggacgagaggatcgtgttcggaaggatgccgacgaactgtgtgcgttcaagtcagtacgagcgcggaaaggcggacgcgcacgcgatgaaagctcacctgctcgaggatcgtgttgagcgtcgcctggagaccagccgagtcgctgccggtcggagtcaagcacgagtatccggagggcatgccgcccgccgcgagaacctccgagagacacttttcgagcgcggccgtcgtggtggcgttcaggtcgctctggctcagattcgcggcggcaaaagcctcgtcgagagcctgcttgatgttgagcgaggcagtgacggcgtccgaagttgtgatcagagtcgaagtcgagacttggagctcggtgatgttgcgagtgacggtgatgtaaaccggagccggagtcggagcgaggagagccgagatggtgccgttggcggcgaccgctgtaccgttcacggatgcggtgctgttggcgacggcactggcggtggcggtagcagtgatgttgttggccaagatggtcgttacggcaggcttggtgtgggtgactggagggagcgattcgggatcagcaatcgcgcgagaaagaagacgcgaagaaaatcgggaccaactcaccggtgatggtagtcgcgctaggcttgccgacttgcttctggatgacgctcgagatggctgtatcccccgaaacgcgagtcagtaaaggtggaagacagcaaggatttccgcgaaactcaccgccggaaagggcgcccgcgactgccggcgggatgtacgagctgttggcgaacgatccgacggcttcggcggcacccttggcgacagtctgcggcgaagcgccccggaccttgggcgccggcttcgacttgatcttggacgcgttcttggtccacgacttggacgagccggacgagggagacttgggcttggaggcggtctgatccgacttgttgacgacgggtgcggcgttattagagttgtcttgcgaggaggaggaggacgacgagcccgacgacttggacgacgacgacgacgacgacgacttgtgggaagcctgcttcttcttgctcgacgatgacgactttttcggcgacgggttgacgagcttctgaacctcgggtacggtgtactcgcccggcttgtggatcacgcccgggtgatcggagcaaggttcgggcgaggcggcgaccaagagcgcgagtgacgagagggcgagcgaggtgaggctgaaggaacgcatgacggagtcgagttggtcttggccggtgtgtgtgagggggtggtagtacgagggagtgtgcgacgcgtcgggtgaaaggggacagggaaagaaagtgtgaaggtccgcgggacgaagcgagcgtaaatttaaaggaacgagtggaaggtccgcgggcgaagtgcgcggtgggggtccgagagccgctttgtgacgagagtgcaggaaaggaggagatggagaaggagagaaagcgagaaagagagaagggcgcaagacgcgaagaaagtcgcgtcgcgtcgtaaaagcgcgccgccgaaagattcacgtgcgcgtcgagatgatcggatcggcggccgacccgcatgcattatggccatcgcaactgtatgtattgcgaggctgcaaagcacacagagttgtacagaggccgagcgagcatcccgtccaacaaactcgggtcggttccagcaaatcgctcggagcgactcggaaggcgaggtaccagcgtagcctcagccacaggggacagcggactccgacgaagcctatcaggtcgtacgatgaagcatagtcggccggtcgctgagagttagagcggcggtctatgtgctgttccagggatggccttggatgacgtcggcggttgagctgcctggtctggcgaggacggcgggccgcgtgctatggcgaggagaggcatggtacgaataactggccgatgtgtccccgcagcaggcagtctagccggttgagtgatccggagcaaagtccaacaaagtcgaggagagaaaaagagaagcgtcgctgctccc

SEQ ID NO: 60 - DNA, 21152 bp, Rhodotorula sp.; identical to SEQ ID NO: 59
  source 1..21152: mol_type = other DNA

SEQ ID NO: 61 - DNA, 21152 bp, Rhodotorula sp.; identical to SEQ ID NO: 59
  source 1..21152: mol_type = other DNA

SEQ ID NO: 62 - DNA, 21152 bp, Rhodotorula sp.; identical to SEQ ID NO: 59
  source 1..21152: mol_type = other DNA

SEQ ID NO: 63 - DNA, 21152 bp, Rhodotorula sp.; identical to SEQ ID NO: 59
  source 1..21152: mol_type = other DNA

SEQ ID NO: 64 - DNA, 21152 bp, Rhodotorula sp.; identical to SEQ ID NO: 59
  source 1..21152: mol_type = other DNA

SEQ ID NO: 65 - DNA, 21152 bp, Rhodotorula sp.; identical to SEQ ID NO: 59
  source 1..21152: mol_type = other DNA

SEQ ID NO: 66 - DNA, 21152 bp, Rhodotorula sp.
  source 1..21152: mol_type = other DNA
ggtaagtagtgctcaccgcccctaacctgcagttctcttccgaatccgacatggccaagtacgccgaagtgcgagaaaagcaacgccacgtcgacgccgtcgtcgaacgcggctttgctgacccgggactcgcccgcggcgtctgggtcgggttcaccttcaaggcgaagaaggacgtcgaacgcgcgttgcgcgaacagctggcggcgaacgagcaggacgaaaccttgcaggttctcttctgagatgccgtcccgtctctcggttactatcggacacaagccccctcgaccgattccacgccgtgctgtacataacaatctcgctcacgcctaatcgctcgatttacaaacctcactcgcccaaagacactgtttttcttctcgcgctcacgttttctctccgttcccgactcccgccgtgccatttcgttgtacacctacagtttgcctccgtttcgcccgaagctcttcgcctcctcactcgctcttgctcccttcgactgcaccgcctgtactttccgctctctgcgtgccgtgcctgtcctgtacagtagttctctcgccgtcatgcatctctcgccgtcatgcattctctcgtccagaatcgaaatgcgaatcggaaagcgggcagagcacgttggaacctcgatgcagtgataaagacagcaactacttgagcggggagggactgggtagagacaacaacaaaagaacatagagtcgtggagatgaaaagcgatagatcaagcggatgcctcgtcctggaacggcgacctcctcgcgctgccgagccactttgcttcgggggagctgtcactcgcgttcctctgactgcgtccgccacccggcttcgctttaccgccctcgagccaagccggatctccgccgcagctgtaccaactaatgcgcctcaagcgatcttcgagttcgtcccgctcctcgctcagctcgcggaccatgtcgttcccggtccggaggcagtcggccagcgacctttcgcgcgcgcggaggagttcgagttcggcgtccttgtcctgcaagctcatgcgcagcatgcggttctccatctcggtctgttgcagagagcgagagagttcttcgttgtccgtaaggcgggcgccgtccgtgtgcgtcgtttcttgaaacgagatgctggtaggcgtgcaaagatcgaaagccggcgaatgctccattgacgctccttcgccttgacggggctcgatcgacggaagctgaatcgagagcgaagaacggcgccagcggaggccaatgcggtcgccagcttcactcaaagtcgacgtactcgaccgccatgggtgactcggctgcgcatccgatggcaggtcttgcatcaaaggaaccgtcttcgcgttctggttcgcctcggccggactcgcgaactcgatggtgaccgtcggcacctgcgagaccggacggcgcggagtcgtacgagcggcatcttcggtgcgagacgagatcacgagtgaggtggggcgactggcgacggttcgacgaacgcgaccgacgacgtgggacgaggctttccgcagcaagcgccagcccttcgcgtcgacctcctccgccgccgggatcgagcctttcggcgtcaagacctgcttgttgacagccgacgcgcgcggcgtcgccgtgcattcgttcggttcttcgggatcttcgtacacctcgaaagtcggcttggtacgagcaggggaacgcccgcgccccttgacacgctcaccagcgggtccagaggcgcctttctcgaggatcgcgccaaacgtgaacaagcccggcgagacgggaggtttccccgccaaggcacgctcgaacgacgtgtacccgtcggaacgcttgaggaggctcgaatgcgcagagtgcgtcgagctcggcgagcgctcgtcttccgtgtccacctccgcgacggcgtccgtgacggaccagcgaattgtgatcgggtgcggtcgcgagcgtcgagtacgaggctggaccgtcgctgcagggtcggctggagccttctcaacccgactcggcgcactggcggtcgatttctggcggacgtgcggggcggtaaagatcgagcggagtcgctggtggatcgaagccttggagcgaacctgtcgagttggcggacccgaatccgaagccgcggctgcatcagcagcaggcggaagcgcttcaggagcggtggcgctccccgacgacgtcggcgcagtctcgacggaaatcctcgaggaggaatcaactccgtcgatgcgtatcatgcccctcgaatacagttcacgcagcgaaggggacacagagggcgacaacttgaggacgcctgggacgattgctggacggtcgtctgcgagagcggcggtctgcggcgtcgccaggtccagcgcgagaccaaggtcgctctgcttttccagcttcggagaatccggcgagttggtgccggacgtgaccgtcgacgagggcttcgggaagacgaagccttcagtgagcagcgcgttccactcgcgattggcgggagcgtccgaggcggaggagatgacggcttttcccggtcggcctccggcctggctcgggcccttccggttgaagttttcggggagtatgttaccagactctgtgacgctgcgtcgcggaccaaagacgagcgcgtcgctggtctccttctcgtcgagaggcggaagcggaaaagcgatggccggggacgaggacgagcgacgcgtagatgccgttgacgcatacgccgattcgcacgaaggaccagagctgtcgaagcacgatttgagaagctgttgttgctcgtcctctttggcgacgaggctcggcgtccggtacccgaggaaaacgaggtagaaaacgcgagcatgcgtactgtcaggagggaccggaggatgacgacaacgattgtcaatatcgcgatggaaggcttcatcgcgcaaaacccgaaagaggggtgactcacttgagcggcaacctgatctgcctctcgaccaccttggtgtcctcgatccccaacaacatggcaacgtcgctgacaatgtcttcgacgagcggctcattcacttcgtatgcagctcgcggagggtcgacccgctcgaagacgcggaaagcggcgtgaggcggagggtcgatcggctggacgatgaatgggtgcgcgagcagctttggggcgacgacgccacggcgaccactcccggcatgatcggctgttcggcgcgtggggtgtcatgacgaggggtaacgggagcttgatcgacctccggcgtcggtccggcgaagtgagcggcaggggcgaagagttcgggagattgagcgcgttcgtccgcgtcgctcgagctcgtcatcgacggcgtggggccatcgaagagacccaatcccgcagcgttgatcaccaccttgaggtacgcgtcatcgagactccgaatggcgggttgtccgggttgagcgggagcgtgaagggccaagtcgagatccggcacgaaaggttgaggatggtgttccccgctcgagctcgcgagcgcgttccttccgtagaggtccgcggtgccaaagccagggctatcgaggctgccttcgcgaggagagaattccgggctagtgacgggcgagtgcgtaggccgaaaaccaggcgaaggaggggacttgcgtccctcgtcggcccagcggacgaagtggcgggctgacgtggcaggaggaggcggcgcagccgactcttgcgagggcgcggctctcgcagcagcgctcgatctcgctcgcggcagcggcccttcgcctcgtgctacacatcgacaccgacgactgtgcaccccagggcacccgcccgatctctcgagtacgcccgactccgcttttgaggactcgacggcaggacctttgtcgacaacaatgcaagttggaggccctctccgctcggtcgcatgggcagcgacaccctctcactcgagagtccgcgcgcagcatgcacgcagggcaacgacggcgttcttcgacggcataggcatcatcaacctttgcccgagacggccgcaggcgctgcgatccgtcgacgatggcattggagggaggaggcgccggcacgctctcggctcgctcgggaggcgtcgtatcccaggtgggcagattccttttgagagacgcgtgtgaagagtaacatgtgctgatgcaaagactacgatgtcggcaaaaggcgaccgaccaactcggaccttgagactcgaactgtgggcccgctgcactcagaccttgggtgggtccgacccaaggtctgagtgactgaggggcggcttttggcggcatgcctcggttgagatcgagatcgcaacaagggttgctcagcacaggcttgttcgcggagatgaactgactccgagttgcaccacagtgtagtcgccgatcgcgtgacgaaatgacgaccccgacaccgctggtgagaacgttgtgccaaaaagtatccgcgggctttcggtcgctgtttcgccgaagcagtacgccaatctgacgcgcgtgataccgcactcggttgttccaagttgacgggacaagaggctcagaatacaaggcggtatgggtggcaagagtcgcgggaacgggtgggcgtgcgagcctcgaaggcaaactgctgcaccaagtctgcactgactacgtcggtacgaagagacgtgtcacgtacggtcaagaggatgagatcgaattcaggggcggcggggtattgatcgatcacacgagatcgaaagggaaccgtctcgcgctgacccggttatcgtcgtttcgaggctggcccagagccgcgaggctatcctgctggcgatgaatggctcatgcgcagtctcaagactgaacaaggagcccgcagtgctgatcgacgctcgactccggcgagcacagaagggaagccgctcggacgcggatgccgctctcgcgtgcaacatcgccacgacgcgcatcgtgatcgaactgcgaccttggtcgaagggcgactccagtcctgacgtgcgacggacaggcgaacttgctcgagctctccctcgtcgcaatggcctcctgacttaaaacggcgtgctgtcctcgtgaccgaccgtcgataagaggagcagatggcattgacggagctaacctcaagcgctcatcgctgactgcgcgagtgcgccattctttgctacgcttgctctggagcacgcgataagctcacaagctggcagcgggccgaaatcagagcttgagcgccaaagaacccgcatgcgacgctgcgaacggaacacgcgggtaatgaactgcgacttgcttcatgcgtgacagtcaccatagcgacgcttggagtgcccgcttggaggggaaaaagtcgccgcggacaccccgcgagtgggcggacgggcgaaaggacttctccctttctcgctctaacatttgcctttactgcaaacgcttgaaggagacctcgcctcgcaccaaagcttgctctaagcgctcatatcacccatttccaaccccgccggctgcctccgctctcaacctccgactctcgaggcgcacgaaccccttctcccgttgtcccctcgacgacaaccgccgaatgctgctgccgcgcacgcagctcttgcttgcgctcgcggcttccatcgtactcgcctcgttaaccgcccgcctcgccaactggacgggaacaggaaaacagcagtccttcggagtccgcggagccggcctcgtgcacggacccttgtgagtacattgagccaagttttaccgcgcggcaaaggaaactgatgcctacaatccacaacacagcgacatgggccagaagaccctcatggcgcacttgcggggcatcgcgcgcgagcagctccagacggcgcacgcgacgaccatgatggagaccgggaccggcatcaaggccacactcgggctggtcccgaggagctttggcggaagtgagttggacagctgcttactcatagccagcctcgactgaccagtggaccatcggaacagacgagtatgtcgttgtccgcgacctgaaccccgtacgattccagcttcgccaagggacgctccagtcggcgacgtgggtgagggacaagtccgccacgaacgtcgccaacaacctcgcagctgccgagcgagccaagatcgaagagatggaccgcgagatccgcgaggtcctgggcgccgagaccgtcatcatcaacattgtcgacggcgacaagaggccggaggcaaaggcagctaccctctccgaccgtcaccgtcgcttctcgcggaggcaccaccaggaatcgaagctgccctgcgggaagaagcgcgtcgagctcgaacagaccccgcccaacgactcggactggatccaccgcgctgtgagtcctttgtctggtccagtcacacacataacggagcgggagctcacgcaaactttcaaaacagggcgacgagaagacgatctactttgttgcgcccgacgaagcagatcgcctagtacagcatcttgtgacgcagtcgttcgacacaccaaagtacgacctccccgccaactctcccttcgccaacagcaacatcgatcggctcatcgacatcgtcaagcgatacccgccgtggcgtcgaattatccatacgcgcgacctcgatgcagtcatgcacacgacggcgtgcgaggcatggttcgtcctcctcacctcgtggtcaaaagtcgaggagggggcggtccttacctcggacgccacggtactcgaagacatgctcgagccgtacgttgccgagggagcgcagcggctgcattccgtccagcgcgatgtttctgctgccgctccctctgcaccaaggactggccgtggcggcgccctaggcaagaaggcgccgctgccagctcgtccaaacctccccgtgctcttgactcagctcggcgcacagtcggcattccgcccaacatccctcgacagattgccaaccgaacgacgccggggcgatacaatcgtcgtctttctccccggcgtcgacgctctcccaggcttcggcagagatcaatgtcgccgtgcgcgcgtgtcgagccttctgggaaacgactacaccggcagcggcatcaaaggcatctcttgggcgctcgtctcgagcggtctcggcgagtctttgctttcgatgagggaagaggactggtccgaccctcaaaagctcgagtcgcaggtctcttccctcgtctccctcctcgcctccaccgccgccagagccaagacgtggcgggctggaggcgactttggcgaggtcgccaagatctcgagcaagagcacgtcgatcgggcgcgagcagatcctggacctgatcgagtcggtgcgcgttattcgaggtgagaacgtcaactacgtcgcctcgacgttctaccacaacggcgatccgcgcggacccctgcagttcaagcaagctccgccgtcgactcgcccaaatcgctacgacgtcgactcccgccagccaagccatccctacctctctcgcccaggtccgcaacacgtcgtgccacaaggtctgaaccagtcgccgacgctgccgacgagcatcgtcaacccacgcctctcgaacccgctacaaccgtctcggacggtgcccgctccgggcgagaccgatccctcccgtccaaagatgtcgaagattcgtgttcggccgctgcagatgggaggaagcgggcagagcgtgttcatggctgcgcgaacgcatggtcccgagctcactcctctcgacgacaagaccatcgcgcgaatcatacaagcagacgccagccttcctgtcgaggtcaacgacgacgacgacgcggtcgactcggaactggagattgttcccgaagatgacgacgacgacgacgacgaagacgacttcacagcagtgccaaagcaaaaaggaaagctcaatcgtgtggagtcgtactttgcaacgatcacctcgccgggcaagaaccatgccgccgcgagtcgcaagatcagcgacatcacagagtcgccccgaccagtctcgaccgcttcggcttctgccaacaatgccggccgcagcggcgcacaacagaccgccacgcgtatcacgcgtctcacatcggcaagagctcctccgccagaaccgtcgaggcgcaaagatcgcgaaccagtgcccgcgccccggcagacccgactcgcggggaatcccgcgatcaccgaacaagaggcagctctcgcatcgccagacccgatgctcctcatcatgtcgctcgccgtcaagctcgggaatcgctttgtccacagtgcgtttgcgttcttgctggaactgctgctggaacagggggaggcagggatgatggcgacgagggatctgctactccagcggaaccgagcggcgcagtgcctcggtcgtcttgctgctggcggagcataccgtgcggcgggggagcagtggttcccgcggcaaacccttgttatctctgagctggagaaggtacgtccggtcatacggtcagaatcgagatggacaagagaactgactacagtctctgagcaggaggccgtcaactcggccctcgcctccggtctcgtgcctcctcctcgactctcggtcaaggcgttcacaatagcctacgctcccttccaaaccaacctgaccgaatggccgcgaacgcacacgcgagacgaactcgtcaacttgggccagttcgtcgcgcgcgacctgtccaagaacgcagcagaagcgctgagcaaagtcctgcggaaggcgcacaaggcgttctcgctcgatccggcatcggaggctgccctgcagtcggcaaacatcgaggcttccgctcgattccgcgcgggcctcgggaactggttgggcggggtgctcgcgactgctccgttcagccaggcgtcggctcacgcaggcgccgcgaacgaagaggacaagggactgccgagtcgagaaaagaccacgtcgtacaacttgcgaaagggcacgaccggcaagagcggcgacacgcttcagcaacagcacggcctcggcccgaagatcgacccgactgacccgcgcgaaccccccgctctcgacctcgggaaagagaccgaaaagtcgctcgagcagatgatcaaaaagctcgtcgactcggtcccgcctggcagcatgttcaatcgatcagatatgcatgacgcgctactgcaagacatcaccacgatcgcgcagcgccttctagcatgccgggaccggcatctcgagatggcgctggtgctgctcagatacaagaagatcgagaacgcgacgaccatggccttcgacgacgtccttgcagggaaaatgccagagatgggggccggaacgcttgccaaggggttgctagctctggtgatgagactgcgacagatgagaacgctatcggggatcgagctcataccggtgagctgactggcacggcggcgtcgagcatagtcaaagggagactgactggcttgtccttttgacagtatttcgacccgcaatgggtcgatgtagacctgtacaccctcctccagtccggccaccggcaccgcttcaaggtgctctgcacagatctcgaaagaacctgtaccaagatcgcatgcggcctcctcccgttcgtcgatgaagacgaagggagaagagtcgagctctttgacctcttcaggcgggtgttcgaagtgtggcggattgacgaggacgaccccgacaacagagacaaggactcgccttggtcctggatcgaggccgagaggacacggtcgacgagcatccgcctggtcgtcaagaaggagagcgtgtccctcgtcgccaacctcgatcgggtcctgcgcattgtgtttggcgtggaggagaccttctacacctacatgaggcggaccggagctcaagtcgaggtgatgaaccagctcttcgatcatcgaatgttgccgaacaagttcgttcccaccgggcacatgcgcatgtcctcaacaaaggtccagttcaccggagtcgacattacgaagatgaccaaacttggacgagaggcgctgccggagaagagtatggctgtctgatgccgaaaagaattgagctgcgctgactcgccctacccagatctcgacgcaggaaccgcatgggcgcacgtctcacaactaccgctcactcaactgaaggtcaaggagtactttgccaagatgatgccgtcctttcagcgtcgcgtcgtcaacggcgagatcgtgtttgtaccgatcgtcgccatcgcaaaacccgacgcagacgtgatgctctcggaacggcgcgatccattgccgcccagatccgctcctcaggaagggctctcgcgcaaagagcgacggcgcgagcggcagcggcaagacgccctggaccgagatcgctccccggtcgacctccgaacgccggtacgcgagaaggcgccaccaagtcgaacgcgaaaggggataccggtgtcttggccaaacctgcgattcgaggggggaaggaagttggtcaatgactttcttggagacaccccgctcgaccacatccactccgccagcatcgacaccggcgtcgtctgtccagtcgcgaccttcatctcgaatccggttcgggacggcttaccaacgcagcgtgccgaggcggtggcgacctattcgcgtgagactctgctcacccagcagcgtcagaccagccgccaagcttcacacctcaactcgtatctgtcgaaccagttcgactttacccgatgggcggatccagcttccacagatgttcgagcgtcgggtacgtcgccaatgccagaaccggatccgatgcaagaccctctgctggtgaccggtctgcacttgctcaagagcatgcactcggtcttcgacgggcggtcgatccagagcaaggtcgagcgcaaggccgaggtcagttcggtggcatctcagcacgtcgatctgatattgggtggcaaggatcgctggaccgaagaggaccgcaagacgcgcaaggtcgttgtcatggtcggctcagcggacgatctcgcgaaatcttccggaatgaagggtgctgtcaccgccaacgtccttgtgcgggaaatctctgccgagctcgcgcgccgcagggtcaacttcatgatctgcgttgttcccgagaactacacatcccaacggtgcccgaacccggactgcgtcgatgcgcagggtcgccgatctcggtacgtttgctctcgtgtactctgagggtgatgcagctgaccgactggtgatctttggggacagagcggagaacccgcgtcaccagggtggaggaccaaactaccgtctcctccaatgccagcgatgtagggcggtcttccaccgggacagagtcggggctgccaacattgggagtatggggtggtgcctgctgcggagtgggttgcagctgtggggggagaactggatgggaccaggaggaaaaaaacttgcggaagcgaaaaatccctaaaaaaggggggatcaatgggatctacttgtagaaccctcgctttctccgtgatcaatctgacttctatctcctgtgtgcggtaaccacaaacaggcgcttgcgcttgcgcttccacgtccgcaaagaggcgcttggcgcttctgctcccctatggccccggcctgcttgagactccgtgtgtggactcgcatggtacagatcgacgggtctgaccgttgagaatgccggacaacgcgccggcgcgtgcgacagagcgcccgaagctttggagccggatcgggattgccggatttctcccctctcaacggtggaaagggcgtctacagatgcacatgtaccccctagtctgatcaagcttgcaccccgcggttctgccgtatccaacggtctgcgacgacgctggcacaagggcctttttcggcgaaagaggcgcttctcgcaactcgccgacggttcccgcagggatgctgggtaactctgggacggttgtaaccttcaaatggactgtatctaccgttttcaacaccagaatacgttcgtgggagaggcggcgaggccgacgactgccctggccgagtcttggagcacccgccccggcctctgcacggtcgaaaatcccaaaactctccctcatacgaccaaaaatcgtcaccgagatgctatgcttgatgtacggccccgcgccgagctctccggaacagtccgggacccaattcctgactttctcgccactcagtctcagtgttccaacttctaagcgcattgtgggtctggttacttctttcatcttgttgacagcatcagaactgacatgtaccatgttgacggattccgtcgtatcttcagaccgagctggcaaacatgattctgagccaggaaaagccggtgagttcagtgtgatgaagccatggcttgtcctgaacagttctctttgtgaatgcattcttctgaaatttgctgcttacagagaaatgactcggccgagggccggcaagcggtgagctcgagacttccaagccgaagaagcgcctgagccctctgctcaacactctgcagagccgagcaagggcagcggaccgcatgcgataccgagagcagcattgggagttctgaatgcgagaggtttgagagcccctcaaaggttgtctgaggaggagggaagaggaagagggagaggtggcaaagccggcttgctcctttttgatacgcgagcgaggtgcagcgaccgcggtgtctcttactcttgcgacactgcccacgggccgcttttcgagaaaggtgttccggcggcggccggccttaacaaaaccaaatccaggacgcgcgagaacgctcaagtcgagacaaggagacgctctcatgcgcgagggcactgaccttgacgggatcccagccctttgaatgcgctacaaagagtgtgtttcccagtgtccagccaagcaaacccgcggctgcagctgcgaggtgcgcaagttcaggagaaggtgcgcaagttcaggagattccaagacgtgacctcccgttgttcactcgttcgcacgcgtccaccaggttattgtatctgcaattttagctcgacggagcgaagccctgctcatgtatttgactatggagcatttgactgtgctgcattgcccacattcttgcagacacgggcaagtcagagaagaagaaaccgagcgcgagttgcgccacccgcaaataccctccggactgaaccgctgaagggccgacgacctgtccctgaccagtagaagtgtcgggatcccttgacttacgaccagcaggtcttgcatgtcgcccagaatcgtcaaaactgattcctcctggttgcgctcaaaagccggatggtcaggccgtgtagacccaaatcgcctgaaacttcgcaccctgggcccctataggtcaaagtccagccggccacaagctcagcccatttcaacggcggtagaggtctgccgagcgaggcgcttgtgggaaattggactagagctgtaagccttgtcgtgcagcatatcgacaatctgaacggtcaaaataatcgtgaaggtgtttgaagctgttcaggcgaaaaagatatccatagagcgcatgcttgctgagatcaggcaagcgcctcttagttgtaattaccgtcgtgcgtgccagttccgacccagcctggctcaccagctcgagatacatgctggatcgctgacccttgtgctccgcccccctccagaatcttcttcttcggtatgtctgcagcggagtctgaagtcctcgacgcgaagttgccaagtcccccaagatgaaaattaacgttcttttgttcgtgcaggatatgatcaaggaatgatgggcggcgtcaacggcgctcttgactacgtgaccacgatgggactgggatacgtcacgccgggcgtagatggggccaagccgaccgccaccgtcacgcagtcgacgaagcaggtgagtcgtcggcaacgcatctatcttgtttttgtcccgccggccacgatacctttactgaactgctgtttgcatacagggaggaatcgtctcggcctactgtacgtcccgatcgtgtctccttcccgttttcaacctgacaccggtttctctccagacctcggaactcttttgggatgcttgctcggcgggtggctcggcgataggctcggtcgcaagaagaccatctggattgggtgcatttggatcactatcggagctcccttgcaggtgagtcggagttcactcttgccaccgttccgaaagccgcgatttcactttcgccaccgttccgaaatgaactcccgccaccgctccggaagctggcgctgacctccctctctctccgacaggcagctgcacagaacgtcccctggatggtcatggcgcggatcatcaccggagtcggcacgggccacctcaacgcgatcgtcccagtctggtccgccgaaacttccggtcatctctctcgcgggttcttcattgcgcttgaattcacgctcaacatattcggcgtggtcggtctatggttattcattcgtcttctgacccgcgtcctcgtggctgacgaagttgattcaccgccgccccaggttgtcgcatactggctcggttcgtttctcccgcgtctattgccgaaggagacggcgctgagtgaacgcgtcatacagagtatggactgtccttcatcggcgacgggaacacccagatccgctggcggttcccaatcgcgttccagctcgtgtaagtttcgcttacccgaccgtcgcagcagatcagacatactgatgtacgccggctctatagacctcttctcggcctcgcaatctgcaccttcttcatgcccggtacgcatttcgcctttttccggagcggacttcctcgctgactctcccgacaattgcagaatcgcctcgatggctcctcaaggcagggtatcgcgacgaggcgctgcatgtcctcactcgcttgcgctccgaagacggtcagatcaacgcggaagcccaggccgaatttgacgagatcgaccgagcgattcaaatcgacggtgcggcagaacccggctacatcgacatgacattccgctcgcacggcaagctgcatctgtcacgaagggtacgtcagattggcaaacagcgatgaaagctccgactgaccgaatcgctgttaccaacagactcagctcgcgatgtgagatcaatttgtctcctgctttccgttcctcgcgctgaccttttctctcgttctcagctggatccagatccttcaagagtggggcggtatcgccgctatcacgggtgagttccttatcgggctggtcggacgagaaaagcgcctgacgattcttttcccttcagtctaccaaccggtcatcttcggtctcgccggcttcgacgcttcgaaggcaggctgggtatcgggagtcaacacgatcacctacatgttttctacgtgagtattcaccttctccttgccacttggcgagacgtggtcgctgcaactgagtcgattttcttttgcagtcttatctgcgtcttcactctcgaccgtatcggtcgccgtgtcacgctcttctggggtacgttccacttggtcttttctttcttcggcttgctcttgaagcgatcactgacgaaacatgaccatgcgcaggcggcgcggttcaggctttcgcgctcatcatggcgggcgtcttcgtccaccttctcaccgttcaccccgaaaagacggctcagtacggaggtgctgctaccgctatggtgttccttgtgcgtcaagaaatgttgtctcactgtcacagactcggaatttgctgaccgggtctttcttctccagtacaccgcaactttcggcgcaacttgtgagaagtctcgccgcttcttctttgagcgaaatgaacctgacctttgtttcactacttcttaccgaaagggctcaccgtaccctggatctaccccgtgagtggcgatgccttccgccaagcgtagtcttcacattgctgacgccactcgtcttcaggccgaaatctggcccgtcaacgcacgagcgaaaggaaacgctatgggagtcgtcggatggtcgatcggtaacggatggtgcaccctcctggtccccgtcatgttcgacaagattaaggaggtcagtcccggtttttttgccgtccgtcgtcttcgctctgcctcaggtatgctgactgcctgcggtctacagaatgccctctacatcttcggcattgctaatattctcgctatcgctgtcgtgtgggcattctaccccgagaccgcgaaccgcactctcgaaggtgcgctcgtccgttcctcttccaaacgctcgcaaccccttctgactttcgagccttgccgtcttcacacagagatcgacttccttttcttcagcgacagctggttcgtgtggcacgccgaggcagagtactcgcgcctcaagaaggaactcgaggtcaccggcgaggtcccggacgatctcaagacgtcgacccacctcaaggagaagatcagcctcgacagcgccgcggcttgaacacaagagcactttccgtcggttctctagactcgtgtatatataaattctttgcctcgatcttcgcaatgtaccttcttgatgggagttcggtcctttcggtccttgatcctcttccaccttagacacattgttaccatgaggcgtctctccacgtcggaagtacggcacgctgccaacagtgcgggcgatgcgagataattgaatgggtcgcagagcaacttatgaagtctacgagatgtcaacattgacgcgattgacattcgggcgactccccgcttggcctcttcgctctcacccggcacgccaccgccacagtcctggggcctgcaagggggtcaacgtccttgcgttgcttgattgagaccggctggacgtgaaacggacgcgctctcaagcggcgccaccggcgacaagagatccgtgctggacgaggaccgtgtcgtcaaacctcgagcggtcgtgacaagatgcctgtggtcaccaacccgatcacacccacgctgagcgtctctgaactacgggcgctcgcgaaccggcacgcgctgccgcccatcgtggattctcaactcgccaagacggtgacgctgcgcacgacccgcccgcttcgcgcaggcaagacgcgccagtacagtctacccgaaatcgactttcaactcttggaggccttgggagacggcttactcgaggcgagcatatgccgagtcttgtacacgaacgtcacgagtcgggctgaccgttccgcagtgctgttctccgtgagttgggtttgcgtggtctttactgccgttcagggggtcgcgtggcttgttagggtatgctccccatgcaggcttatcggagtgtactccgcaacaatgggctactcgcccagctctcgcacggctaccgccttcatctgacgatgtcgccgcctctcgaccccgcgggcacggcagcaggcgcgccgttctcggtcagcgtgaccaagattctcgccgactcgttcgaagcatacatcggagggttgacgcaggcatcgggcgagcaagtcgcgaggtcgtggctcgaaccactcttgatcgacctgatgggtctgatctatccggccgtggaaggaccggatgcggtttcccgcggtgagtgtcaaagatgcgctggcgttcccgcgctgcagagctgaagaccctttcctttttacaggccagcgtacgccccgtaccgaaccgaacgccacgcctcgcaccgaacccgtcgccgccgaacccgtcgcccagcgacctccgaagcgtccgcgcgacgacgcatagcaaacatggcagtgtcgctcttctcttttgcttgcttgactagcttgacttcgagcctgtgtgaattcgattcgaacagcaattctgcggcgagcttgcaccaagtcaccagagatccagaacgaaagagagactggctacgagagctgtcttcgttcagtggcttttggggtgccaagagtatagtagggcgtagaagaagctgaaaagagggaccgagaaagaacacgatgacaactctgtccatttcgctacacacgtctgcaaacccgttctacatgctcgtgtccacccggcaaagctcagtcgcgaccagcgcacacctcgccacgggaaaagatcccgagattgtctatatgatatccttgaaaaccggctcgaaacacttgtgtccttcagtggaagggcacgttgcgaatgcgaccgcccgagccaaattgccggtgcggcagcgcgacttcaaggtcgcgacgaacgcggcgagtcaggcgcttcgagtcggccttggcgagcgagcaacccttgaccggtccggggcagacggcgtcgatcgagcccgacttggtgacggcgttggtgacgcactgctggacctgcgagatgcacgagacgtacgcagcgccgtacgaagtctggttgttgaagaacgactcgagcgacgagttgagttcggcttgcgtgaggttgtgcgcgttcgcggtcgagttgagcagagtggacgagtagtcgacgaggtcggcgaagaaggacgaggggaggtagccgtcgtactgctgtgcgatcgagaggatcgtcgtctgcgtgacgacgggagcggcggactgggtgatacattcctgagcggcggtggcgttgccggctgtcgagaaggtcgacttgggtcagctcattggatctcgaaagaagggcagaaggtcatcgagacgcactggatatgagttccgcagcgcacgactgcaagatctcggcggcggtgaccgtgttgcccgagagcgacgacgcgaccgagttgatcgcgttcgagatctgggcgccgacctgcgcgccgagctgagcgctcggggtcgtcgcgttctggatgttgtacgagaggatgttttcgacgctggtggtcaaggaagcgggcaagacgccgacaaactgctcgaggacgccgttcatggccgtctggagcgtcgtgtaggctccgccgggcttggtgaagcacgcgagcgaggaggtgttgccggcctgctggatcgcgtccgtgtagcactgcgagacctgctcgagagccgtgaccgagttgccggacagcgaagcgatgaccgactggatcgaagactggatctgagtgacgagggcctgctccgacgctggcaagagagtgccgagcaagggcgtaacggcgtcaaagacggacgagaggatcgtgttcggaaggatgccgacgaactgtgtgcgttcaagtcagtacgagcgcggaaaggcggacgcgcacgcgatgaaagctcacctgctcgaggatcgtgttgagcgtcgcctggagaccagccgagtcgctgccggtcggagtcaagcacgagtatccggagggcatgccgcccgccgcgagaacctccgagagacacttttcgagcgcggccgtcgtggtggcgttcaggtcgctctggctcagattcgcggcggcaaaagcctcgtcgagagcctgcttgatgttgagcgaggcagtgacggcgtccgaagttgtgatcagagtcgaagtcgagacttggagctcggtgatgttgcgagtgacggtgatgtaaaccggagccggagtcggagcgaggagagccgagatggtgccgttggcggcgaccgctgtaccgttcacggatgcggtgctgttggcgacggcactggcggtggcggtagcagtgatgttgttggccaagatggtcgttacggcaggcttggtgtgggtgactggagggagcgattcgggatcagcaatcgcgcgagaaagaagacgcgaagaaaatcgggaccaactcaccggtgatggtagtcgcgctaggcttgccgacttgcttctggatgacgctcgagatggctgtatcccccgaaacgcgagtcagtaaaggtggaagacagcaaggatttccgcgaaactcaccgccggaaagggcgcccgcgactgccggcgggatgtacgagctgttggcgaacgatccgacggcttcggcggcacccttggcgacagtctgcggcgaagcgccccggaccttgggcgccggcttcgacttgatcttggacgcgttcttggtccacgacttggacgagccggacgagggagacttgggcttggaggcggtctgatccgacttgttgacgacgggtgcggcgttattagagttgtcttgcgaggaggaggaggacgacgagcccgacgacttggacgacgacgacgacgacgacgacttgtgggaagcctgcttcttcttgctcgacgatgacgactttttcggcgacgggttgacgagcttctgaacctcgggtacggtgtactcgcccggcttgtggatcacgcccgggtgatcggagcaaggttcgggcgaggcggcgaccaagagcgcgagtgacgagagggcgagcgaggtgaggctgaaggaacgcatgacggagtcgagttggtcttggccggtgtgtgtgagggggtggtagtacgagggagtgtgcgacgcgtcgggtgaaaggggacagggaaagaaagtgtgaaggtccgcgggacgaagcgagcgtaaatttaaaggaacgagtggaaggtccgcgggcgaagtgcgcggtgggggtccgagagccgctttgtgacgagagtgcaggaaaggaggagatggagaaggagagaaagcgagaaagagagaagggcgcaagacgcgaagaaagtcgcgtcgcgtcgtaaaagcgcgccgccgaaagattcacgtgcgcgtcgagatgatcggatcggcggccgacccgcatgcattatggccatcgcaactgtatgtattgcgaggctgcaaagcacacagagttgtacagaggccgagcgagcatcccgtccaacaaactcgggtcggttccagcaaatcgctcggagcgactcggaaggcgaggtaccagcgtagcctcagccacaggggacagcggactccgacgaagcctatcaggtcgtacgatgaagcatagtcggccggtcgctgagagttagagcggcggtctatgtgctgttccagggatggccttggatgacgtcggcggttgagctgcctggtctggcgaggacggcgggccgcgtgctatggcgaggagaggcatggtacgaataactggccgatgtgtccccgcagcaggcagtctagccggttgagtgatccggagcaaagtccaacaaagtcgaggagagaaaaagagaagcgtcgctgctccc

SEQ ID NO: 67 - DNA, 21152 bp, unidentified; identical to SEQ ID NO: 55
  misc_feature 1..21152: note = Fanzor polypeptide
  source 1..21152: mol_type = other DNA

SEQ ID NO: 68 - DNA, 21152 bp, Rhodotorula sp.; identical to SEQ ID NO: 55
  source 1..21152: mol_type = other DNA

SEQ ID NO: 69 - DNA, 21152 bp, Rhodotorula sp.; identical to SEQ ID NO: 59
  source 1..21152: mol_type = other DNA

SEQ ID NO: 70 - DNA, 21152 bp, Rhodotorula sp.; identical to SEQ ID NO: 55
  source 1..21152: mol_type = other DNA

SEQ ID NO: 71 - DNA, 21152 bp, Rhodotorula sp.; identical to SEQ ID NO: 59
  source 1..21152: mol_type = other DNA

SEQ ID NO: 72 - DNA, 21152 bp, Rhodotorula sp.; identical to SEQ ID NO: 59
  source 1..21152: mol_type = other DNA

SEQ ID NO: 73 - DNA, 21152 bp, Rhodotorula sp.; identical to SEQ ID NO: 59
  source 1..21152: mol_type = other DNA

SEQ ID NO: 74 - DNA, 21152 bp, Rhodotorula sp.; identical to SEQ ID NO: 55
  source 1..21152: mol_type = other DNA

SEQ ID NO: 75 - DNA, 21152 bp, Rhodotorula sp.; identical to SEQ ID NO: 59
  source 1..21152: mol_type = other DNA

SEQ ID NO: 76 - DNA, 21152 bp, Rhodotorula sp.; identical to SEQ ID NO: 59
  source 1..21152: mol_type = other DNA

SEQ ID NO: 77 - DNA, 21152 bp, unidentified; identical to SEQ ID NO: 55
  misc_feature 1..21152: note = Fanzor polypeptide
  source 1..21152: mol_type = other DNA

SEQ ID NO: 78 - DNA, 21152 bp, Rhodotorula sp.; identical to SEQ ID NO: 59
  source 1..21152: mol_type = other DNA

SEQ ID NO: 79 - DNA, 19044 bp, Pilasporangium sp.
  source 1..19044: mol_type = other DNA
  variation 11736..11935: note = n is a, c, g, or t
aacattcaaaaatacttgacaaaaggctccgcgcttatgggcaatcttaaatttgagcttgctataagtggacgtcaatgtaagcttgatgttgctctatacggacgtttctacgtaaagaaggctgatgatgattctgatggacccagaggccaagatgatgagaatatcgacgcattcaataacaagtattctaaacttactttatcgggctcgcctagccagagtatcgatgatgaagaagatggtttcaatgaagatgactagaaaatgtctttctccattgacaatcatttttttctcgcaaataatctcaagacaaaaaaatacaaatatacaaatgaaaagtttttctacgttgtggcagctattcaataaaataatgaaacgaatcaaatcttgcttcgacaaactgaaggaatgtatcctacgctttcgctcaaatatctcatgctctcgcggtagtcagatccatgtctctcctgtctatggcgacaaagtagagctttgagagtactcgtttttttcgttttatgtggagtatccaatcaactgaatactataactagttgttgatgccgctgcagacaaatacgcctgaacagtaagatcgccataaatcaaaggaagggtgattctcaattgattgatatttgcagtgtacattggtagatataattgaacatcgttgggaggatcctgtccaagcataagagagcaataagtcgttccaacatgcacgtgagtaagtaaaagctcaacaaatgtacagccgtatggcacgatcgacgatagattataatatgcagttgttgtattagtcgctcctgaaacaatggtatacataggagtaagcatgaaatttctctcatcaactttatagactaaaaatcctagatgagaaatatgaaaattcaacgggatataatctgatgtcgaaaaaccggtaggtaaatccactaacggcagagttggattacgacaggataacaaatacccaggagtagttgaatggttcaacgcataaagatatgaaataccagctgcaccaccgcgacaatatgaaaatgtcttgttcaatgttgtgtcatctgatgctgacaatttggtagtattttcaaaatgttgaagagtcatggtattactatcttcagtgaatgctgttgtcggagcagcaaaattggatgtatatcttgcaatattactgatacgtagctcatcaagatatcctcgaaacgccaatgtgctactaccaccgactgcgatttgatcaaatgttgtattaggaacatctgctgtagttgttgcaacggtaatcccacttccatttatgaaaaacaaataggcagatcctgtaaacactagcgccatatgataccatatgttggcagctatcgcttgctgggttgctgcaacgccattggcaatattgtacgaagttccattatttcctaatgaaattgtcatagtagtcttcgaaaccatcgtgattgaaagtgcaaaattattcgataaagatgagataattgtttgatcggaaccagtgctcgtatatcggacatgaaattcaatagtccatccgggaatagtgttatccatgggcattcgactgccacgttccagtaaagcgtaagcaccaacgacattattcacgtataacgaacgtgctccaaacctatatagtgtcgtgctcaaggatgaggaacccacaagagaccatttattcaatagtgtaaatggtgtactaacgctcaatgttgaattatttgtaatatttgtgataaagcaagaattgatgtcattgccaaccactactgagattacatcaccgactttgaaatctgtggtaaaagtagtacctgtgccagttattgttgttgtcaacgcatcagttgcgattactccagaaagatttccggatctcgcaattacgtttagcgtattcggcaatgcactatttccattgatagtagttggagattctatgacgatatcgttagttgttgttttattttttgcatataaataatcaatcgtatattgtttgcttgaaatgcattttggtattgccatgtcaacatatcttactagtagtcctggtccccatttgacctttgtagatttagtcgtatcactgagtaacatgtcgcctatatttgtagaaacattgagtttttttagtgttgtagtagaatctgcgacaagaatatcaccaacattatacgtatttttccctgttccgccactggtttcggcaagaggagtcgacaatgtcaacgaagatgctgtaatcccattggcgacattgagacttgtcagagttccgacagaagtgatgttaggttgagctgctgtttgtagggtaccagttaatgttgatgcggttaccccgttagtgacattgagacttaccagggttccgactgttgtgatattgggttgagtcgcggtttgcaatgtaccagtcaaggttgatgccaccacactattagtgacattgaggtttgttagagttccaatcgctgtaatgttaggttggttggctgtctgtagagtaccagtcaatgttgacgctattactccgttagtgacattgaggcttgtcaaagttccaacagaggtaatcttcggttgatttgctgtttgtaatgtgccggttaacgttgatgcggtaataccattagtgacattgagagtcgataaggtaccaatagaagttatgttgggttgatttgcagtctgtagagtacctgtcaatgtcgatgctgttattccattcgtgacatttaagcttgtcagagttccaacggaagtgatgtttggttggctagctgtttgtagcgtaccagtgaatgttgatgcagttactccattgataacattaaggattgataaagtaccgatagaagtgatgtaaggttgcgctgatgtttgcaacgtgcctgttaatgaagatgctgttattccattagtgacattgaggcctaccagagttccaactgatgtaatgtttggctgagctgcagtttctagtgtaccaatcagcgttgtttgtaaaggatctgtactggtaacacttcttgaaccctcggtaccataacctagtgaacttattgcgtcaaatatatcgatgtcattgacgacaagagttctaacatccaatgtttcgattccagaaatgtttctcgcatcatccaatactaacgctttcgatggagatgctattccaggagttgttatagtataattcagctcttgagcagaggcttcaaccgaaactccagataacagcaatccacttgctaaatctaatggagatgacatcttgactttggaaccaacctcactggtgctaatgagtaaatcccctgtctcgctcataaagagatcagtatgtggagtcggccctatactaccataccgcaagcggcaacaagcaccattatcactcgcaacctctaattgagtatttggatcaattgtgttcaagccaacatttccatatttatcaatgtaaatcggcgttgcatgctcggtctgaacaataaacgagctatcatcatctaaatcaagaattacatttgtgcgatttgagtttattccagatttattgtaaggccatgatacgggtacctgtaaatgcttgcaatttattgacatcgcgcaagaatcattttatattattgcgattggtgtcgagaataccagctatcatttagcctgaaaaaaatccacaaagatattctcgatgcttactcgtggagataatcgttgaattcgcgtagtgtcattatgcgcgtcttgcagcaatagctcttgatcccaagaatcgcaaagatatccatgaggttcttctcttcgtcttctgattcattattgatcacgcgcatttgctggaataagcgatagagatgaccgattaggcagccgcatgtgggacacttgatatagggatacatgcttagcgaatgagtgatatatatagagtcgtatttgttgcttttatagatattaccaaaatagacgcgccgtttataaaatcctaacacaatctaactatctctatcaaagacacagatcagaccttagctaagtaacacgatgttactcttatttaccttatttttttgttattttctgttaaaaactagtaaaaatttgatagttcaagttactaaatttgtaagtatccgcgatatcagtaattccaacaactggaaagtcctaacgctaacatgcttgttttcaccaaagaacaagaactatcatttatcaattagtgacaatgtcactcatatgaagaattgagagtaaaaattcaattatttttttgaactggctttcttcgttacttgtcaaccagtgattatacacttgaagtttgtgtgaacaagtgtcacaaccttaccgacttgaaaaacctcatgcattgatttcttccagtagctttcattcatttccaaattcatcaagttctacttaagtgaccatctttcaatatgcccgcaaagggtaaaaagaagaagaagcgccgatttggcgagagtgacaatagtgacgacagcgactacgaagaggtggtgtcgaaacttcctcaattacgaacaagaccgtcagatgtggtttctaaacccaagaagaagactaagagaaaacaatcgcctcaaaaggataaacgaactgaagatcctaatcatccagtgaattggttcaatccccaagtttctcaagctctatggtttccttcgtctccttctttcaataagagcgattttcattttcgtggaagacataaaacgtggtgtggaaagaataagaagaaacccagacaacaaaaagaaaaagcaatcatccagactatctccaatatcaagaaatttcatcctatcaagaaaaagattttcaagccactcatgacttcttggtttgacgttggagatatatgcaaccaaccaacaataaaatcatcttttttgaagtcttcgaaagtaattgaacttgaaaaaggcttgagccagatttcagttattgaagatggtcctgtcaacagttcggtgaaaatacgactgtatccgacaacagaacaacgtgcatcacttgaacaaatgttcagcacacaacgagcgatctataacaagttagttgcttcttccagagctgacgttgcaagcaagatgagtttgaccaatttagagaaaaggtatcgccctatctccaaactgaaaaccatggcgaaatacttcaagaataacaagaaggctttgaaacggcacatggaacctcgtgatgaagttcgagattctgcgttccatgatttcaagaaggctgtgagttcttcacgttcgcgttattacaaacaaatggataaggatgaaaagactacatatccagcattgaaattcaagagcaagtttgatcgatccaacactatccagattgaagctcgatcgatttcaattgagaaaaaaaagtttgttcgttttcatccaagatttttcaagttcaagaaaggagagggcatcgagattcgtgaatcacttccggaattgaaacatgctgtgagattgcaacgactgcgtgaaggtgattactatctttgtattcctcgctttatacaagtggagaaaacaaagtcagagcgtgtttgtgcgattgacccaggcgttcgcaatttcatcacagtttacgatcctgaaggaagaacttttagcgtgaaagatgcgtacaaacgtcttcgcagaagctttattgcagtggataagttcaaatcacatttagcgcggtgggaaaactatagcaagaaagaatcagtcatgcatacaaagactaatcgcgaacaaaaaaatcacaagaagaagaaaaagaagaagacgaaatatcacagagtgcgttatcgaatgagaagattgattcgttttacacttcgtcatattacaagattggtgaaagacatgcatcagaaggtttcttcttggttgtcagacaactacaatattgtacttttgccggaatttcaaacatcgaagatggcaaggaagtatgaagaggaagtagcattagacgctaatcctttcattgatgaatttcgaccattcaatcgctctcgacgcaagatctccagttctactgtacgttcaatgatggcgttagctcattaccagttcaagaaattgttgatgtacaagatggagagaagaggcggacgtgttgttatatgcaacgaagcgtacacctcaatgacttgttcgaattgcggttcgattcgtcgaaatttgggaggcagtaaagtgtacagatgttcatcatgttcatttgtacacgatcgtgatatcaacgctgccaaaaatatctttcacaaaaatgtgaacttgatactaccggagattcctgctccggagagtcctgccagcttgctggcgttataggcctaaaaaaatgtggacttagtgatagttcttttatgtaacttttgcatattaggtattattgctaagtaccgaggagtccaagctaccataaataactaagttatctatccttgtatgaccacgtttgactttttaagggagacgaacgcactcccattaaaagagattagcagagtaatcccttcatcaatatgttttttgctgcgttgaaatcgcgatcgagaacttgtttacagcgcatgcaatcatacactcgattagctagtgtcattttcttcatactaccacagttggaacaagtcttggtagtatgatgagcatccactatcttgacaatcttcccatgtgttattacagtgagcaatgagaatgtcaccttttttctttgtaaatatatagctatgaaatcacttgtcgaacgacaaatttgttttcgtcttcggacccaagggtttaccctcaacaagatagccgggatccttgatatatgcaaacgaaccgttcaacgctggctcagtgttaccgaatgtgtagcacgacctctcaatagatctcacctacggaaactgaatgacaaccaacgcactcaactcgtccatttttttcttgatcacaatacaagcacgcttgctgacggagtatcttacataaaaaatacatatgacatagagatctctatacgaacagtccagcgcatcttagtagaacatagaatcacatacaaaaaggcttccattgcttatcargaagcytgtgctacacgacaacrwcawttcytrkcatcactatccaaacatacrgagagaargtggatagcgttggatgaagcagcgttctttctcaatcacagtagaaagtatgcatggagtacaaagggtcagagagctattgtgagaaaaccgggaagaagaggaaatatacattcattgattttagcaacatcacccgatggtgtaattgattggcgtttgtttccaggaagtgtaaactctgtccgttttcattcttttttgaatgggttaccaaatgaaagcaatgtcatcttagacaatgttgcaacacataaagcagtagctactttacagaatgtaggtctgtctactatttctcaaactgctcaaaagaaacacatgaacatgttgtatctgcctccgtattctccacaattgaaccctgtagaactgtgtttcaacaccatccgaacttttgtcaacgcaagcacgccacgcacatcgaacgatctcagaacatgcattcaaagtgttttaccatcactcacgccgttgatctgtagaaaaatgttcttacaaacactcgcaatcaaatgaaacgcaagcaaacaaagaacatctggcaatatagggaggttttttcggcttctttattggcttgaaagaaaaacatatgagagaaatgaatgctcaactgctactgggttctccgccattcattacaagaacgctcatttttttcccttgtttttgagcttctcattatccgaaatccaatatgggtaacaagcgaaagaagaagcgtctcgacgatagtgaagattccgactcggactttgaaccaatgacaagaagaagaattgcaacaatgactacgaccaaaaaacctcgagtgaagactaccaaagaactcaaagtgaccaacaagactgtcaaagtcatcaagaaaaccaaggaaactgagaaacccaagcgtgaacgtcctgatgtaatcgaacgtgcagctgccaacgccaacacggacatcactgtagtgaagactactctcaattcgttttgcaagaagaaagcaaaggcgttaccgtggacgggcgttcttttcgatatgaacaaggctattcttgaagcttatgtgtttgcaaatcttcatatcgctcgactatgtgctgaaagtcgttctattcccaaactcgatcagacgttcttctacaagtgtttgtctgctgtaactgttggaaaccgaaaaaagaaagcgatcaaggatgaagttttcaaagaatccgtgagactctataattcctggcgtgatccgactgttgaacgtgcagatagcacttttattacgtctggatggcataacaacgcaagtcagcaaatggcaacaaacgcttccaactcggtggaaaccaacttctatcgacggttcaagagatatttgagacacaaatacaaattggatggaaaacaagcgtacaacaagatgaaggatatctttgcccaagagtacaatggtaacgatttgattatctggagatatcgtttgcaaatgcctcgacatgaaaacggacatgtcaaccatgctccacatctactcatgccgttacagtatagatttctccgctactttgagtccaagcacccagtccagcagtacacccaagagagtaaacaggtccgtttgttcagccttcttccatacaagcgtgggtttgagtgctcacatttcaagatgtgtacggacggactatgggcgctactgaaacgtgctggtcttgatattcctcacaaacgtggtggatggagaaatatttctgataaatggtgggaaaaacttttctatatcaaaaatttgaaaccaagaatcgaaagtttgctggagaaattgtaactgatggtaaagctgtcagcatcgtactccggaaaccaaaagtggaagttgttcctcaagaaccaaatctgaaggattacgatgtgatatggggtcttgatcccggcagaagagatctctttgtggctacaaatcagaacgatcaaaagatttcgtgttcttccaaggagtactatgaagatgccaaatttagacatagcggraagaaaatcagatgctggcaagagaaggacaaaatggtactcaaggcgatcagagagatgccaacgaagaagaccgcgactttacaatctttcaaggtatatatcgagtacttgatcccgtatttggatctcttattggatttcagcatggtcaagccttttcgagatctcaaattcaagcgatatgtctttatgaagaagaagttgcgcgagttatgtttgacgttgactgaagaagctggtcgccgtacgatagttggttttggtgactggagtaaccaggatattggtggttttatcaagaagtctcccgctggtcctgtcaagcgtttcgagaaacaacttcgacgatattgtactgttatctctatcgatgagtacaacacaagtaaagttcacgctcactgtcgtgagaaagagctatacaatcaatactccaagcgcaggtgtaaggatggcgaagatcatactctcaaagttcacagtgtactccattgtagttccaatggctgtcgtagtatgactgtgaacagagatgataatgcgtccaagaacatcttacgtcttactcaactactacttcgaggtgaagatcgtcctctagagttttgtagaacgtaggaatagaaaaaaagagacagtgtttacttagtgccttagggtggcaggtaggcagtttggtcctcacttcatggctgagggtctcgaacattattatccttcgggtacagaaggtgacattctcgttgccggatgtaataacgcatatctttcgttaccagtgaagatgttgtctaacgcattgatactagagattattggatctataattttttggataaactgaataaatgcattctttgaaaacaagtgtgctggatttggttgcccatttatccaagaagatccatactcatccagtacaagaataagacttatatattcctgagcaggaaataacgtgatcacaattgatttttttgatatgagcaaatgcttttgatggtattgtgcaacagattgactaacgatattatcgtcttggttatctttcttaactcgatattggtcttgctgaagtagtttcctcaaacggatctctcgttgatcactgtttaacgtgtaaagatcaacagatgctattactggatgtttagcgatattgatcatctcaaatagcctaaaagtgtctactcgtttagtgttatcgttatacgaagcggataaaacaagccctgtcgttgtcgtagtaatcaaatcgcttgagtcaatcacgacttgcttttccttatcgagttcgttgatcacgtctgttcgcttgctcaacatctgatcgatttctttaaagacaaaggcatatgatgggaacttccgatcgatttcattttcatctgaaatatattgactgaacacaggaagattaaccatcgagtaaaaccgttgaatacagtttttatggattaaggcgtatgattgcatgtcactccgcgctaagaaatgtagttttgtctttttttcttttattatcgaatcaacgtcaacaacttggattatgatagcgtcattgcgtgcatagtgatcgagtgataaatgagagctactagtaatagatccatgtccgtctactggatacccttcaatccatctaactgcggtggcccaatggctaaacatactcatctcgtctccgtcaatagattgatgaacggatggaagccacaaatattgcttatatggcttaatcttggtagctactgctatggattccttaatgtcagccgttttgtcctttgatcgtaacaaatagcttgtaaagtgatcgccggtgatgagatcttttggtttgctagttgctttaggctcagttgccgatacagcaggcgttccatccgagttgagtatctcctccaaatccatagcatctagctcatcccaatcgtctccacctctgacaaacttgtcttctgccaccaattccttgactgtattgactcccaattctgcgactagtttcttgttcttaatgctgatgtcatcttttgattttacatgcttactagcgtcccctgtaatgggactacgctgggtcccaaaacaacagcttacactaaaagcgcgagtcgaggaagcgagggcttgtctttaaagaggaaggagacttgaggacttaatggcaaatttgcaactgagttaaaattcttaaaggttcctgaaatataaccactaggcgcctatgaggctaaatgcattaaacctatgaatctgatacattaaaccttgggtacactctcagaagtgaggttgaacccagacagattcttcaactgacttgaacacgaggaaccttgttaaaacggagatatctgattggctaaaggcaaccagcttgaatctcctaatgaygatgctgcggcatcatcatatgattttgggtatctcaacccaactgactcttgtccaattatacttgatttcttaactgtagnnnnnnnnnnnnnnnnnnnnnnnnnnnnnnnnnnnnnnnnnnnnnnnnnnnnnnnnnnnnnnnnnnnnnnnnnnnnnnnnnnnnnnnnnnnnnnnnnnnnnnnnnnnnnnnnnnnnnnnnnnnnnnnnnnnnnnnnnnnnnnnnnnnnnnnnnnnnnnnnnnnnnnnnnnnnnnnnnnnnnnnnnnnnnnnnnnnnnnnntttgtccttctcttgccagcatctgattttcttcccgctatgtctaaatttggcatcttcatagtactccttggaagaacacgaaatcttttgattgttttgatttgtagccacaaagagatctcttctgccgggatcaagaccccatatcgcatcgtaatctttcaatttcggttcttgagcaactgctgctttctttttcggttttcgaagcacgatgctaacagctttaccatcagtcacaatttctccagcaaacttgcgattactggtttcaaatttttgatatgaaaaagcttggtccaccattcattggatttatctctccatccattatttttgtcgggaatatcgaggccagcgcgttttagcagtgcccaaagtccgtctgtacacatcttgaaatgtgagcactcaaacccacgcttgtatggaagaaggctgaacaaacgaagctgtttactctcttgggtgtactgctgaactgggtgcttggattcgaagtaacggagaaatctatactgtaaaggcatgagtaaatgaggagcatggttgacatctccgttttcatgtcgaggcatttgcaaacgatatgtccacacgattctatcgttaccattgtacacttgagcaaagatatccttcatcttgttgtacgcttgttctccgttcaatttgtgcttatgtctcaaatatttcttaaatcgacgataaaagttcgtttttactgagttggaagcgttcgttgccatttgctgactgacgttgttatgccatcctgacgtaataaaagtgctatctgcgcgctcaacactcggatcacgccaggaattgtagagcctcactgtttccttgaacacttcatcagcaattgctttcttttttcggtctccaacagtcacggcagacaagcacctgtagaagaacgtctgattgagttcgggaatagcacgactttctgagcatagtcgagcaatgtgaagattggcaagtatataggcttccgaaacagctttgttcatatcaaaaagaacgcccgcccatggtaacgcctttgccttcttcttgcaaaacgagttgagagtagttttcactacagtaatatccgtatcagcgttggcagctgcacgtttgatgacatctgggcgttcgcgcttggttttcttagttttcttgatgattttgacagtcttggtggtcactttgcgttctttggtagtcttcactcgaggtttttttattgtagttattgtcgcgattcttcttcttcttttcgcgggttcgaagtctgaatccgagtcttcatcgctgtcgtcaagacgcttcttctttcgcttgttactcatggtgtgagttggaaaatgaatgcttgggaaatgaaagaaaatgagagttcatgcaatgaatggcggagaatccagtagcagttgagcaatcatttctctcatatgtttttttcaacccaataaaaaagacaaaaaaacctccctctactacagatggctttctttctcttgcatgcaatttagatcgagagtgtttgtaagaacatcctcctacagatcaacggtgtgagtgttggtaaagcactttgaatgcatgttctgagatcgttcgatgtgcgtggcgtgcttgcgttgacaaaagttcggatggtgttgaaacacagttctacagggttcaattgtggagaatacggaggcagatacaacatgttcatgtgtttcttttgagcagtttgggaaatcgtggacagacctacattctgtaaagtagctactgctttatgtgttgcaacattatctaagatgacattgctttcatttggtaaaccactcaaaaaagaatgaaagcggacagagtttacacttcctgaaaacaaacgccaatcaactacaccatcgggtgatgttgctaaaatcaatgaatgtagattccctcgtattcctggctttctcacaatagctctctgtccttttatactccatgcgtactttctactgtgattgagaaagaacgctgcttcatccaacgctgtccactttctctccgtatgtttggatagtgatgacaggaattgttgttgtcgtgtagcacaggcttcttgataagcaatggaagcctttttgtatgtgattctatgttctactagtatgcgttgaactgttctcagagagatattgatgtcatatgtgttttttacgaaagtaactccgttagcaagtgtgtttgtattgtgtttgagaaaaaaactgacaagttgagtgcgttggctatcattcagtttacgtaaatgagatctattgagaggtcgtgctacacattcggtaccactgagccagcgctgaacggttcgtttgcatatatcgagtatcccagctattttagtgagggtaaatccttgaatccgaagacgaacacaaatttgtcgttcaacaactgatttcatggctatatttgtaaaaagaaaaaaaggtgacattctcgttgccggctgttttaaacatgttcaaaattgcattatttggctctataaactacagaccgtttttgattggttgacagacaaggacattttctttcatttggaaaaaaagaacgatgatgatgaaactgaattgcatgctagtgggaaatgcgagagatcctttctctgtcaatgtcattgtcggcacagacagcggctccgttgaagacctgaaggatgccattaaggagaagaagaagaacgatttggagaaaattgatgcggacaatctaatgctgtatctcgccaagagggacggtacatggttgaacagtgatggcgcgaaagctgtgacacgtggagacctttcaacaaacttcgtgaaaatgaaccctttgctgcggcttgatgaagatgaatattacgggaagaattttactcccggcaaaggtgatattcatgtcttggtggaactacccgaatcagctactgtttcgacaatcggcattaagcgatcgtttgattttgcgtttaaagcgttggatatcgagccgaaggagtatgatctcgataactggaaaaaaaacgagaataccattgtcaaaaccccaatgatgtctgaattctttaaaggcgttggtgagtttccagaaaagtattttgtccgccttgaagagatcaaattgtgggaagcgatcaaaactccacttgacgaggagatgctcagtgaaggtgaaatgcagaattcgtttgtcattgtgggttcccctggtgttggtaaatctacgttttcaatgctggtggcgttttatatcgtgaagcattaccagcgtccagtcttcattgtgcggaaactaaagagcaagaacagaccaatcgtgttcatcattcttaagcgggatggtactgcagtaaagggtcgggtaaaaattgaaaatgcatcagacgtacgtgaccaatttcttgctgaaaacggattggaacttcaagatatattcaccttgctggatggattttcagacgcagatgtgaatcgagtggggccgacattagatttaagaccattcaatttcctcgctacgtcatgtcaatatgataaaaaaagtgacgacattcttgtgaaattatttgtgcttcctgcatggagattacaagagctgaaaatgtatgcaactatgacagaatgggcaaacaagcgaattattgctgaagtaaatgatgtggaacaacttgtacatgatcagtacttatacagtggtggcggtttgcgtgaattctgtctcaaacgcaaggatttggaaaacctagttggcagatacatcgcttctgttgggcctcacttggaaaactttttgatgggcacatttggatcgacgcatagtagccaagtagatcgcattcgtcgtcattttgttgaagatcgtgagaatgttaagcaatatgaaacgccattagattggcgattggttgtagattctcagtggatgttgaagcaattgatggaaagagtgacattagaggattatcgagcactttacgcatttgcaaaaaatattggtggtagtctccatggtttgacatacgaattatgtgtacacaagttgatgacacaacgagaaaaaagtagcgtagcactacaaccatttgctgcgaatgaagcagatttcgagaatccatttgtcacgatgacagtacaatcaccaaaagtggtttgttatggtaaaaatctttccgaggcatggaaatatgtgaaagaagtactacctacaaagatgaaagtcggtgaagtcacatattggtacccagagtacaacaatttcccagcgattgatgctattgccttgtgtcaatgcaaacacaaagattcacaagtgaatgaagaagtattggtgtatcttcaaataacgatggcaaaaaccaagccgttaaattcaagccgcatgatagaactgaaagaaatattcagtggttatagtaatcaaatattggtagtactaacaccaagcgcggagatatgcgacacaatgggattgaataaagacacgaattttccaaaggctacgaactgttatcagcaaactagtgatttctccgtatgactagagatagctatgactgttttttgtatcaaaccaaaagacgaattggtaaaaatacaagtataaaacatttacgataatgtccattgaagaaaagctagcaaacttgtgcacaatgattacgatatgtgttcaggtaaaatcttttctttatcagatatgacagggatacaaatttgatgtggtttacactgtggcaattttttgcatatcacgcaaacacattgaattttagaagaacacatggaagaactgaatgcgaagaactgcaagcgctctcgaccactaatatgagagaccaaccataacatcatttgattcgaactcatttctcaatttgccagcatggcgaagatcaagcggaagaagaagaagctccaatccgacgacagtaattttgaagaagacataccagatctccctcractacgaacgatgcaaacaaggtcatcgaccaaacgtgatcgctcgccagatcatcaacaacagcaaaccaagaaaacgaaagtcgagcaactacaaattcaagatactccaagaacatggaaaccacgyatamaagcacgtttraatgctggtttatctcaattacgtatgttgttgtttacaatgatygaagacgaagaaaaagttcaacaagctattgcgtttcttcggtgctatcggatcaagattttacaacttgtaatgcgttctctacgatttccagatcctgatccaagttctcgtgttacgattgatcagtgttttgaagaccttgcaactcaagcgttcaaagaagaagaacctgattactcagctcgatggtcgtgtttgtctacgctgttgrctaatgtatttctcaattattcggatgatcgaaggcctttattggacaagttatcaaagaagaaacaagcacatcttacttccatttttggtaaaaactatattcaagtgttgcgatcgcatgaacttactgattatgaagcattgaagtcatggttttcgttccagacgcatcaaacgccgacgccaatacaacactcattgaccgaattatcagagattacagagttttcaaaaacaaagaagtggaaagttgatgagagcagacatcaagctaagtgtgaagcattcagaaccaaggaagacagaattactccaaagcacaatcttcaggttcaaataaatcaagtacggaaaaaacacaaaattgctgaaaaagaattgagtgaagttggaaaaaagaagattcaagcattgaatgctcaactcagtgtactgaaggcagaagacaaacaattactttgtagaacacgcaaatttcgactttttccgaccaaagaccaagaacgtcttttactcaagtatatggatgcctgtcgttggacatacaatcaagcgatatcacattttgtaatgacaaagaaatccaacgcagaagaattacgtgatttatacgttaccaagaaaaccaagaaaaaaaatctcagttatccgtttggaatacgtcgtgtaccagatgtgatatatgaaactcccaagaattttcgctccaacacagttcgtaaattccaaggagatgtcaagtcagcgcgcagtaattcgaagaatggaaatatcaagcgctttcactttcattacaagaagaagaaagattctccatattttacgttctcggaagatgcaaaagatgcttccattgaatatcttcctcataagtacgagagagacagaaaatccaagagaaacaaaatggtacgcgcgtacctatctatcactaatctcaagcgcatacgtatgaagattgatcctggcgtggaaattcgcaacgaaattgatatcatgtgtcagaatggccgttggtatgttggtatacctcaatttgtggaacctgcttcatttgaaaaccaaggaagatgtatcgcgttggatccaggaataaaggcgtttatgaccggtatggatttacaagggaacgttattcacattggtcgtggtaatcgagatcgtttgaatgagttacgagatcggcgaaacaaggcacaaagcaagatatcgatatttcgtgaaaagaaaggaaaaagcaaatggttggaatataatgcgtacgtgagagccaagcgtacctactactcgacaattgccaagatcaagaattcagtgaaggagatgcattaccagacatgctcgtatctcacaaaaaattacgatacgatcatccttccgatttttcgaacacaaagcatggtgaagaaaagaagaaacaagtttaacgaaggcatgctgagtttgaaccatttcgcgttccgaaaactactcgaggccaagtgtgaagtattggggaaatcgcttgtcgtctgttctgaacgatacacaagcatgacatgtggcaaatgtggttatctccatttcaagcttggttcaaacgatgtcttcaactgtcagcgatgcgagtacaaaacgggtcgtgatgagaacgcagcytttaacatcctcaagtatgttattggcggttctcttaatgtctttgaagttcacgcataaaaaatgaacgagaa

SEQ ID NO: 80 - DNA, 6113 bp, Pilasporangium sp.
  source 1..6113: mol_type = other DNA
cttctcattcactcctgctccgttctcgatcaaataatcgaccacatcaaggtaatcatcatatgttgctacatgtaatggagtctcaccatattcgctcttctcattcattgctgctccgttctcgatcaaatatttgaccacatctagatgacccccatatgctgctagatgtaatggagtcaagtcatactcgcacttcgggttcactgctgctccgttcgtctccacgaggtaccggatctcctctagatctccgactcgagcaagctcatacaccgacgaagcctgtgcactcatggcattccatgtgtgggttgataacctgatttttcacatggccatatcacaatatcatatagaaaatataccgtaatatgattattgttgtccaaatttcacctttctttgcttatctataatagaatgcaataattcaacttgattaaaacatggtctaatcgcttcaatcatcatcatcatcatcatcatcaactgtttctctgtgggcaggagttatttccttcattctcttccatcaggacgagatattcaacaaccatctccaccttcctacataatggtggcagggagacagaaatcaataaagatgatgatcctaatactctggatggctacaatcagagacgaatgacttagcaaaacaaaccaagggtatatatgcgatgttgggtcacttcattgcatttagagcttcgttcattcatgagcaaacaagatgatgctctgaagtggtagcgtcatattcagtctagtaacaaatatgatgatgaaagaaaactcgtgatgcagctaaagtaagtaagtatagtttcattcgttgtcttcgattaaacatgcagtagtagaagagatgaatatccaatattatgcgccatcagcgacgtatacaatcagaatatgaagcaaccaaaataattagttgagtttgccagacacggcaccaatcagcttgctcgtcaagccagatgcactcttgagatagcacacagggtgtccagggttgctgttaatgyaygtgtayrcyttgcatccgctcaacttggcacatgcttcacagcggagcgatgggagatttacatagactatttgaagatcgttgccatagtaatcggtatcagtttcttgtgtcgtacattgtgctggtctcgcgatgcattggtagtaagtaaggttccatggttgacagtattggtcagaaggacaccacgtgatgccagcatcagagctacagctaccgtatgcaggcgtatcgcacgttgttgcaacagcaacggatgcgaatagagcgaggaggatcgtggattggaayattcttgtgatcttgaggaggttgtgtgcaaatgaaagtaaattgcaaagtgattctttgcgtgtccctgttccaaatacgcttagatgtgataactagtttggatgtataaggaagatgagcagaaggctagactgagtcgatttgcagtagttgtgactgagtttgtcatgtctgcttcatcccattagcaacatttctaaacaaagtgtgcattcggtcatgtgaatagcaaaaacgatgtggattggcatcatatgcattttcagagaccaaattttacagcgatagcagttgacgactagtgatgactaaataagaaaatagaggatattgagatgttgaagctagtggatgttcttgaaatatgtcaatgggagacaaattcgactacttgtgaaaagcaaaaggtgatggatgaatattgatgtcgatgatcaacgataatgtcgcgcatgagcagatgatatctattgatgcagtaacaatgtctcaatgatcatttatccattggtacccaagcgctggtggcaggtgctatgacaggtttgaaacggatctcttcatggacagaaagagagacgtctcttttttttcttttacgtgaaatttttgggaaatctttgatgcaatgctcgtatttctctcatgctatgagtgtttgataaggcactgatctttgagagtaagtaaagtcttttgagcaaagtgatcttaaagatattttaccaggatgatggtttctctcacactctgtgactgcacttcctacaagacatgaaccacttgtccaatgctgatcagcgatacaagaaaagaaatgatagtctaaagctcctgttcaagatcacggtggatactgccaaacgcagcgtactatctgatatacaatgtcgtcaagttgccattgtgatgatttatgagtttatccttgaccaatacgcaattaaggtaatgtacaaagtgacagatttgagaggattggtgatttacaaagcaaatagttcaaagataagaataaacgacgatttgtaccctcaagctattcactcttgaaacatcggcatttcctagatcataactgtgagaatggcaaagtcaaatgatcttcactgacgtacagtcattctcgtacacatttacgatattgatatctctgtcttaggagtatcagagatttatctctcatatcttggctaggaatgctttgcaaatgccatattggggtgtgagaacttgtaatctctttgactgacgttaacagtgaagttgacatacatcccgtcattttcaagtcacatgatagtagtgttgtcaacaaagtcttttgggtctcttacgaagtacctatatctgtctacagtcatacttctcgatattgctatgatgtgtatcgttcatttcgcagaaagccaaccgcaggaacgcagtgcgtttgttaatgatgagatcatcttgggaaagaaaaattggtactccttgatattcctgctcgaacattgttccattggcaacgtaagtggatgacttgctgtgattgtaaaaatggtgatcggaactcaaatcgaaataaatgatccaaatgatcgaagacaatgtgttgtactaggctattcaaggacacccatctatagtatgtttcatattgtacttggtatatcgaggttatgctgtatagaatctcgtgctagtgacgggcgacggcaaccttggatctaatagcaactcgttcaaggagatcatcaagtatttacagcagaactggtgcgtagaaattcatgcgtggctgcactcgataaacgagggttacatcaaatttyaagagcagtatccagatcacgtagttgttcgtccgttggacgatgctttacaaggactggtctacttaaggtcactgatcggtgctgcaaattcggtgaataacgcgactgttgctccagttgtgcaagcaatgcctgatgtagacatggcaatgttgacgcagaacattcgtgagatgcaacaagcgttacaggcagacgacgtggaacgattaagactgctggaacaaaatgcgtgaattgtacatcagattcaaacacaggaatcccaagccgaagcggaacatgctctgcatcatgcgactttaaacgctcgtctagaagctttaacttctcaagcgacggcactcacgtattcactgacactggagctctttgagaatccaatgaccgtgagctgctgtggaaagacattttcggggctgacattggaatgctcgagacaagttagtaataattgcccgatgtgccgccgcggaaatttcacaatcactcctaatcgcgacatcatgtatcttgtggaacattatattttggaacgaacggcactgaaaagtaacttggctgccgtgaacaacagctcgcaatctcaagaagaagacgattggggagagattcattgaatgcaaaactagtttcttacgtgttgatgttgctatggcagaattgttgcaaactggtttcatcaataatcgtgctcaactaatattgggaacgttttggattaggtatttgatgattaatccatttgatgctgaatatggatcacaaatatggtatagtaaatcactgatttgattgctctcccagtcaaaataaatttaatcatcaatgaatcattggggacatagatctgagtggaagacgatttacgttaaagagaactcatccatttaccggttgatcaatgcgaattgacaacaatacaatttaagagattcaatcctcagtatgcttacattaaaaatggcaacgagaatgtcacctttttttctttgtaagaatatagctatgaaatcacttgttgaacgacaaatttgttttcatcttcggacccaaggattcactctcatcaagatagctgagattcttgatataagcaaacggactgttcaacgttggctcagtggtgctgattttgcagcacaacctctcaatcgacctcacctgcgaaaattggatgacaaccaacgcactcaactcgcccatttttttcttgatcacaatacaagcacgcttgctgatggagttgcttacataaaacgtacatatgacattgagatctctctacgaacagttcaacgcatcctagtagaacatagaatcacgtacaaaaaggcttccattgcttatcaagaagcctgtgctacacgacaacgtcatttcctagcatcattgtccaaacatacagacagaaagtggatagcgttagatgaagctgctttctttttcaatcatagtagaaagtatgcatggagtataaaaggtcagagagctattgtgagaaagcctggaagaagaggaaatctacattcgttgattttagcaacatcacctgatggtgtggttgattggcatttattttcaggaagtgtgaactcaacccgctttcattcttttttgagtgggttaccaaatgaaagcaatgttattttagataatgttccaacgcataaagcagtagctagtttacaaaatgtaggtttttctacaatttctcaaactgctcaagagaaacacatgaatatgctgtacctacctccctattmtccccagttgaaccctgtagagctatgtttcaacaccattcggacgtttgtcaatgcaaaggcaccgcgtacgttgagcgatctgagaacatgcattcagagtgcgttaccatcactcacgccattgatttgcaggaggatgttcttacaaacactctcgatctaatgaaacgcaagcaaacaaagaaggatatctgtagtagagggaggttttttcgtcttttttattagtttgaaaaaaaacatatgaaagaaatggatgctcaaccaccaatctagggaggaatcactcgcttcgttcttttttccaagctttcattttccaactcacctaatgagtggcaaacgcaaaaagaagcgccagctggacgacagcgacagtgatttcgaagaagttgtaccagatttcacacgattgaaaagcacgaaaaccaaagaacccaagaagaagcgtgaacgtccggatgtgatcgaacgtaaagctcgtaacgctaagactcaagaaaccactgtaaaaacaacgctcaactccttttgtacagaggaagcaaaacagttaccctggactgaagttttacaagatatgaacaaggcggttcttgaatcgtatgtactcgccaacctccacattgttcgactctgccaagaaagacttccactagcaaaaatcaatcaatcgttttttagtaaatgtttttctgctgtgaccattggggaaaggaagcgatcggtaatcaaggacaaagactttcttcaatctgtgaagttgtataacgagtggcgaactaaagatattcaacgagcaaataatggacacatttgtcacggttggcaacaatacgcttgtcgacaaatggcaacaaatgcttcgactgcaatcagaacgaacttttaccgaagattcaagcgatacttgagacatcgctataagttaagcggagaacaagtatacgatacgctgaacgctatccttgcacccatatatcgaggagatattccaatcgttctcaaatatcgtgcacgattggcccgaaatgaaaaaggaaaagtcgaccaaactccccacttgcttgttccgctacaatatgaatttttttcaatattttgaaaaacatcatctagtcgaaaaatatactccagaaaccaagcagcttcgtctcttcagtcttctacctttcaagaaaggctttg

SEQ ID NO: 81 - DNA, 21983 bp, unidentified
  misc_feature 1..21983: note = Fanzor polypeptide
  source 1..21983: mol_type = other DNA
tgttgttgttgctgctgctgcgggtacgccatgtttggaggaggtgttccggagtggttgatcatgttgccgttgttgaagtttggtgatgcgttggaaggggatgaggaattaccattgttggatgtgttgggattgaaggaggggcttgaagaagacataccgcgtgcggatgtcaaggcgttcttctcgctcttgctgctgttgctactgctttcttcatcacttgagcttccaccgctgcttccactgctagatcccgacgacgagccgaactcgcgaatggtaggtccggtaaacgatgacattggcattccatgagatgccgggttgttttgttgttgttgttgctgctgctgctgcggttgtgaggatgacaggttctgcaaaagctgttgcaattggtttttctggttcgtgagggactgacggtttgatgatttttgattcgagtcttgaaatgtgctgggtattgatgacgatgaggagaaggttgacttattttccggtttgtgttgtgtcattccgttactactctgttgttgagattgtaattgtggcgaaaggtttggctgctgttgctgttgttgctgctgaagctgttggggctgttgctgaagttgttgtggctgttgctgttgcattcccatagggtatgcaccgtagtaaatataaggttgtggtgtgtttccctgcatcattgtgccttggggattacctggggctcccatgtagacaccataggcgggaaagaagccaccataattcatgggctgctgctgtggttgctgcatcatctgttgctgctggccctgttggttctggtccatttgttgctgggtttggaattgcggttgctgttgtggttgctgcgagaagttctgattcatcatgttttggttggagacgtgtgcagtctgttgttggtaatatacctgctgttgttcctgggagctggactgttgcccttcttcgcgctggcggcgctgttcttcttggagtcgctgaagttgcttttgctgctcttctctttgctgctgctgctgctgttgttgctgctgctgaagttcctgcaattgtttaaaatgtcgaagacttaagctctggtctggatgtccttcctgtgagttcctattctgcattctgcgcttattggcattcaatgtgatttgctaaaatgatttgtcgtttctcaaatcgtcatccgagacgactgaagaccacaatgtacaaaaataaacgccaatctgcgaccttttgcttgcttactcgcttgttttcgccaggaggtcctcgctagacctcaacaatgtacacacaaagggggaagaaggaataaaaaataagaaaggaaaagaaaagagagaggcacacctaaataagtcaaaagctcaagttttccggcttgagctcttctcaactagtgccgcggcctgctcagctcaggctcgtcaatcgacccgatatgcccctttgcgacctactcagtcagatgccaaagtgctgccaccgacaggtacagacagacagatagaagatatctctaatgtctatatatcgtacgtatgtatgtatgtatgtatgtatgtatgtatgtatgtatgtatgtatgtatgtattatatacgctctatacgagcgagcgagtgctgcttaactctgccactactatcaccggggctcgcgcccgtggcggaggggtgagcaagctggtgtggccgccctcgccctccgcagcggtgctgcgcctagcgagcgaggctgtcttccgtcttggtcgcactcctcctccaccagcaggtgtggcggggggtgatgcgccttgatgttgagtctggaggcagagaaagcaagcggccaaagcacaagcaagctgaaggagaccacggctcgggagtcgctgcgctgccgctgccgcttcctgctgctcgaaggggtcttcgccgctgcgctgtgttgcgctgcgctgctgcctggccgccggagtgagtgccgcggcgctgcttcgaagcagtagtcgctggcggtgccttcttcgattgatcgattgatcgatcgatcgatcaattaattgtttgtttgtttgtttgtttgtttctgtttctttattgttttgttttgtgctgctgttgtgttattgtttccttttaactcttttttttttttttttctttctattcttttttccctcaattatttactatatgttctatatttaaaaaagagattagaataaattaaaaaaagaaaaacaaaataaaacaacttatgaacgaaaggaagctttcaattctatctgagtgtaagtttctgagctgattctttgcttctttcgtattgttgatccctgcagagcctgcttgcagctactgcgtacaaggagacaggcagacagatagatagagatagatgaatctctccggagaatctccaggagcacctctcagagcgagaaagggttttggcggcgccccttcttcgctgtctggtctgccgcgatgtttgttgtcttcttctgtctatgttgttgttgggaaaatgagtgtggacagcgaagaatatgaaagcaaaccaaacaaaaagccaaccaaccaaataaacaaataaacaaacagacagacaatcactatctcacagagggagagcgaagaagaaaaggagaaagaaaaggagaaagaaagaggaaatagaggactctaaaaggaaagacgaagaaatggagtggaaagagaaggaaaacaggccccaagtccaagacgagggctgattcgtcgcgcgagtgagcgaatgaatacctgttcctgctctttcccgctcttctcttcgcgaccctacgcgccgctgcctcccgttgcctcctgctgcctcctggcgccgctgcgatgggcaatttcggtttgctgattgtttttgcttggcaagttcgccagttagttagttagttagttagtttattagttacagttgcgttcttctcttctcttcccttctctttctttcttttcagatcgagaaagaagaaagaaacgagaaagggcaaaacaaaagatttttcagggacgcgagcgatgaaaataaaagagagaaaagcctgcgatgggcgccttcatgcgtcctttctccctccgaagcctccagctccgctctcttggcttggcttggcttggcttggcttggcttggcttggcttggcttggcttggcctgggccttgccctctctgcgtgcgaggccgaagtgtttgcgaagactcgctccttctgagctttctctctctctctctctctctctctctctttctctctattttttttttttttctttttttgatccgctgatcagcgtgacgataggcgaatgaattcaagctcaagaaagaaagaagccaaagggcgcagtcaactattgctcgcttggtggatgatcgcttgggagcctaagaagtagctaggtataaattggccgaaaatagaattcatagatcgattggctgattgattgattgattgattgattgatcgatgagaccgattgatggaacggaagaaagctttgcttcgatgaacaaatcttgggcaatcgaagcattgcttgatatatacgcgacgatgagaggatcactgcggcttccagtttcttttgcggtgaagaaactcgcttgcgaaggcgctgagagctctgtttagcgctgtcgtgaggcaccttttggtttgctgctgttgatacgctgcggcgaccaaaaggacttttgactctcctcacaacaagtgccccgcaaagcctaatcgcttcaccgcagtcctctaccgcagctcgattcatctccccgcatcgagcgaggtgcgttgccaagtatcttcagtcacgaaaatctctgcggggcatttttgggattcgcccctcacaacaagagtgtgcaggtattaaaagtactggagagtctctccgggagagagtttgattcgtgatgtgaggggcagccaggcctacgctgtgaacccgggttaaagaaattatggccgggcgtgtgctgtaagaagtcgttcaattttctatcgggggaagcactgttgtgggaatctctctccacacaaataacctcaattgtggaaagcacatccaagattttcaacgcgcacctccgacttgataggaccatcatcggcgagcgtttttcgccgggactcagaggcttccgagggctccgggccgccctcggcgtgttactatattatgcctctctttgattcttctccagggcatgtgccttcctcccgtcttcacgaaggtttcctggactcgcttggcgctgtaatgcggactccaacgcaatattttgttgttgagattcatcatcgcggtcaccaatttggcaaagcctctctttctttcaaagttctttccttctctctcctttttcttttccttttctcttcttcttttctccttctcaaactgccatccatacatagcgtgctaggtaagtaaatggtactgtgggtacctaattgaaacgatgatgctaagtacggctatggcagtcgaacagaggtatgtatgtatgtctgtctgtatgtatgtataccgcgacatcacaattgaccatagggtaaacagagaataagaaacgttcttcccaaagttttcaacagactttgatggaatactcgatgcgcctgaaatacgcgtagcccaaagtctgctcccgacttcacactctctgtatgctcgcgtagcttgggcgcccttgagcgcccctggcttcccgagctccagctaccccaagcttgagtacataagctcttgatttccctcttccgaggcagattctggcattctttctttctttcttcctttctttctgtctgtttattataattattattgattaaaacaacttacaatgtaatgaaagtaattattattttattttgcagagcaaacattttgtgacattctacattatttctttctttttcgataattaaatggaacccttctctggccagacttgtctacagcccaaagcctgcgtaggaggttttcgcttgctcgtttagcacgccctagagccaaagctcttcgcttgcgtacaaatgccctcagccagatcagggactaacagctccacgccgtgtcccctacgtaaatttgcttcgagaagcaccggctgcttcactggcccaacccaaggtgagagcgagcattgctggcaagcgctaacttagatactgcatcgccgctggctgcgaacttcgaagaactcgaagaactcgctcccgacgaccatttggtgttgttttttcaatcgagctagtagagctttgcttcaagctgggtgccgttcgtggctggccccagagccttcgttgaagacctcagactgtcggctctgccgtctatgagccggagttcttcaattagaattggcctcaaagcgaccatccctcgtgcgcggagcacacgatatcatgagatggcaggcaaagagcgagggcgactgagaactagcgtcaactagaactcgctctcgcccgcaatctctctccaccgctacagcgggtgtggcaatggcggagaccgagcgccataggtagcttacacgaggtagatgaggctcgctcatgcagcactcaaagccgaggtggagcagaagaagctgtcgctggtggtatactgccctacacaaagagacgccaaagggtgccgttgtacggtcattcgctcacgcgcgagctcgaccctcgtggggttctgcagaaaaggcaagcagagcctggagaagaacccgggttgaagcatcatccatcgtcttcaaatcgagacggccgccggtgcctgcctcgtgaaggtctagacgcacgaagcggcagctaactagcccacggagtttggaggtccgcgcagcctcgtcggcgccagcagcgagtagcaggtctcggtgctcagtgtgatgctgctgtcttgaggcgatttcgatacctgggtaggcctccgaggcgaaacgaaagagctcaggaaccgttagtgggtgctagctgattatagcactctaaagataagtttatatatatatatttgtgtatcatatgatattacttaaaaataaaataaatgaagtatttttggtccgttgcagttgagctgtgatgcataattgatgaacacacggagagatcgatcgatttgtgtaccaaaacagagttcgagttcgtcaatgaacggcggtgagtgagtctggggagagtcaaagcgtcggcgaagaatcaatcaaccaccgcagcaccgtgccaggctgcagctgctaagtctcttcgtcgcgggaactcccgctctgactgagcacagttcgtggagcacgaagaggagggaggcaaatcggaatacttgtatcagtaaagagcataattttccgattgctctgaaggaaggactactgctattacaccatacaacaggagagggatttgctgtagtgaggggccgctccctcacaaagaacatcccactgctactattatatattcgctcgatttgtctattgaacgtagttcgtttgggagggaggtggtatataaatacaccgcgtttccactcaaaaacaggcctcctgagtgggcttgagggccgtttgtctacgcctcgctcggccttggctcgaatagctgactataaaccatcctcggccgttggttgacgagtggttgattggttggtttgatgattgatgtcaaaaggctgcatctgttctatgtactctctatggaatgtctctctctaccgactattttataaaacaactataattataattgttacttttttccctttcttttttaaattgagttaaaatatttcataaaagaactttataaagcaagtactacaaaagatttgcttggctagaaattgaacaaattcctcgctggagacatttcagtcagggctactctagaggcgaaatggaggggttgaagaagatggaggtcatttggtaaggcaatctagtcacctacaagagtacaaaatttggcttttccgtctactgtcaatggcggcttgcacgcagtttcccagaagcggcgagttttatttggtctttaccatttgtattactcctgcaaacttgaagtaagccgcgatcggtattgcttcttctctgtaaatggatctattctatatacgctctcctcgatctcaaaacctgccgccgctccgtggttgggctggctagtgaggtacttattcgttatcaatgaaagagagcggggtgccggagatgaaaggaaatcgttttccttttctttatttgtttctgccaatctaaatctctcggggaggtcattcattcattcattccttcattcatcgccacagctccgacggttgcgcgtggaggacggcgacttgggcgtcgctcacctcgaggaaattataggctacgctaacccagcgccgtggattccctccccacccccaatccacaggcaggtcgttttctcaggtcttcgcgagcaccgcaaaattttgtctttcttgcttcaacttcgagtttcggggtccttttcatttgatcattattttttttcacgcgaataaaagtttgaaaaggagggttttataaactaagaaagaaagaaagaaagaaagaaaggaaagagaaaaaaataaattaaaaaaatcatcacccctcaaaaggaaagaccagtgctttgctgcaggactggaatcccttccatctcctctgctcagctccaagtgtcatttcatttttttcttcactgtggtcctttcgtgaagctcccgcagcgttcctctcaaaattcgcctcccccctctatgctgcactgtaaaactactcctttatttcgctggttgtttcaagtttctttactgagctccactgcctctgtataagtgcttctcatgctgagtgaaatcagcgtagcaatatctccctcggctgggaagtgctttttcgctgtgtggagggaggcgcgcaaggtttgccagcaagcgtgcttgctcaacaaagaggtgacagaaaactcgtttgttgttgtttgtgttgttctgttctgttcttcttattcttgcttctttctctctcagagcagcctcgaggcggagaagccttgaggaggcaatttgaaggggaaggcgccagagggcacgaggagggcaagtcgggcctcctccactgtcacattcatattcccgaaattcgaccccttacaagttaaagaaagattagctggtagatagatcaagagactaggtggttgataagctttttattgtggcgaaggctgctctcgtctttctttatctatcgctgtcactttgatttctgcattatctatcattatcatgtctctacgtacttgaaagtttatagtattgtgttatgttgctattttatgattattaaattactattattattacgcatatataatttgatttaattggatttatttaattacatagatataggccacaatagaattaaaatacaacaaaggactccgaagactgagcgagagaagataaaatacaaaggagagagcgtccagaccgaagtagaatatacaccagatgatggaggatatacacagcgcaagtcagtaggcagctagaggctctatagcaacaaattgctcctcagctccctccgaccgaccaaactcgatttcccattatgctccagggttgccaggaaatctaaatttccacggcaagacccgataaaaccaaccaaccaaccaaccaacaaacaaacaaaccaaacaaaaacaaaacaaaagacaggtagctaaaatggatatctgagtagaagaagcttcgagtctatcactaccgatggcaatccgactaccaagagccatgaaacgaagacgccaaagagaaaggaacgaaaagaaacgaaacaaaaagaaaagaaaagaaaagaaaaaagcagcgcattcgggcacacacactgcgcttttatttatacgaaactttcgctcgctcaaagctcgtcttgaacaagaacgaagacgattccagcgccatcctccgctggcctccatctagctccgccaaacccgccccgtcagcaaacaggcagctgcgtttcgctcccctcccccactcccgagcacggtggaagccaggcagtaccgaggcccctgccaacgccgaagcgctctggcctggcaaagccgctgctgctagtactgcttctgctatagccgcccccaaagtcagtgaaacgaagccgctcgctccagcttcgacgacgacaccgacaccgacaccgacagcgacaacggcaacgacgacagcgacaacgacgaagacaatggcggcgaggaggacgagaagagcaagaagaaagaacccacgcgtgagtttatttgcgcagggagaccatcttcgaaactgagagggcgaaagggcctttttgccttttcccctcataggtgagtgagcgagtgagtaatagagacacataaacagagcagagcagcagagagggagagggagttggcgatgcacttccttccacaagaacaccgcagctgcggggacgtgtcaaggcagagaggacgaggctctctagcgtttgattcgggcctgttctagccagaagcgagtaagcaagcaggcaagcaagcaagcgagcaggcatgcaagcgaggaagggagggagggagccagagagcgaggaggaagcagcggcaaggcgggaggggggcggaggagaggactgcccgtccctccctctcaatgcagatggcaagccaagaagcccgtgagggaagaaaggctttgtctcttacagcacttgaggtaatctatgtgtttctacaatttatctataagtccgccataggtcgaaatatgcagtatgacaaaaaccgttaaaatttcgataacttatatttcgatgtgcttgtttcatattaatcatatattatacttagttagatctttaataagaagtggaggttaggtaagaaaatggggaggccaaggaaccgccaagctccaaacactgcaagtggagcaaagctcgaatacaaaccagcaaagttctttcaccggaagtttggggtctcagcaagcgcccttcggggctgggccgatggcggacgcgtgcgcttcgcgcgcttccccggaggcaagcgcgtctatgccagtgacgatgttgagcgcatctttgattgcggttccatcggccgcgagcaacgcagctctggatgtaccgttatctacgccagagtgtcctcggccaagcaaaaggaggacctcgaacgccaggttggcgatctccagcgcgcctacccagatgcttccgccgtctacaaagacatcggtagtggggtcaatttcaaacgccaaggcctgtgctccctactggacgcctgtgaccgcggcggaatcggccaagttgtggtcatgcaccgcgaccgacttgcgcgaatcgcagtcgacctcctggaacaccttttcgaaagaaaaaatgtcaaactcgtggtacacggccaagatgcacataccggagactcagacaccttcaccaaagaccttctcggaattatcaccgtctttgtggcatcgcatcacggaaaacgagcagcgcaaaatagacggcgacgacgcagcgaggaagaagcgagcccgcatgaaggcgcgcaagacctccaagaaagaatatgaccttgtccgtgccagaaaggtcagggtataccctactaaagatcagcgtacacagttgcttaaatggtttggtgtcactagaagagcctacaatactggcgttgcgtttcatcgagatgtggcgaagggcgagaaagaagccatcaaattgcatcaagaagcgtgcatcaaaaaggattccaagacgaagcaggttttagtagatgaagatgggaatccccaaacgtatggtaccctctatggagaaaagaaagccgttcgatctaaagaaaggaatggtgctcctgaatgggttctcgaggtcccacaggctatccgtgattccgggattctggatttcttcaaggctattaacttgggacgagccaaaaacgaagaactcgctgtacaaaagaaagttcatgagcaatctttttataagtttcggaccaagcgtgatgaatcacagattttcgaagtgaatgcacgtacctggaatttgaagaaatcaaagacctccgactttcttaaaaaattccgaacacgtaaagaaaagttccccgaccagatttcgaacgccatgcgtgtgcaaatgaatcgccttgggcatgtctacttctgcttcttacgagaagaaaaaaagcgtccaatggaccaggcacccaaggcgcaccatggtgtcattgctctagacccgggtgttcgctcgtttcagacgatgtatgacgccgatggccgcgccattgaatggggcacagggaaagattttagaaccatattctatctctgtcgccgcgttgataagatccaaagcagcattgataaaaagaaaactgcatccagtgataaagacaatttcaacacccccttgaagcgcgccttctatcgcgcccaactcaagatcaagaacaagatcactgagattcaccgcaagctcgcgctttggctttgtgaaaactatcgtgttgttctcttgcccaaattcgaaacctctaagatgagcaggaggatggagcgacggatctccaagaagtctgttcgaatgatgtgtcgttggtcccattttgggttccgccaggctctcattcataaggctgagatgttcccgtggtgcaagcttgttctttgccaagaaagttacacttccaaaacatgcaatgagtgtggtaccctccaccataacctcggggcatccaagattttccaatgccctaatcccaagtgcaaccatgtagcagaccgtgatgtccatgccgccagaggcatccttttacgctacctatccaaggacatgatttaaaaaaaatcatttcattgagtcgcgggttagtctaactagctcgtgatggagtcttagctccttctatgaaatgcaagttttgcaaattttgtagtttaaaatctaggagataagttggtttgattcaaggttaaatgaattatttaaaatttggaaaatgaaatgaaaacagagtgataataggggaaaatacagaggtaacagtaacagtgctgtaggtaagaacaccttggttaggaagtaacttgatgaaaagaaggctcagtctctctcggaacgatcgctcaaccggcgatttgatgtgaatagagcatcgattacaagaactcccgcttcagcttggcctcgagcctagccatcgcagggagtgctaagcgcggcggccgtgcctcttctcttctctaccgaaggcagatatagacaactgctctctctctctctctctctctcattctctgctgctgctttgaggtccatcaaacatgcctttcgaggtgcctgcttcgcgagaagaactcaggtctttcttggcataactttgtaactcgcatactttcattgaactcgcagaaactacagctcttcgaccattgtcaggtgtatagatatatatatatcatctgatccttgattctcccggcctttcgttacttcgagcactcgtttccatcattatttatctattatctatcatttattataaatgcctcgtttacacataacattttttatttttttaaattttaaacagtacaattaggtatttctttcaaattgttaaaattacttcacttatttaaataaataaataaataaataaataaataaataaataaatgaatgaataaatagatagatagatagatagatagatagataacatatagaaaggtgcttcgatagccccttttttgccggcgcgggcgcacgatcccgcaaaaccaccacagggacgcgccaactagtaacagcttctcgacctcactgcgcgcttctaggcaagtaagagaccttttggcgctcgcaaaacaacagcggctgtaactacaaggaaaaaaagaaagtaaaaaaagagcagaaaaaactattttccctgcgagggccttcttcatattaacaagcgtaagcagcggattcgcctcgtctcgcttttacaaccgatagggcacatcagtattactgttgccacacgacgaactttgtctttagcgcgctgcattcgcgtaagaagaagctcgataagctacgctgctgaggagagagatcgagggcagtaggccttgccttgcagggcagtttcgaagcctgctcgaatttcctttttctggcgcatttgcattctcttgtttaatttcctgatcgatggtggtttttatttcaggctattcctcgaaattcatccatgcgtatctaccgaatatctaagaacagcccccctcgcgactttggagttgatcaacgtttttacctttgcagcgctgctttatctgtttgatttattatcataaactaaagcagagttaacgatacatatgcatgcatgtgatgtacgcgctctgatgacatacatttttctttggccatttgggtgaacggacgaacgaacgaacgaacggattgtctttcttgcttgccctctggaggcgtaaatggtgctaggcagacggctattcgctgctccctcctccaaaccagtcccgtactcaagtcactgcgtcgggacatacaagtaccggcggtttgtgtttctgtttccccctcgcacggttagcagatggagtacgtacctgcggacctccatgcgcaggcaaaagcgcattcgccgcaaacaacgaatcatcgtatgaaaccctcgaattgtccatgcttctcctcctttttctccagtatacgaataaatatatgttatgttatatacataatatgtgtacgagtgaagcgaaagatttaaaaataaataaattaaatgaattatatatatatatatatatatatatatattatactaaaataaagcgcagaatctctttattagttagtccattagcccaagcaacctgtttttttgtttttgtttttgtttttttactgttatagataggtcaatgagccagtcaaactgagagctggagtggtacacaggcccatccatgccgctgaccgcccctcttgagcgcctgactgccggctgatggacggtgaccagccagccaccgagggcggctgcagagaggcgcaggaaggaggcgaggggaggaggagaagaagagtctccctccgtgcgttcgattggctgtgtggagcagtggagccgtgcgccgctcagagaggttcccacagtttatcaccgcagtgtggggaggagggcatccccttccaccaatgtgcggtagaaccgctccgtggaatcaaagcgtgcggttttctgccctcccaaggcggcgtggagggcgacaaatcgacagacgctggcagccttcagcttctacctctccgagtgccctcttcctctctttcctctcagaccgagcctcattgagaaagaagagaagaaacccggaacccgaaaggagaagctcaaggaattttgcttgaactttgagaaatcactacctccctcgaagctttctttgctcgccaccccaataatgagcgagtgctgttcaaaaggatggataaagggaaaaccgataggaggtaccttctaccactagtaggctaagtagcttagctatccgtctgtgatctttaattccttgcagacactaaggcgcctgacactacctacctactatctacctactacctacctactgttatatgtctgcctgggtatacgatggttttttcttgagcctagtttcggttttcatttcaatgtttggaattccaactcgtttttttgttgctttttagctctagaaaatggaagagaaggagacgagaagaaaaacaggtttctcgcaattgtcgaagcgttacaatgtctaatggttgcttgaaaagcctcctcgcccgccgctggtagtgctagtacttgaggacaggatataccccgacacgtcctgatgctcctcatcacagcatcgtcgcatcactcatactttccttaacacagcggaaaccaagaatgtcgcccagctaccgtctactagtaggtattgttatgagctacctactttatgtgatatttaggtgtatctatctaccttctagcagtccttccgctaagacgttctagcttgcgcgctaggcagcgttccaattcatttcaaccccttacctcaaaacagacgaacaatcaaagaaacagaagcaaaatacacgagagagaaacgagaaaacccttcctttctccaggatagctggctatataggtaggtaggtacgtaggtaggtaggtaggtaggcaccagcttgcaatctgaagctttgttctttccttttctatctttgattctatttatttagcattgttaatcaaaagagagatatttttgtccctttgattattatttaattataataatttaaataataaaaaaaaaaaaaaaaaaaaaaaaaaaaaaaaccgtgtgttctacaaaaatacagcacgaattgactaaagtagatctctaggcgcttaggagtcagctatgccccgcataggtaggtagcggaaggagccgaagataaaacccgaccgaaaataattcttaattgtgaaactatataaaccctccttgttgaccaggtgtgctggacagggaatcccgagcgatagggcagatttctgtctttcgctggtgctctcttggttaaccagtcagtcagtcagtcagtcagtcgatccgtcagcctgtcaatcaatcaacttgcctgaaacaacaaagaaaaggccaaagcgaacagccttctttctgagggccacactgtcgcagaaaataaacagatctccgcatgttcacatgcggtggcctaggaaaggcgctatacaggcctagcaggcggaggtttttcccctcactatctgggtagactgcacttactgctttggaagaaaataaaactcctccgcacaaaggatcaattgcacttgggcagaaggaatactttcctttctgttgaggttggttctgacagacctgcctgatgatgatgataagtttgcaaactctgctctgctgcgcagtctcagggcgcgaggtcgtggagagagggctgcgaagccaacggagggaccagccagtgagtgcatggatggacgggcagtgaaggagcgaggagatggcacttggtatatttttattcaattatattttaaatgaaaatttatcgatcaaatatcaattgcgtcttcttcttcttctttgatttcgatttcgatttcgatttcgattcgatttcgatgaggttctttcattcattcccgtcctttttaactttaaaaggaaagagggtcttgacgcgcgaggaaggaaatcgcaaaacaggctcgagtactctcactctgctgctgcgacgaccactgctgcgaactgttccctgcttttgaacctactacgagtaatggccgcctctcgctctgaccacttagagcagctcatgaaccagcgcagtattgctacgtacctgctgtcaagaagttttccatcttgttattttgttattttgttaaaatcgttttccaattttaattttaattaatgacaataataatgatagataataacttcgagtttagaaaggaaacatgcaatatcatgcgattccatgcgttgcaacggatggtggcgcacttggccgcgactttgattgcccacggacgcgccgctcgcgacggaccgtggtcgctgcatcgaaccgcatttccaggcgagccagagaaccccacctcctttacaaacggtaatcgatcgtctcaagaaagaccaaaacaaaggaaaagaaagggaaaaagaaagaaacaacaacaacaaaagaaagaaacaacaacaaaagagaaagaaagaaagaaagaaagaaagaaagaaagaaagaaagaaagaaagaaagtgccgtctcaaattcctcgtgctggccggcatttcttcgctctggccggcattgagtcgagcctcgaggccgcgccacagagcaagcaagctccacagacacaaaagatcgatggccgccctcccatcagctccgtgtttcgataggagccgtagcaccctctaagaagatgggacggctggtgcattcattcattctgcgacgcagcagcagcagcagcagcagcagcagcagcagcagcagcagtgaagcacgaaaatggaggaggagatagagaagggtaatatctaaaggtctgcactgccgtgcatatggaggagcgaaaggataattgaaaggataaatggatggatgaattaataattaattaagcagatcgcctttgatgctttcgctcgtgcgttggcggcgcaaacagaaatctacgacctggtagagtacgaggtgaagaccgcgcctccatgtgtagattgacgtattcgctgatgcatttgtgcagttatttggttataaaggtactgcaaataaagtaacgaatgaatgaatgaatgaatgaatcaatgaatgaatgattggcgaatttgtgatgcatttgcgtagtacgtggttattgcagataaataagcgaatgaatcaatgaatcaatgagatgtgggcttatttgttgagtaaaactgcctaataagcactagtttagaagtgagtggttgttggatgggagataaatttcaattgtgatatgtaatcggcaaccgcgccaaagaacttatgagtagaagctgctacggatgcatacgggtatccagctcgatgtttattttgattattatgtcttgtcattaacttatttcttttttcttttcttttttttcttcaactaaattgaactttggaaaatcgatctcgtctcatgttcgctggctcgaagaggtgattaaagcaacctagttgcaggtcgtccttggcttggctcgcgtaagataaaaccaatctcgtgactgacaagcagtggcacaataaccatgcaactgaccgatacgcaaaaaagttctagatgaaatgcacatcgaggaaaccgccagggatgcatgtgggcgaatttacagggaagaaataggagctagctagagctaacgagctacctctagaggtgtacctctagaggatgtagaatcgcatatgcagtagagacaaaattgcaacgtcgcctacaagaaagaagcagttagtagtccccgcgacctatagggtgctgtaacagtgttttcgttttaactgatactgaacagacgcaaagacactcgactctctttggtcgaagttaataagttagaatctttctccaagttgggcaaagcaaaagcaatcacccgttacgcgatgatgagttttctagctggaggtagctagctatgtctactaccgagcgtagtacctgctgtagagcaattggtgattgattgtatgagcttttgttgttttacccaagtccagacaaacttaatgagttacgcaagagtatatagaaacaaactctcagagtaggcaggcctaggcgtctttaggtacacgacagagggctcgctaagagtggaaatcccgaacagtcagtcgttctccaaatttgcgatatcattggggaatttatgacaaatttgatctgataccctgaccggtaagggtgaatagaaactctcagagtaggcaggcctaggcgtctctagctacacgacagatggctcgctgaaagttgaatcgcgaacagtcagtcgctctccaaatttgcgatataattgagaagatttatgaggagtgagctcgatgagatcagtacaaagaaacaaaatgtgaccctttctctcacttaattaaagaacaaaacaaaacaaaacaaaacaaaaatcaagaataatggtcacatctatcgaagggcatcctgaacgcgacgaaatagagcatcagcagctgttgccatctgcgatgcccggcgctgagctgatggagaacctgaaagatgcataagaatctggtgcaaaagtaccaaggttgacgacaatgccgaagtctgtgccccaacctttactgcggattgttggtgctggtgttgttggcttgatattgatgatgagtcagatgtagacgtcccagtcgattccagagacactgccgctggagaacccgatcgtgaagttgttgaattggctccatcttgtggatatcgttgttgtgtagagtgagacctgttgatagcagcagctctaatccatctcgaggtgtcggcagaaattacagctagcaagtgcctgtactgtggaagatcctccagtacctgcaacacagaagccattcgctgccgagcaactgaaaggagtaacaacgcaagagcttcttgatcggatacgcgttcagcaatcgccttacctgcgtcatcttgaccacgtgcataaagcccataggcaagttcaacattcactttatcttcagatacctcaagcgcccttgcgagctcaaaggcatacttaggatcatccaggttagaacgtagaacacgttgtacaaggttgatacgacgcgatatgatttgtgcttcttcactatctcgagaagaacttgcttcctccgaatgatccttctgataggcttgagcaattacttcttcgttaattaatcccctggctgcatcatcagaaagcgagcctaatggagtagaagccgtatttccctgctgaaactcttcctcttgatagattgatctcgcgctaaacaattcaggacttcgcgtaaacaaactttgcaccaaccttacgggagatggaccgtctggagaaccgggacctgaaacacgtagtaaacctttcaaggcttgaaaagccacatactcgcgctggacatagtctggtgcaacacgagcagagatatgatacatttcttcgcgcacgccatcatcaagcggaggaaactccacaaccgtgttgttctttttggagtcttcattctcgctcactatatctgcttgtgtagatttataatcgttttgaggttgacttggcaaaagcccatcccgtttatcagctggaagcatcaagtacagtaaacgcattgcagcttcgcaaaactcttcgtccaatgcaatgttgtgcaaacggggaagaactgccttctctcgaacttggcacgcgataccctgagccaccccgctgttttttattccttctacgatgttgataatccttgagagatcacctgctgcgcacaaatacattgattggtgaaaacgaactaaatcatcacccagctgcaaatgcaaaggaaagcgatccaggattcctgatatatctatttgctccgttaaggccttggcgacaactttcgtgaatggagcttgggaaacatcagccagcatatcaacactcaagtcgctccgacaagtattacaacatatacatagtacatcttctaatcgatcaactgctgtttcgaaaatctcctcatcgggacgcgcacgaagtgctagacgtaccagaacaagtgcgtggcacacccttgtgttagcttgagctttcttcgttatcatcaaaataccccttgtgctattatcagaagaagaagaagtatcaacttctgtctcgccacaatcagcattggtatcacccgcgctgtcgttgtcagccttatctacatcatccaaagtttcatcgccagtgcttttttcagaaacctggtcagaaagaaaatggttcagtgcgcggacaagcacacttgatgtattactgagagcatccaaaacacgcaataagggaagtttaaaccaccagtcgatgaagagctccaaaaatctaagcctcactccacctaatgctgtcatagtctctagtacaactgaatattgaaatacatcaatgaggagaggctcgaataaccacgcagcgaacaatgctgaagagggaccatcattcagatgaacccatgcctccgatacacttggttgtacatttgatggatcggtccaacagagatcatccatgtcccgcatcacgagcgcttgaaaatttagaagaaaatcatgctcactgattgcgtctactacttgctcgagattctcagattggaaaaacggtaacagagaatcagctgtatatggaataaccgaagtatcaatgtctacgtcgtcaattgtactgccaactctcgataagacattgttgatcttccgtttactagataatgatttgtacaatctaacaagtttctctcttgccacaagtagctttgcaaggcgctcgcaagctgcatcttgattcatgtcgctgattaccttttgggcatgcttgataagtcgcaaatgtactacagctggtgggagagagtcaccagtcatatccgtatccatagccagtaataatcgccacactacatctgcttgggaggtttccaggaatacggtttcggcttgcttcaaacgaccattcacgagagcctgtctgaattgatgagtcataaacccagcttgctgattctttcccttactcaagtgtgtcataagacgttccagattcttccgtgaagctatgatttcttgcacatcaagaaggtcatcctctgctccatcgcggacgagaaagcaccgagcttcacctgtcaccccattcacttgagttacgagctgcgcgccacctaccctgcactctggcaaacgaagacttgctacaagcacacaccccggaacccgccaaatctgtactgtttcacgccacggtgcaagaatcacaagatattgtccatgtggtatatccgtatcttgatcaagtgattctctctccatgttttgatcaatactaccagcattcacatctctatgtttgtttttgccatcgctgccatcatcggcatcatcatcatctgcagcagctgtagcagaacttttccattgttcacttcttgttaaccatcccgtctgggcat

SEQ ID NO: 82 - DNA, 21986 bp, unidentified
  source 1..21986: mol_type = other DNA
  misc_feature 1..21986: note = Fanzor polypeptide
tagctcaatacgatgttggttgctttcctagctagataaagcttgctatcaaatgggcctagcctaatattctataacaggactctatgaggagggttagttcaattgaggcgtctcgagaaaattttcgtttcgctccagtcaaatcaagtggttgaatagaagatgatagaaaactagtctactaagcctcgacatcttgtcctaaggttacgaagacatattgaaggttttgttcaaatagggaatgacagaaacaaaatcctaatcttctggaaaaagatttggtataagcagctttaaatcccaaaatcccaaataaattttacatatgtactcacacagcttatttatttattcactattttatgactcaattgcctctgagaaatttctacttaagctgaatgacaacaagcatgacacccttagtacatttattaattaatttaaagtaataagtaaaagtggtgttttaattaatggtgtgcttcgtttttcattgttctcttactgatcatatttgactggctgactgactacttgtagaacaaattaccccatggacgaacaaagtaagctgtaagtcttggcgatcttctgtgaacggcttcttcctttcaaatcagagacaatgtgaaccactactaagctacggtccaagttaggttctcgtggcaagcaagtgatacggtagactgaaaaatcgtgctcttattcaagggctcttcatgttcatgggagcaaagcaatgtcatgcgccgtattataattgacttctatcaacccttttacttggataaaacctcaagtcaaggtatccatccatactgtgctttcccccatttatttaatacaaagatataattaatcaagacaaaagtacaatactagtggtgagtgaggttgtagcgcatctcatgagtcgtggctttgtctgatcactttgtttgaaattagcctgttacaaatcctttccaaattatgacgagaaaggggaaattaccaataaagagactggagatggcaagttgaaagtaaatcagctccgtgatggataatgtagaaactacttaacctgagtcataaaaaattatgctttgagtgtgtccttactcaactgttttttgtgtttgtttttttaaatataaataaatatgagagtagcatctgactagtaagaagagtgaccaggattattagagacccaattctccgtagcctactgcgcactaacttgtattatattagcacttacttttactggattggatattcccaatttgttcctgaaatataagtaatcgattttttttttcgccctgatagcaacaacggtctctcgaagtaatactcgaaaatctcccttcaacgcaatcactggaatcggtatctcgatatctcttgcgaaaaggaaggcatcatttcccaacacgaatttcgctaacttctggctcaacgagcactctttcctgttacaatctaaactctttcttcacaataaaccgagcaatgcacgggccgtaacctacgtgtcaactgccagttaaagtgtgacctggacttcaggcgcgccgctactgagtaaacaggatatgcgtggacttctggctcaccttcaggtcagtttgatttactaacagcccgagccatactggctatcctgatcaactcgccaaagctactatggtgccaccgtatatgctcgttttgggacttacttttctcgagtccttcccaggagttgcaaagagaagcacgcaatactaactttaccgtggctacaggaatggtaggtagtaccaggtgattcaactattcatcacgggttggagaacaaaggaccttacccacttcatgatatcactaagcagaagattgcaacttcgtctacttcccgcaagtcaaaagctgcgcaccgacacgggacgcaatcgtcttagtcttagctagtacggcccatgatcagagttgtcgacattagataaaaagcttcgctccgtcctcagttgaatgggtcctcgcaaagaagtacaatcaactcttaattatttttggactgtactgtgtagcccaggcatcctattcagtctctgcaaggctaaaacattctaagcgcttacttcgctagtgttcacgggaatcactctctctatcatcactactattattactattaaacattttaaatgaattatagtacctatatatacatatatattaaattttaaagtttaataatattttagtataacgaatttaatactaaccccttacctcgtccggctgggtcatcgaactaaaacaaccagacatatgaaaaagtcgaacgtcatgtcttcaatatccttggcaggatatcatcactagcatggttcaggtgctacttgatttacctttgcacagggtttgacgttgtcagaaaacacaaccttcaggcgaaagttcgcacatggctcagaattcgttgaacataaaataacgggaaatacggttcaccgcagcatccaatttctcttcctttgtcatttgtcatttgtcaatatttctttcgtccctttttttttcttgtaccaacttgaagctgataaatcaataacaagtctagttctagttcttatttatatataaaaccagaacgggaaatcaagaacaaacaaagagagtgcgcagcgtgcagcacagtgagttcgccgtctatagcaatgtaaaagttttacttctaaatcggtactcgctttgacgtcttgaaccgggtagtacgagttcatttgggcgaaccaatgtgtcttaccaaaagtttgaaggaagttcatgcatagtaagaagcctatgttttattactatctgaaagttctcctaaggcaaaaattatgtctcgttataatttgttcatttgacagaagcaaaattgttttgagttcttcagttgcttaagtaaggagatccagagtattgtttcgggattatttttttcttttaaattcaactgggccttgtcgagcgtagcacttcaataaagagaatagctctgcggaatcctgagtatacgcatgcattgtgggcgtgtaggcacgatctgtctcgtccatcgctatttaatggtgatactaaataaatgagtataaatcatcgccaaatacttgccattgacgctccgtttgtctggcaaagcaaaccacaatctccaccaaacctcgaattatagtagactaaagaaccaagctacaatgaatctccttgcgttgtttcttctttcctttgtgtttctcgaagagacgaagggccaggttgagtcctgccaaccaagcagtaagacccttgatcttggtactctgtgtagcgcagatagtcctcgttctttggaatttggcgattctgttgatgcatcgttcaatttttctagttgctgccccagcccctcattaagtgcacgacgcctacttggcatcacatcggacactctacctcgccaaatgcaaagtacttctgagaattgtcagtcatatgaaattatcgatccattctgtccagactgcaacctggagacaataagcttaagccttacagtacaattttcgaatccacaagttttgtcgaatgaaacttgttgcagtgaatgcaattgttggggtgaccctcgttgtacatcgttcaatggaacaagagccaactgggtagtttgtgatgacagaaacagtcaatgcgagcatggaccggtgcgttgcgaaaatcggaaagatccatggggtgggtcttgtgaatttgtgaaaagatctcgtaaacccgaatccgacgatccgcaaccatggtggtatgattgggataccagtggaagtccgtgtcaagcaacacctgtatgggaggaagaacagtttccatatatggtgatgtatgatggtgaagggcaagttatcaatcttacccttggggagcgaggcatcatctctagtgtgcaggtcgccgaggagtccaccgattacacactcgacgcaagagactgttttgtcaatgctaattctagcgcatggacagttacaggtgacagcttcttccctagtacctggaacttaacagtagagtcttccacattgtatcgttggaatattcaaaacctagataagacggttttcacttcaatagtttgctaccaatcatctgactaccgttctcgtctcgacatcactgtgcgccaaatagcgtcatcgacgtctgacttgaatagtgttcaaggcttttgtaagtcgggtataatctcggagaactttgcggaatcgagaacgctttcaattgaggaggatgacgcttgtctgcgtaaggaacttggaacctgcgtagaagcctgcaaggcattagtggattcctcctgttccgagactaatttgcaagccaacgtgcgtgaatggtgctctatcaatgatttaactgggatcgtgactaattttacgattgactccattgacacttgcataagttatatttgtggtgatggaaactgctttgacgagtgttccaatacaagccaaaattgggctgacttggtatgccagattgacagtatgaatattgataggacaggatacgatgaagctatgtacagggattgcgccgcagatattgctgagaccagctggtttcaatatgctgcggaccgtcaggcgtatattgtacgaaattttggatacttttctgatgcggagtgtttagaaagtgtgtccgaatatccttcatcaaagccatacccgtgtgctattggagcccagatccagacgaaaaaccctgacacaggagagtgggaagatgaattctttattccagtggaaaaccctctttgtgaaaatgcaaccctcagtgctcttgactacccaaacttagtgacacgccccatcaaagtttctcagtgtgatatgcttggaagcgattgcgcagttgagaatgactgtctacctgtaccaaaaatctcagttaccatcatggttgaaaacgaactttgccccacgcccgcaccaaccatagcacctacagaaccgcctattactattgaaaatacaacttgtgctgtgtgcaccacaagagacgcgaatctgtatcctcaaatttgtgttacagaaacatcagattttcaggctcttagcgattgcgacagatgttgctcagagctgaacgcaacagtgcttaatcttacagattatggatattgccgcacccaagaaactgagcgcgcatactgcgacctggcaaatgcaacggatgtagagtattgtgagaatttactgggtaacaacggtgttctgagcctcaacatcacatatacaaacactgctaacaccactagttgttgtccagagtgtattgcttatggtgacccagaactaataccattcaacgaaacagaatatgtggtagatgcatgggttatttgtgatgggcgttcaccagacacctgcaaagttgatgaaggtgtttgcacggctcagctagaccatgaaggtaacaactgtacctatgatagccagagagctgcatggctagaacagtatgggcagttcaacattggtgctattgggtcaccttgtattgcaagcaaccaatcatctcctgcagtgatggagctttatacattgccagagaaagagatgtctattaaaactacacttggagagcgcgcagttatggtagacgctagatttacttttgctaacacaaccagctataccctatctgcaaatacatgctttgatggccccggctcaggttggacaaaagatggctctaatgtgacgaccgacgaagttgcagcggcattttcttttcttcagtacgacacagctgatgtaaactcggtgacaagaggcgcgtctcgaacatgggttcttgaattcaataattctcttcatgtgcaaattacttgccagaaaatgattgctcaaggtggagatattcagggtttagcaggttatcgcttggactttgatcatattattgatacaaacgaagaacgggccttcagtacaaactcaactggcttctgccccaccgctgagatcgactttatggaagctacacggacagatctgtcggatgatagcgccttcagcaaatgtacatggatgcgcatgaacgtagctgtcgcccttgctaaaagccttgttgatccaacagcaacatactccgaaacagaaattagagccgcggttgagacttggtgtaacaccgccaatgtttatcagactaaaaaagacccaactgcagagtgtgttaaagcaatttggacctcaggcaatttggaaggtacggggaagaagtgggcctatcagtactgcaaggccattggaagttctaacccagagaaatgtcgcaacggaattttagaaaatacatattctattcagcaaagtgtggaagctttcggaactgggaaagtgacgacagacaatacttgctcgaagactaaaactgatgaatacaccacctcgacagatgtttgtgagcagggatttttcattgattacttcgacgagtctacgtccgagtggattcaagagctttttgtcccgtctctagaactcccctgcagtggcggcacgattgacttaacatatgagaaacggccacaccttttcaacaaccgtttccgaattcgtcaatgtgacccaagtgtagaaaatggatgtaacttggcaacttcatgcagtgcagcaagagcgtacacagcatcatataggttttcacaggatgcaaccgtttgcggtgatacaagcgggtcatcttgagcgtgagtaaattcaagtaagattatatttcgcgggtttcaacaccgtcacataaaatacaccttggccttgcttttctttggaaatgcatgtttacaatatattcaattgatgctgtccagttgagaaagaaaatgtcatggccaattaatttgttaatcatttcaacattaagtgccgtaatccgtcctacacatgggagtaccttaatttccaggcataggagcaccatttttgattgcgcaaagaagctaagatacgggtttgctttagtaagatagaaggcaattaatgtactgaatatgagcggctggataattattgactttttagaatgtcgcttcgaacgagcgcagaaacctgattcaagttgtgttatgaatctgccatggacctcacgaagcaaaatcaaaaacaacattgtcttttcttggattaaacagtttggataattggcctatacaaccaccatctttgagtttgatgcagagtctagcattgtttgagactgctcgataggaaccttgttcgtatgtatttctccagaaagttctgcagaaacgtttttgttatcctcccctattttggcattgtttagatgctcaactgaactatcaacgcccattgctttgggaatataacatgaagagaagaactgtaaaagaaccgcgacgacagcagcggaaacgcctaagaggccagatgagaggacttcacctttgctccaaatgggctctgcgacaaaagcaccaatagcgcgacccaagaagtgaaactggaaattcatcgcaagcatagtagtacgttgatgttgagggacgtaaatctcagccaatgcaatttgtgaaacaatcatagattctccaggcaagaaaagaatagcagcaacagcaactccagcgctgaatgagtgatctgcagcgaggataaacatgccgatagctacagcaaacgaagttccagctatgtaaatggtgttcaagagaccaaggcggctggaaaagcaaactacacacatgataccagcaagctctgcagcgcctatgccgaaactagccacgcccatactttccgcatcgacatcgtgataaattgatgcccaatttgtgaaagctaggaacataagattatgcccgatgttgagaatcatgctagagaggttgaacatgagaggaccgggcatgaagacagctcgatatgatgaggttttcaatttcatcaacgccaactccatttttgagctagatatgcccaccttggtagagtcttgtatcacaatattgcactcactagactcgtgcgacggtgcgatgttttctccctgctcaatcacttgaatttcggtcttattgtgacatattttttgcttgcttatgcgatcgtcttcaggaaacttgaaccaaagctcaaaacagagaggaaccattaaagcacaaagtgtactccacatggcacgccagccagcatgttcatagatgacagttaggattggtacgagagctagaatggaaaatccccagccagactcagatataccagtcacgaatcccatctgccttggatcagtttctgcaacaaccgcagactgagatactacgataaatacagtcgcaaacaatgacgaaatgatacgtgcgatcatgtctagttccagggaaggcgggcaaagaactatacaggtaaaaataactgtcatggcccaggaaccgagtgctatgatacgatttccatagacatcaccaagcgagccgacgattccggccccaatactactgagctccccggcggctagaatattgttcatttccgctgaggtgagaccccaatcctctgcaataaaattcttcagtgggtagagcacacggatgttaccgtagagcagcaaacgagtgataagtgatacgaacactaatctacttgggacatggtctttgaaaacctgcatccatgtttttgagttcgccgctgtcatagtcttacttggaaaagtagacaggtaaaaaagcaatcaattcctattggttcaatgactccaccatatattctgcaagtcccggagattcctagatcaatattggacgagtactcgcgtcggaaagtactctgtggctgccgttactaatcctaatcagctgaaggtgttgcttttgctccctaatgatgtttttgcagttctcaacttcagcctcgctacgattgccctgcaagcttctgaaccccaagttacgattctgctcaggttcaacacacagcatttgccgctttttctgtctctatactaacatagaaggccctcacgtagaacaagtggccttctcacagcgagacccctcctagatcgaacgtctttgacgcaaacccagacgcctccaggaaccttccttagggcaacggcccccgaaaatagattattactctccaagagcgactaagcctatgtaaccccgtcaagctcatggggtctatcgaagcggtggtgctcgtgtcttcaccgatgcagttcttgataggtttcatgcgccaattctttgcgtttttcttcaattgcaactattttcttacgtaggataatgaaatgtagcagtttcctcgtagcattttcactatctaaatacctgctcactccagagttccctttgctgcagttcaagatgggtagggtatctaccattagctcgaggttgagctccttctgaagctcattcaggataactcattatcaaaacaatgtgagtgcacgtggagaccacatgagcagcaacgatacgctccctacctactagtaggttgcaggaactaagaaatgctccagcaatgcgataggaaccactgaatgacgttccgagttgcgtgtgcgttagttagctcactgccaacagcaacttcttcgctgctactaaatggatctggagatcgagttttgatttcagctgatgccagatagtgccagtgcatgatgttgtcttgggtttggcactgccactgttacttgagccgcgcaaaatctaggcgcaaacccgaagtggaagcacagtagctactttggcaaagtccagaatatgatgaataataaaggatatcactgcttagatagctgtccttttttcttcccaaatcagtatgacaaaaaccgttaaaatttcgataacttatatttcgatgtgcttgtttcatattaatcatatattatacttagttagatctttaataagaagtggaggttaggtaagaaaatggggaggccaaggaaccgccaagctccaaacactgcaagtggagcaaacctcgaatacaaaccagcaaagttctttcaccggaagtttggggtctcagcaagcgcccttcggggctgggccgatggcggacgcgtgcgctgcgcgcgcttccccggaggcaagcgcatctacgccagcgacgatgttgagcgcatctttgattgcggttccaccggccgcgagcaacgcagctctggatgtaccgttatctacgccagagtgtcctcggccaagcaaaaggaggacctcgaacgccaggttggcgatctccagcgcgcctacccagatgcttccgccgtctacaaagacatcggtagcggggtcaatttcaaacgccaaggcctgtgctccctactggacgcctgtgaccgcggcggaatcggccaagttgtggtcatgcaccgcgaccgacttgcgcgaatcgcagtcgacctcttggaacaccttttcgaaagataaaatgtcaaactcgtggtacacggccaagatgcacatgccggagacgcagacaccttcaccaaagacctcctcggaatcatcaccgtctttgtggcatcgcatcacggaaaacgagcagcgcaaaatagacggcgacgacgcagcgaggaagaagcgagctcgcacgaaggcgcgcaagaccatcaagaaagaatataaccttgtccgtaccagaaaggttagggtatatcctactaaagatcaacgtacacagttgcttaaatggtttggtgtcactagaagagcctacaatattggcgttgcgtttcaccgagacatggcgaagggcgagaaagaagccatcaaattgcatcaagaagcgtgcatcaaaaaggatcgtaagacgaagcaggttttagtagatgaagatgggaatccccaaacgtatggtgccctctatggagaaaagaaagccgttcgatctaaagaaaagcatgatgctcctgaatgggttctcgaggtcccacaggctatccgtgattccgggattctggatttcttcaaggctcttaactctggacgagccaaaaacgaagaactcgctgtacaaaagaaagttcatgagcaatctttttataagtttcggaccaagcgtgatgaatcacagattttcgaagtgaacgcacgtatctggaatacggagaaatcaaagaccaccaactttctaaaagagtttcgtacgcgcaaagaaaagttccccagtcagattaagaacgccatgcgtgtgcaaatgaatcgccttgggcatgtctacttctgcttcttacgagaagaaaaaaagcgtccaatggaccaggcacccaaggcgcaccacagtgccattgctctagatccgggtgttcgctcgtttcagacgatgtatgacgctgatggccgcgccattgaatggggcacagggaaagattttagaaccatattctatctctgtcgccgcgttgataagatccaaagcaggattgataaagctcaagaaaacaaaaagaaaactgcatacgatttcaacacccccttgaagcgcgccttctatcgcgcccaactcaagatcaagaacaagatcactgagattcaccgcaagctcgcgctttggctttgtgaaaactatcgtgttattctcttgcctaaattcgaaacctctaagatgagcaggaggatggagcgacggatatccaagaagtctgttcgaatgatgtgtcgttggtcccattttgggttccgccaggctctcattcataaggctgagatgttcccgtggtgcaagcttgttctttgccaagagagctacacttcaaaaacatgcaatgagtgcggtaccctccaccataaactcggggcatccaaggttttccaatgccctaatctcaagtgcaaccatgtagcagaccgtgatgtccatgccgcaagaggcatccttttacgctacctatccaaggacatgatttaaaaaaaatcatttcattgagtcgcgggttagtctaactagtccgcgatcgggtcttagccctactatgaaatgcaggttttgcaaattttgtagttttaaaactaagagtgattgaattgctatgactatcgagaatattgctagatagagtaaaaaatgggcagtgcaatggactcgtgcaacagcaagaaatacgattaggccatgcaggctgtagttttcctagtgtttgagtcgtatgattgttcatctgggggtaagttagaggagatatatcctcacattttcaactttagatcaaaggaagttgttcatcaaagatgttatagatgcgacccaaaaatgtagaggtgatgggcttggaacatcttatgcaaaggcgtgcaaagataagtcgatcaattgagatttttgtctgagctaaatcgtgtagaaggtacttcacatctcaggtcattacggaaatcattcatagatataatgtgaaacaaggatttaaaaggtcaaagttgtttggtcactgcctttgaggcgctcaaaatctgcattacaagttcatgaaagagagagaaaggcataaaatgaatcgaacatggttattatagtgtatcttttcactactactactacaagtacaaacagtaaacaaaaggaactacctagttatgaaagcctttgagagacctatgtatctgttggctgacatgaatagactagcacacgagagctgaaggcaactctgttctatgagaatgggaataggaaaataaaggtacatcgcggttgattgcggagccaatagttttcatactagtaaagaaaagggggaatgaccctttcggccgcgtaggaaggaatgatcagcgcaaaaaaaagctatcgtagaggaggaatacaattgggttttaagaagttcttagaccacagccatttttttgatgctggtgttgttggtagcatccgccggggtgtcctcagcaataccaacctgatctaggttatcttcaggaagttcgagagcattgccttctgcttctgctttgtcttctccatccaaatcttcaatttcctcctctgaagtgctaggaatgtagtaggcagaaaagaactgtaggagaactgcgataacagcagagcaaacacccaaaagacccgaagaaaacacttcacctctgttccagatagcatctgcaataaaagcaccaatggcacgaccaaggaagtggcactgataattcatcgcaagcatagtggttcgatgtttctcaacgacgtaggactcagccaaggcaatttgagacacaatcatggcctcaccaggcatgaaaagaattgcagcaagggcaacacctgcgccgaaagagtgatccgcagcaaggatgaacatacccatggcaatagcgaacaaggtgccagcaatgtagattgtgttcaaaaggccgatacgaccggagaaaaggataacgcaaatatcaccagctaactccgccgcaccaataccaaaacttgctacacccatactctcggcatcaacatcataataaatggatgcccagtctgtgaaagcaagaaacatcaggttgtgcccaatgttcaaaatcaaactggaaaggttgaacatcaccgggccaggtgtaaaagaagcgtagtatgacgattccttgaagcgtgcccacgtgaatttgttacttgcagaggatacttggccatcgattgtatgtttccggcgagaggaagtcgcgagggaggatttcatttcccgttcatcgttcgaagacgtgtggctcacactatcgtcctctttagcgatgccttcctcaacttgctcgtcctccagggatttctggtcagcatcttcaagctccttttgcttcaagaagcggtcatcttcaggaaatttaaaccagagctcaaaacagatagggatcataagaccacagagtgttccccacatggcacgccagccaccactctcgtagattacagtcaaaattggcacaagagcaagaatggagaagccccaaccggactcagagataccagtaacgaagcccatcttgcttggatcagtctccgctaccactgcggactgtgttgctaccatgaaaactgttgcgaacaaagatgagatgatacgtgcaaccatctcgagttctagagaaggtgggcaaagaacaatgcaagagaaaatcacaaccatggcccaggaaccgagtgctacagcacgattaccgtagcgatcaccgagcgagccaacaacaccagctccgatactgctaagttcaccagctgcgagaatgttattcatttcagtcgaggaaatgccccaatcctccgcaatgaagttcttaagagggtaaagcacacgaatgtttccataaagtagcaagcgagtggcaagggccacaagcaccagacgggagggcacattgtctttaacgacttgaagccagggtctcgggtgcgccgccatgatatccacctcctattaacctttaacttttctgcagatgagttcaccaaagaaaatctgctctacgttctcgtgttttctttaaacggcaaacagagtctggcagcagcaggagttcttgctggactcgtaaacttgttttcacgctcacttgttattcttcttctccgcaatcaattatacaatttgtaaagatacagatgagatatatgtcgttgaccacctcttcagcttcgttggtctttggctgcttttctaatctcgtttgcctcggcgcctctgtccgagtttggggtttgctgcttggcggcgccagctagtccacacctgaacagctcctttttatttttataaatttattatcaacaattcttccttctaggtgcgccgaccttcgtttccaaatctgtttgcgagaggaattggcgcttcttctgttctgctacccttcctatgctatgttgtacttcctagcttcctcggctgtctcgctgcctttatggccccagcacatgcgcattgcacagcgttttttcttcgccagcttgcagttctcaggcttcgggctcaagcttttgcattgctcgcgagctctgtaccatgattctactatggcacctccagccctaccgttaggcctagccagccactagcactcctcccacattcatccctaccatctcgattcctactggcactcctaagccgctacgtgctccatgcgctgtgtcctgtacattcgcacgccacgctagttgtcaatttgcgccgagcgcccctcctatacgtttacggtaggtgggtgactagggcttcccagcgacgaagagtcgcaaattcatggcgctaatatggagggagcgggggtggtatagtttgtggtatccgtggtataggactggtctcgcgtttaaaaactctcgtcaaaaggtggaaaaaggttttgtaaaactaaactaacttagacctaatgatagggttaaaaaaaaagcagcagcagccataataaaactaattcataaacccaggaaaaggaaaacgaagcacgtaatggatgcaaaaactggccagaaaacagggacagaccctcggagaactgagctgacgggccaactcgaagccaaggtcgccaaggccctccggcagtcttcgagcacctcgccaaagcctgcttgtctaaccgactggctagctaactccacctcgtgctacttctgtagtacgtactaatgccgcgcaaagtctcggcgcaaacccaagttggaagcgcggctcgagactcctaggatatgctggcttatagaggatatcacggaataaatagtcgaggatacaacggagcatcgaggatatcctggaccacagctggaggcacagcgagaaacggcagcgcatgacgataggctcctgagctctttgactgtacttgtgcgcttattcttctgcattttactgaagactcgtcgagttttgcttgctttgcattttataacatcgatcgtaattttagaggtaatcgccgttttggaggtaaccacaatcgaagagttcgctcgcgctaaggcgctaatacgacgaagcattgcggtcgaactcgcctaggatacgccagttcttggcgccaggccgggaggagcccgcttgcttgctccagggctttgcgcacttgcaccaagcctgacttggtttagcttctccgtgtgctgcccgctccccgaagttttggtcggctttacgagcccgagttcgaggctgatgatgacgacttggtcgcttgttgcgcatatagtcgtgcgtttgtgaatgcggatcacgtatgaatgtattctgtatgaatgtatgaatgtatgaatgtatgaatgtattctgtatgaatgtatgaatgtatgaatgcatgaatgtatgaatgcattctgtatgaatgtatgaatgtatgaatgtatgaatgtatgaatgtatgaatgtatgaatgtatgaatgtatgaatgtatgaatgtatgaatgtatgaatgtatgaatgtatgaatgtatgaatgtatgaatgtatgaatgtatgaatgtatgaatgtgtgtatgtatgaatgtatgctgtattctgtaatctgtattcggtgtgtattatgtatgtattatgtaatatgtaatatgcatgtgtgtgtattatggtgaattaattgcatgtgtgtaagcccccgctatgagtaattggagactcgcgagaccacgttggcaaactgcgagctgggcgctctcgggtccccgtgcgctgggtgctcgctcgcctcgcagaggcgtgccaggccagaccagaccaggctgacgggcccaggccgcgctttgcggagaggcggtggcggcggcggcggcggcggcgaggcgaggcttcgaagcagcgcgctgttcttgaaaggcggactcttggagcaggcgggataacttgtagcaccttcttcagcttcaactgcgaaggccgctttccaaataaaacacagacgccctggagcgatagctgcggctgagctttgcgccacgggttggagcgcagcttctcgagttcgttcgagtcgagcggagtcttcttcccttgccggcaggcaggcagttgatggatctctcgctcggttcggggccgggcgtggtggtggtggagatgaaagctgtgaaactcggggctccgactgcgctgtacgcctcctacaaatatgaagaactgcgctctgatgatgcgggaagaggtcatgggactcgagacgcaaatgcaatgcgctcgacttgaagctgggagagcttcggcgatcaaccacgtggcaacttaaagtacccagaggatctgctccctgcaaggcgtggcaccatgtgcgagctgatgcgaggcggcaggactttgcgaagagatttggcacctccctcgcgatggagcgagatcggtattctatgtctgtagtatagaaccaatgacggcttggagcatacatacacatgcgcacggaggtaggtacacacagaaatcaatgaggaaacgaagactcatgcacatttgaccgtgggtggcatcacaactcatagcacatgaatccactggagcagccttgaagaagcgaactcttgaagcgaactgatgaaccgtaacgaggactgaaagaagaacctgaaggacctcgaggcgctcggaatgaagccagttgcctacctaccaatcagcagtagtagcacgcatctcgaggaagttcaggctcagcaactgtgacaatttgtgagcgactctgacgatgcaaagaatttgcgtattacttagcttagcaagtgaacgagattggaaaccgcttcgcgcaaaatcctggcgcctcgctctccaattcattcacaataggtacctacctacttggcaggaggaccaagcactcctgaatctctacgaatagctcgttgaaaatggacgaatcaatattaggatgaatcaagcaatcaaccaattaatgaggtgaatatatcagacaagagtgcaatgctaatgaatgaatggatggatggatggatggatggatgaatgaatgaatgaatgaatgaatgaatgaatgaatgaatgaatggattgctggatgcctcttccggttggaacgtctccagttttgacggtcccgaaccctgcctggtgaccttatagctagctagctacaagagcagagaaacggctgttgagcaaatcatttgcgtgcctcttcccagacagagcttcctcgttgacgcttggtgctacgagcacatcaatttgtactacctacttaagggttataggtgcctatgtataaccatgacggagaagccgccatctatggctgggtggtgttttcaaacaggactcgatgaagacacgctggtggcagcaaaacaggttttcaattttaatttaaaaaatttgaaaaaggaaaaagagaaaacaaaataaaaatttatttcttctttttcttgacatgttaaaagaaccttcaagttcaagcaagtcagcttttctgcatgcgctctctagctagagagctaggcaataagtagttagtaggtaccaaaggcttcgacaatggaggcgcgggtttattgcgttatagcgaaaccctgccgaaggatgctttggacatagcgcgattgccaggtgaggttcgcttggtcttctcatcagttcttctcatcggttagaataataggaaaaagatgaggaccaactggctcagacgatgaaaatgatgatgctgatactcgcagtggagcgtagcataggtacagcaacctgaatggagatactgacatttgctctcaaatgagaaaatacaacttggaaaggctcgccgaacttagcatagatcatgtctgcattataacaaaacttgggcatctcctgaaaagctgcaagcaatttgcgacgccatcgcaagcaggattgactccaaaatctcaagagcttttcatgattcttttactcagcttattgtgggacacagaccaaccaacaagcaacaggcatgaaacgcagcgtcccagagtctaactttgcgagcaagaatttgtgcaattttaatccgttctcaaatgagaagtggaagcaagaccgaagacacaggctaatagccaagttgagcgtgctcttaccttcaatattcaatcaaagtccgccaaaactgcatgtatagattcctagtttgcgactcagtttatgagcatcagggggcgctctggagataaaaagtgacgcaacaaatcgtagtgcattcattaaaagtttgtgtaatgttctccgaatagattctgcgccgtgctatgtgctgggtttagaaagccatcaattgcctccagcaaaagtcgtgtaagtgtctcaattgctgccgaaaatgtccactcagctcctcaataatcagctccgcaagctcagaagtttgcaggaatgtgctttagaaaatcgaagatttggaaagttcgacaacatgctattcctgcaaggattctttgtgtaacggtataagccatcacctaattccccctctcgataaatttctgctttacccgagtcttactgttcagattgcagaggacatcctgaatcaatcctggtttgcattgtacctaaagtataaacctcaaactccattagagagtaagcgtatcggcagacgttttgctgaaagagagatcgagtgcctttgtcattgtcataaaagaaaaaatatatgaaatgtgcaagccgaagtctcaaagatagacgatagcatgtattttccatattgctgctttgatccatcatgttacattttatgttctttaaaaatagtaaatttcaaccttccttgatcaaatacgtgtatcatttccttttttggctgcatgatcactgcaacttctttccaaatccttgtagaatagaaacaagtaatttgaattttaacatcctcgattgtatcccttcgcatcccagcgtttcgatcaccttctttactgaactttgtataggtgcgcgcacacactaactagtttagcacaagggcttaattgtttgttcgcataaaatataattcaccttttgcacaattccgggaacgaatggggctcttccataaatatagaaatcacaaagttgatcttctcgtcacgttggcctcaaaatgccctggaggcctgtgtatctagttacctaccggatatagaaatgagtctaaggttctatttgcttataaatcctgtagagttctctagttctgcaagacaaataccaattgattttttaagatagctcaggaacatttgaggtgcacatgtgtaaatgcaggatgttatcgtggagaacactgatctacaagcaagcaaatatatatcgtggtgataaattccaaaggttctcaacttttctagcaaattgcgtaaggttagtgcagaccaaagattcgccaaagccaatgactaatacagacttgtcattccacaaaataactacgtaatagaacatttttgtgaagcatgccagcactatgcactgccttcagagcctgtgggcatggcgtttcatttctgcagttaccacatgtttatgttgtgagagtttgaaaaatgtcacatcaccgtacccagggactaaaaagcaagatttagcataagttcacgcatatacatgctcactatgagatatcaccaacagaatactgcgtacatgatcgtgcagagacagggtaggtacatgatctaacacatgaaaatatctcaaaacgttgttaaagcttgcatcttcatttagttatgtttaatttcgtggagaatctttaatcctagtacccaatttctttacttcatctgcgttaccaccatttctcatgtttacagaaagaggagtttcctcccagagcatgcggaagacagacttccactcactcatgctctgcatcgcttcttcaactacaactggaaccatgcgcgtggcagtcattgtatccatcatacacctaaactccaaccggcaatagtctctcagtttaactttgggatcattgaggcagatttctagtaatcgccttagcactaatatcacctctctcgtagaaccaggccctaacaataataataactaaaagattagctactaatactagcagagaatactagtactcactaacaggtactatttctacaaataggaaccttggcagaaccgctacagatctataaaggcacgtcagaggatcgcgaatgcgctgtaaagtatgcgtcaggtgtggctgacgtcgggcttggagcctggcaatggaagcaaacaagcttgagaggtatctgaccttgcagggagagtattcagtgctgcgaatacacaagtattgacgaggcagctcaaagtgggagttcttgccggtggctgagaatggctcccactcgtgtacgagtaaccttcgcacgtaacggaggctgcgtggcaacaggctgcgtcttggtgaaatcgtgctcctttgaagcattgcgcaatgctgctgcaaacaaactcaagattagcaaaaagcaagctaaaagtattcgcttatttgtcaggaaagcacccaagggaagcgcggtgctcgaaggtacagaggttccaagtaacgatgatgagtttgtacctaatattgttgagaatgacacccaactagctgtgtctttgggcgaagggtttgtgcatatttctggggctaaaatcaacccgagtgaactcgccgaaaagcaagtccatgtacctgattttcctttgataattcgacaggcaaaatctcaacgcacaggcacaggtgctcgtattttctgtgatctcgatggcgtccttgcaaattttgctagtggagttcacatgctcacagggaagacggctgatgagcttggaaagaataaattgtggaacgtcattttatctgctcctgatttctttacaaatttgccatggatgcccgaaggagaagttctatgggagggtcttacagcgctcagcagagcgtacaatgctagagtcgagattctcacaggctgtc

SEQ ID NO: 83 - DNA, 21986 bp, unidentified
  misc_feature 1..21986: note = Fanzor polypeptide
  source 1..21986: mol_type = other DNA
gggcagcactgatggtacctacatcgcatcagaacaaaggtctcaagcgtattctcattcgcttttgtgcacaggaaactcgccactgccagtacgacaatctttctttcactttacaatatagtggacctacgtttaaacgtagaaatgatatctttatcttattccgtgcctgctaacttctccaaacatcgaattaattttacgctggacttcctctctgatctaaactgcttgtgcaaaatgctccagtgcctcacggtagcgctgtttcttcaaattagattttttaaattttttttaaaattactataattaatttaattataaaataaaacataaactaaaataaaacgttttgaaaagaaagaagatacctcggtactacgaatgatattaggtaaccgtgttcacttaaatctgaaaaggacaaataaaataaaacaagaataataataaatgacagcaacatatagactccacaacccggatagccgttgacgagatggtacacaccgcaaaagtcaactgtgagtaaaataaaggcctctacgctatgaggggtcacaggctatggaggtccatttgctcgtggccaaaaggataagacgagatcttcgtagacgttggattttgcagacgttagaggagcaaattgcaagcaaagcccaatttgttcatcattcaatactacttctgagcatcgcaacgaacactacgtaagcatgtcgcaggaagcaactgcaagggatgctgcgccgtctgcactagcacaggtcgctcgggaggagagggagctgcaaaagcaacaccatgagcaacaggaacaagagcatgagcaggagacacaggactgcgaaagccagcagcagagcgagactcacaatgaagtgcaatccccacattctggaaacgacaaggctcagacgccccggcaactacaaactcagcgcgtcctggcagaagcaacacgagctatccagcagcagcaggatgaagatgctgaaacccctgaagcggcggcaatgggaaaatccagcacgtctgatatattaaaatctgcagcgcaagatgtcttgcaaaggcaaacacctgaaaaggatgaggctttatcaaacgagacgacaaaagcaaacagcgtcttgcagcaagtaagtgctgatatctctagtggggatggtgagcaagacgaagagaacgaggaggatcaaaacaatcaacaaatgtcgtcgtcacatcgagatcggaaatcctcagtcacaaaagcctgggccaagctttatgctgagcccatggaaatgaagcaaagctctcctcgttcccgtcgtcagagtagggggtcagcacaccacggtagcagtagtcgtcgattctcgctggcagagtctcgggaaagactctcctcaacgaaaacgacccgctcttcaaacaagtctgggaccccaaaacgatttattaaagaagatgatgaaaaaaactgcaccttccagcccaaaattaaccgttcttcgcgatctatggttaggaactctggaccatgtctacagcgattcgaaactgcccacgaagttaaagagcaagcgctcaagacgaaaaggggtaaggctgaatatgagaaacgtgtcgataagaaagtttgtccacaatgccatgccacacaatcatatgatgaggtgaaaaacaggaaaaataaatgtcgcgactgcaaagtggcttacagatacaagacagtttggcaagacgttagtgaaaactttctagaccgcatggaatcaaagatgcgcgagagtgaggaaaaacgtgctgacctggagaccaaaacagctccttcgtttcggccagaagagaaaatcgtgtatgatccgacatttgcaacaacccgcagagtgaagacgaggtctttgaactggagtgaagtaagcggggagttcatgcatcgtatggagacagatatgtacaaacgtgacgcgaagcgagtgattgctgagcaagaagctcttcgagacgcaggctgcacattccgtccgaaatttgagacaaaagagcactctcttgctacttcgggcgtgtatgacctcggtgtgcttggcgaggactttacagaacgcatggaacgtgattataatcgtagacgtcgtgagaaggcacaaaatatggtacgcgctagataccagtcaacgcttctcgatcctgcactcggtttcaagacaagggcagcgtgggatgaccctcttgcgaactcttttcaaggtggccagcgtcgtaatactacggggcgttggatgtgaaaatttgttctagcatttcaaaactatatattacttgaattatattccatttttgttgtctgtttccttcaatcgagaaaccaaagcaaagaagattcactgctttggtaaagacggagcactattaagagcaactttgaatagtaaatctggataagtaaaaaaaaaaaagaggatgaaaaagttgtattagaaaacagaagaacgatgagaatcacgattctgttgaattagtcgttgagagaaaaaaaaaagtacaaaggacgtagattttttcaataataaagatgatgcgatgtaagttgcagttgttgtatatatatgaaaagagtcaacattaaaagggacgcagagagaaaaagagggagtgagcgaggcgcaaaacttgaatccttcgtaaatcgtgagtgtggtgctatactgaagctagcgggtagcgagagctacaataatgatgacaagaatgactaagagcacagctccaatgatgatgttcaatttccatttgcgccacatttccctacgtttgagttcactgctttttttgtcaaaaagaagtgcttcgtcctgcagacgagcggtgtctgcctcgagttgctctgcacgggacatactgtgtagcatgctaccaatgttgtcctgcatggtagccgtcacatcgccaactttaccttgcagggtagcgatcttatcagaacttgggtcatcataggtcttgacgagttttgcaaacaagggctccacctttttcgaaagtgctccctcctcgcacgtgagggcttcctccccgtgcgcttgtttgaacgcagggataatttcttggatgagagggaataccattcgctctgggtagttagaagcagtgataacaatgtaaactcgctcttgagcatctgtggaaaaattaaaggcattgatatcgcctactaagcggtaacgcgaaccaggtttaaccttcatctgaaaatcaggtgcactaagcacttcatggactgcatgatgatacttttcgacatctgaatctgctttatccggaagataggtggcaactagctttccatcttctgcgcgtgccacagcgacaaacttaattttgccctgcacgctgccagagctcttactataaatgtgcaacaaataaagaatcaatcatatgtatgaagtgggagtgggtatctttgttagacgggaatgttcgtatatgagaaggagtcgtgcttgttctcaatgctgtaatcaatctcttttcacctgcattaagccaaacacaagacaacttacttttctgattcgttgttatgaagcatttttcttgtcaaggggataggtaccttactctctaatttatgatactatgctttcgctacctctgtctttcttagtggatgaagagaaaaagtttaggtccaactcctagcttatccgcgttgtagtctgcttcacaaccagagcccagcttgactgtgttgttgttgttgttgttgttgttgttgttgttgttgttgttgttgtaattgaaggaaaagatggatggcgacaagaatacagggaaatggctctgtacttggtcgctccgttgccttcttaagccttagtgttagcgagccgcaagtacccaccgctccaacgcagccctgggcccttgggtcttgtgcctaagctccaatcgaatttgatatggggtgccgtatctcttgatctaattattttattattttcgaaatctttctttgtccattttttttgtttatgtttgtagcaattctttagtctctccatgccgaaaggcgtctttgcacgttacgaaagtacttgacaaattagtgacactattcgaaacttaattttctagcgtcacttcatacgcttataagagtcaacgcaaggatgatgaagtaaaaatgaggtcatgactggcgaaatagcctaggtcatggctctgttcgagtgtttttccagaatcacagaaagcataatcttgacttggttaacctacaagaccttattaaatttcgaagagtttggagaagcaacatttcatcatccattacatgcagaactaatgttttctactttgtaagctgatttgaaaagagagggaaagacacgggaagcagtatttctaatttattttataaacatcaactgtcggtttgggtgaagagtggattgctcatgatgaacagccatgatctacttctaaaattacgggatggtttatgtaaaagcgtgcggcgcatcatagaatagccagagctctacctttcattacaattttctactgatattttaaatatcttgcgaaagagtcgagctactctaaaatatttatacgagatactgccttatctagaggtccaattcagctttcctaaaaacttcaaacatcaaataataatgcaagaggttttaaaattttcaattaaaaaaaagaaaagaaaaggaagtcagacttgccagagaggagaaatgtcctgaggagggacacggtgctgtctgttgttgtccaaaagtagatatagtactactgtagtactgggttggatgtgctctcattttacatagccgcatgaattgatttctgttcttgagacttaaaaattgcaaaaattgatcatgaatttgttacgcgttagaaaaccagacaaccagctcgagggcaacaaagagagaggtctatgcacagcgaactagctccattttcgagtaaatttaggttggcttgggttggagaacatgcaatgccattatgagagcgagtggggagatatatgtatgcgatatggaatatcttgagagtgagtgaaggaaggttagtagcaggtaggtaggtaggtagttgtattgatgagatgtagtagggttaaatgagtgagtatgtgaagaacacatcatttagaggagctccttcatgagctcgccaatgagagcggtgtgatcagcggactcagggatgtccttcttaattgttttcttcacagcggccacggtgagcttctccctgtcgccctcctcaaagatggacttaagccggtccttgatcttcttaacgagctcgtccgatggcttcttcttagacttcttctctgcggcgccctccttcttctcggcagcgggcttcttgggtgccttctccttcttctcggcagcaggcttcttggcggcagcctccttcttttcggcagcgggcttcttgggggacttctccttcttgtcagcggcgggcttcttggcggcagccttcttgggcttctcctcgccctccttcttgggtgccttctccttcttctcggcggcgggcttcttggcggcagccttcttgggcttctcctcgccctccttcttgggtgccttctccttcttctcagcagcgggcttcttggcggcagccttcttgggcttgtcgccctcggtggtctccttcttagccttcttcttgggcttctcctcgccgtccttcttctcggctccctccttgtcgccctcggtggcctcggacttcttacgcttggttcctgcggcggccttcttcttgggtgcagccttcttcttcttaggagcagccttcttcttgggggccttcttggcctttccgggtacagccatctccgggtcgtaggtgggcttctcaagccagtcaatgaatgtgtcgaggagctcctccttcttggtcttctggccacggtcgacgccaaagttgtccatcatctcgcggagaaagtcgatcttccatacgccgatagtgttgaagaccttgtcgcggccagcctcggccttgccgtcagggtagacgagtccgctgaaggcaagaacgttcttcttggcatcgcgcttgcccttgcgtccgtagaaggccttgtgaagggcctggatctcctcagagctgacggggaatttgttaaggaagtggctgatcttctccatgtcggagatggccatgcccttgcccttgggcacgacgaattcgtcctcctccttggtggagggctcaggcggggcgaagtgctccacctgcttgcgggagcgtccactgcgcctctcgccctctgcgggctccttcttctccttcttctccttcttctcggcggcggccttcttgggtgcggccttcttggtctccttcttgccgttggccttgccctcgtctacctccatggcgtcctccttggtctccttctcttcctccttcttgtcttccttcgcttcgccttccttcacctccacggacaccttggtctccgtgccatcgtcgcccttggccgaggcggcggcggcgcctgcctcctccgccttcttgtcgttcttgtctgcgtctgccatcttctttgtctgcctcacctcgcgctctctctctctctctctgcgctgctcttgctctttgctcaagcgcctttgcagttgcggttctgctgcgccgtatccgcctcaacggagcgcttagccccgtctaccgctgcctaccgccgcgcctaggactccgctaggcccttgccaccttaatatgaggcaggaaaaaccttctcacgctcaacaaacaataatcgaacaaacaaacgactttaaacaaacaaacaaacgactttaaacaaacaatcaaacgactttaaacaaacaatcaaacaatcagacaatcagacaatcagacaagcaaacaatcgaacaatcgaacaagcaatcgctcagacgatcagtcagtcagacaatcagacaatcagacaatcaatcagtcaaacaaacaatcagtcagacaaacaaacacacagtacctccgtctccaaattcaaacagaattcaaatcttcgcctgcttgtccctaattaaatcggcctttctttctttcccttcacacgttgaagaaaggaaacaaacaaagagagcaacaagagaagaaagaatgaaagaaagaaagaaagaaagaaagaaaaagaaaaagaaaaaaatccttcaaggtgctttctttctttccacctcctcactcagtccgtgaaatcctgctccgttttcgctcgccagccgcccagcgcctgctctgggggccctctcgagcggcccccctgcctgcctgagctcgcctccccgcggattcgcaggtcgccccagccggcggcccctttccgaggcctcgcgatttctcctgcctcgcttttcgcctttttccttcgccttaaactcctttcaaagcgctcgatccttcaacgaaaagagaggaaacaaaaaccatcacgaaagaaagaacaaacaaaaaactaaaaactaaaaactcgccaagaagcccttattactacttacttacttatctatccccttcttctctgagggtccttttctattcttttcttttctattcttttctttttcccgccgcctgccctagcgcacccctagcgaaccccctatccacctcttttatcttagctcgtaggcagcagaattagcgcacagagagacagagatgcttgtagacggagatccctttctttctcttgcttgtttttccctggcgccttcctcagcgtatctatgggaccgcaccctagccaactggctagctagcgctgctaggactcctcccgcaggcgggacccgaaatgcgaagatcctcctctcatgggggccccctcacttcccctctgagcccctctgggagcacttgtgtcgaggggtcccagaggcagaccacttaactcacttgcgatattttaccacgccctctcatgcacactgagaggaaagctccacttgcgcggttatagtctactgtgcagagaactatagctcacttgttgagcaaatttacttcacttgtaccccccgccgcatctttttcccatgccctcccagctggaaaaaagagagggaaaaatctggcccgggcggatgaggcctgggaaaaaatcgcgcaggggaacgcagcgtcggaacgccgcgtcgttctttactacggccaatatgggctaacctccaccgccgtttctgagggcctctgccttcaaggccgaagcaatcgaatgaattcgccgcccaattcgagataactcttgggaccttgttacgctgccttcgcagtgcgtgggttggagtcagctatcccatccattccaaaggccaaatggaatggcaggcaggccacaggcgagaaagcgagcgctccgcctcgtggccttatcctcctccgctgggctcaaaatagacagatagataagatagataagatagatagacagatagatagatatatgtagatagatagatagatagataccttgctcttcttactcttcttctcttaagttaaccgtgtactctaaggcctcactaactaaccaccgcctctttacagcagaggcgctccaactactggtctaaccaccgcagggaagggaagaaagagggcccgtatgccctcctccttgtggagaccaattcgtgagaccaattcgtcgtctttactcattcaagcaagcccggtcagctcggtagcggcagcagcgcacggttaggctttcgttgtttacattgttgttgctgtctgctggtattatgcgttgttgtggtggttgttctcgttgttgtcgttgttgattttgttggttttcaattcgttttgaaataccatgttcagacagagcgagctctctctgggcgttatgaaaggagagagagagaaagcacagctgagattagttatgatgagagcgagcgaacgaagggaaggaagcaaggatggcccttcttgactccaacggcgggtcggcgatcaggcagccgagagaaactaacggcaggactgactgactgactgactgaatgctgagatcgcagtcccaaccgcatctgtgagacactccattcgccaaagaaacacaccaattggtcgatgagggtcccacgaatcctcgcagccttgaactactagttaaactaactagctagtagctagctagctagctaactgccctcccggctgcctgcgcgcctcctatcctaatccctagaagtgcctccattatctatctatcttcatctccgtagcgaagtccaggagggtacagattgcaagcgcatgtagatgctcgccctcctatcctaaaccgtagcaggcactacggtgctgcgcttgctgcagaggtttagtgatgatcgatggggagattgtggcatgcatgcccctctggctagccagaacgatgaacgagctcccaaaatggctcccaaagctgagcgagacgggccgacgagtgccacgttcacggctcctcgctgccttcgcaccggaatctgacccgccccagcatgcatccaagatactgtgcttcttaccaactggctagctaggtgataccccaggaacacccactaaccgtcacttatcaggaactctagcacttgcctcaaattcttctctctcataagcccctttagtgtaagctctactactactagtacctttcctgatacagtaggggccatctacctgcgcactaggaatcgcctccgtaacagttcctagcgcagccctagcagctcggaattaggagaaaagcagagaaaggaaaaacccaccaatatcaaatctctctctttgttctacgtttcatgaacagtatgacaaaaaccgttaaaatttcgataacttatatttcgatgtgcttgtttcatattaatcatatattatacttagttagatctttaataagaagtggaggttaggtaagaaaatggggaggccaaggaaccgccaagctccaaacactgcaagtggagcaaacctcgaatacaaaccagcaaagttctttcaccggaagtttggggtctcagcaagcgcccttcggggctgggccgatggcggacgcgtgcgctgcgcgcgcttccccggaggcaagcgcatctacgcctgcgacgatgttgagcgcatctttgattgcggttccaccggccgcgagcaacgcagctctggatgtaccgttatctacgccagagtgtcctcggccaagcaaaaggaggacctcgaacgccaggttggcgatctccagcgcgcctacccagatgcttccgccgtctacaaagacatcggtagcggggtcaatttcaaacgccaaggcctgtgctccctactggacgcctgtgaccgcggcggaatcggccaagttgtggtcatgcaccgcgaccgacttgcgcgaatcgcagtcgacctcctggaacaccttttcgaaagaaaaaatgtcaaactcgtggtacacggccaagatgcacatgccggagacgcagacaccttcaccaaagacctcctcggaatcatcaccgtctttgtggcatcgcatcacggaaaacgagcagcgcaaaatagacggcgacgacgcagcgaggaagaagcgagctcgcacgaaggcgcgcaagaccatcaagaaagaatatgaccttgtccgtgccaaaaaggtcagggtataccctactaaagatcagcgtacacagttgcttaaatggtttggtgtcactagaagagcctacaatactggcgttgcgtttcaccgagacgtggcgaagggcgaggaagaagccatcaaattgcatcaagaagcgtgcatcaaaaaggattccaagacgaagcaggttttagtagatgaagatgggaatccccaaacgtatggtgccctctatggagaaaagaaagccgttcgatctaaagaaaggcatgatgctcctgaatgggttctcgaggtcccacaggctatccgtgattccgggattctggatttcttcaaggctcttaactctggacgagccaaaaacgaagaactcgctgtacaaaagaaagttcatgagcaatctttttataagtttcggaccaagcgtgatgaatcacagattttcgaagtgaacgcacgtatctggaatacggagaaatcaaagaccaccagctttctaaaagagtttcgtacgcgcaaagaaaagttccccagtcagattaagaacgccatgcgtgtgcaaatgaatcgccttgggcatgtgtacttctgcttcttacgagaagaagaaaagcgtccaatggaccaggcacccaaggcgcaccacagtgtcattgctctagatccaggtgttcgctcgtttcagacgatgtatgatgctgatggccgcgccattgaatggggcacagggaaagattttagaaccatattctatctctgtcgccgcgttgataagatccaaagcaggattgataaagctcaagaaaataaaaagaaaactgcatacgatttcaacacccccttgaagcgcgccttctatcgcgcccaactcaagatcaagaacaagatcactgagattcaccgcaagctcgcgctttggctttgtgaaaactatcgtgttattctcctgcccaaattcgaaacctctaagatgagcaggaggatggagcgacggatatccaagaagtctgttcgaatgatgtgtcgttggtcccattttgggttccgccaggctctcattcataaggctgagatgttcccgtggtgcaagcttgttctttgccaagagagctacacttcaaaaacatgcaatgagtgcggtaccctccaccataaactcggggcatccaaggttttccaatgccctaatctcaagtgcaaccatgtagcagaccgtgatgtccatgccgcaagaggcatccttttacgctacctatccaaggacatgatttaaaaaaaatcatttcattgagtcgcgggttagtctaactagtccgtgatggagtcttagctccttctatgaaatgcaagttttgcaaattttgtagtttaaaatctaagagaaaaccaaaatcgccaactttaaggtggaaccgccgccgccgcggggtgcgctaggggagtgctacacgcagctaccgtaaacccgccctcgtgccgtcagtcgtgagtatgttcgtttgttcgatctacgcatctatctccaaggagagaaagagggggaataagaggcggaggcgaaaaaacgtcaccgccgctcgaagaaagccgccctcggccttgcgtcgcgaggcggctctgactccggcagggcccaaaacggtatagtcgtggagaggaagttgcgtgcttcacgtttatcacctcaggtcgccggccacgtgcctgtggcggagcagattcaccgcccagaaacgccatcacgaggcgcgcgcgtcaaggacaccaactctccagcatcattgaagagtatatcaactcgcgggtgcaaaagatattcgagattgcgataggcctctttggggaaggaaatatggaccacttgtttaggccgctttggggcaggatagaccgttaattgttggcctagtagaattatagtgggtatactcacgcactcgaggggttgagtggttttggtgttgcgtattgcgccaggaaacctgtttcaggaaaggctgaattttgcaaatgccgtatgcagctgctgatgtcctggcttccgggaaatcaaagagctccgcagaatgatgggtttttgcatttgaagacacatgctagtatcaaattgtcgtagtacaacctttttgcaaatcttgacgtcatcatcgccaactctgctagcacgtctgcagctagctgtataagtagcagctagctagctagcaggtatcatttgtcttgagacacgggatgtccaggtccttcgacaccaccatcatttcaattcgcttatccacactccacgttcagcattcctgctgcttcttggtgaccgtgtccgttcaccaagttttgataccaggagaatccagacacgagggtgcacatgaggatgcacagacttgtcacgtgggccaagatctgccgagaatcagttcgaggtatccatctgcctgctcatggggcgctgggaatgatgtagttgctacaacgttctcgacactcgtcttcgccacaggtgtgggctcccacgaagagtccctgttctcgataggatatattttatttattttgtaaattatatttcacaatccaaaggtaagaatgtctcttcttcactgcaatgtcagatttggggccccgatttggggctcgctcttggatccttcttccgccgtgaatgtgtttcaaccagcaaaacaaagcggccttggtaccaaccatctaatccgctcgctttgcgcacaggtgcatattcccaaaggtatccacgaaggtgctacaccagctccgccagcgccaccgcacgatcgcctcgagcgagcatgagcagcgcccatgaattgcagtcgctccattatcgatggtagaagaataggtacttacttacctacttcagaggaagaggcacattccgcgcaagttcgacctttttaattttaaaaattcaaaacaaaggaagttgcaaatgaatgtagaaaatagtaaaatggtcaattcaatttttaatagatttttagaaaatgaagtaggtacctagctaactactagttgtttctacggaattcaggactctggagaagtacttaatagcagtagtagtaggctcctaccaccaccttcggaagaagatgcgatggaccgttccggactcgttcctctgagctgttgtagttctgactcttctttccttttccttttccttttcctttttccttttccttttccttttccttttctttttccttttccttttccttttccttttctttgtcttttccttttccttttccgtttaaaaaccacaactttggactaaaagcagaagagattcaattgaagaggaacctcagacttgggcaacgagcgctgggtctttcagcctttagcccctcgacggtcggtacctttgacaccaagagaagagtcgttcggccagctcttgtgcagctttggggtgaacttgaagcaccgcgcagacgacaaagcgagtaggtttgattcctttgccgcatatccagagaaacgcctgcctctgcgccggcctcgtgccctcggagccgcagattcactcttagcttatggcgtatgtggacccttatggtcgaaagacttgccgcggctttctctctctctctctgtatatatatatatatatatatatatatatgtatgtgtattcataatgaatacagtatacaatcaatgatacagtgcacatttcaaatttcaaagctcgaaacgacaaattcctttggttttctccttttccctaaggcattgaattcctcgaatgcttctcacacgtacatcctcgaatacctgtcggttgtacgaggaaggaagcaatgatttctaagggcgtatgagcccgcagaagccaatcggcatgggcttgcggaatcttgggacgatcctgctcggacaggcagcggatatgatatgattgccatggcggcaatcgttgccgcaactttccggcgggcgtgcacaggttggcacagtgagcagtgagtgcaatggacgaaggacttcgttgtgttttttgtttctgctttcgtaacatggagagaccaaagaaagagaggaaggaagaaagagaggaaaggttttaagtgtgctcagtatacgcactgatcgttcaaaactaaagtgaaagcaatgaatgctcctttaattcttggaatttttgtgcgattccattggaaaggagaaggaaatgaaagaaatggctgcgaaatatagctgccgcaatcagccgaagctgcgagctgcacgcaaagggggcttaatattaacctactcccttttgaggcatggttgtggaaaatgctcgctttggggcgattgagagtgatgtattttccccagcaaaagcttcacgtgagttcgctgattgcgccgagtttgaattaccgcgagaccagaaaagaaaacgagttttcttgtcttctattttaatattttaatattttaaaaaagtacttccttttttaaaataaaaataattaaatttaccaaagatatgactttctttttcatatttaaaaaataaaaggaagaaaaaaggatccaccattttctcgcagagagatggttagtcccgctctaaagactcctatggtgaaagtcgcttccggagtgtccgcagccgcacatttcgcgaactgcgttggtatcatgaatatggagatttttataaagacatgagttggataccttaccatatacacacaccgtcgctgtagcagggatctctcgagcttcgagtagagaaatcacgatcttcaggagtggctatcttcaaagaaagtggccacgctgtagtgctggcctagccgagtgaatcttatttttattcattcatgccacttctttgttgatggattgattgattgtttcctggaatcatcgcgatccgtcttacaagtagtcttgacggtgacggttttacattttttatacaattgcagatcttgtgaagcgtggtctaactccacctttttggcggattcttcttgtttaaaaacatgaaacaatcacacgatagtatctaagctttctcttgtggctagctagctatgattctggcttggagatatccgtctcggcattctcgacagtggctttcatggtaaaatctgcccaagaatgtcaaactactatcttagcgccggcagtcacaactttccaatctgagaccaggttgtgcaaagaagatcccgtacgaaaatagatcctgtttactccctctgtcttgtaggacctaggtactacaggcatcctccgttatttttcgacaaaaacctcaaatctttcgtattgcttcttcctttcggcgctcctggcgcatcaagccatcaattctactcgagaaatcacgacctgcgttgtgaagcctactgtgtattaaaatattgcgccccaagttcaaaggcgtgttgcgcgaacatcgtctctctagaccggtagctcacggtcgccgtattgtgtgtaacagcgctcttcccagcattttttggatgtggtcgctattttgcattccgagaaagcattaaaattgaagaatacgtcgatgcaacggagattggaattgtagatggatgtaaaatggttcactttctctattgcagtggcgggctcaaatctactgcaaacaaaacagctgcaaacgtaacaacttggaggtaaagaaagggagtgagaacatggagatgttgctgcggctggtgttgaactcggttttccgccgcgattaccatatactgcaaattaggcaacaggagttcttggttccagagattgccgggttttatacgccatttctggtgcacctaggtactacattccctacttgtaagaacttcagtgttactgataagagctaacagaacttgtagcaggacaagcgacctggacaacgccaccgcgtatgccgctcgctcgattcttcctattcctcgcactagcaccctcctatgaaaaatgaatacaacgaaaccagatgtcatctatcttttctaaaagtcaaatcagtttggagttcttggcgttccaaggtttgtggcacagatatctcgatgtattaagtggctgtgttatacgtgtcgagagcaaggaatgactggttatctagttttgaaaatgaattgggggattgattccaagatgagagcgggtcttttctgtaacactgctgcttacttcttaggtctgagcaaatcttcatcgtagctgtctacagacaactaggtatggtttgttaatctgtatgcgctctacttgggagagcctcgcttgtgtgcgggaatgtttagatgtgattttcaaatggttcgctgccttccccagaacacttcggtatgcacatgcgaagaaatcgctttcaattacggcggctaaaatgcaatgtaaaaagatcgtttgggccgttcgtccaatgattaatttggacagaatatacttcgcagctctgcaggctgcaacttggttgtgggcagctcgcctacctcccaaataaaagctacgattaacccgacctgggtaagcgaagagtgctgcaccaattgattgaacgggtgccggtggtcccagaagtttagactgctgaaaagtagacgcctatcctccaaaagccctctcggtctcatgactctaatcgaacatccatcgaaggtttgtctggcccgcacgccgtggatggatgcggagattgcagtacgccacctgcacgaccatgcactaattcgcactgcctttcatggaagctcgtagggcgaatctcggagttgcaaaagcatttgttacttttcgacttactacgaactttgtaggaaacactggcgatgcattcataatattccattcgctcttctttatcattcgtgagtttgatgtctgattcattaattcactgattcactgatccaagcccattggccaaattcgatgatgaaatattacattaacaaaataacttgaaataaacaaacaaataagctaaccaacgaacaacttgaaataaacaaacaaataagctaacaaacaaacaaataaataaataaacaaaccgaccggggagcgtggtcacagctgctgcgagttctgcgaatggcgtcgcattcttggccgagaagaccggtcgtggcttgaccgggaagcagctgcagtgcttggtgtcaaatgaataaatcgatgcaggaatcaatcaatcaatcaatcaaccaatcaattaatatagaaccaattgaagaagcaagctccaacaaaagcttacggtactggcctccgtgtcttcgggaaccgtgtggaccaggaggcatcttggtggcaatctcaatgggccttccttgatcttgcacaggttttcgtcttgatctggtgcttttcattcttccctggaaacgaagaatagctgctacctagcgagccaagctttatgctctgtgctttgttgcactcactcataatgcttcctccaagcccagccgcaacctccaagcccagccgcaaccgcaaagcgttcccgagtggaagaggaggcggtctaagctctctctgccacggcgtctggctcggtttccaagcaaaggagcaagcgagcgagcgacagtggcggtttgcaattattcattcattcattcattcattcattcattcattcattcattcatttgcatgctttggcgaagcctgaaatgaacatgtaatgaatagcagactttaaagggaaggacctcttcaaagagggaggacgaagaaggtaggtgcccacttagcgcttgccttagcgcaccttcacaaaaaccaacaatggatgaacaaacagcgctcataaacagacaatcaatcaatcaatcaatcaatcaatcgatcaataagatgcagaaagtagtggtttggaagaagaaatcaaaagaaaagaaaagaaaagaaaaggaaagaagagaaaagaaaagaaaagaaaacagagaagaaagaagaaagaagagaaaagaaagagagaaagcgcagtgcaatcgaggaaatcgattgattgggcagctctccctattcccctcaggctgaccttcctgtctcaagttcttgcaaagcgccgccctgcgaagagcctcgcgccgacacctacattgaggcgggagcgcgaggaagcgataggcagctgagctgcccattcacctacttgcttacttacccgtgcacaatcttctcaagaaagggaatgggagatggcggcggtgagtggaagaaggcgtgagaaaagaagggtgttgaacaatcaatcaatccaacaaccaaataaaataataatcaaaataataatcaaaataataatcaaaataaaatatcaatcaaaatagcaaacgagcaacctggaacaacttgaaacaacttgaaacaatcgagaaagccccaaactgaaaagaggcggcatgcgacagaaggtctacgcagcgaggtctccgtttgcattcagaacgtggaaaaggagagaccttttgaagaggctgccgtccttcgaggcctcttctgccatatatatatatatatataacatatgctcagagcaaactcttctcctgcagctcttacccgtgcgctaccaagtgctataaactacccaaagtaaatcagcgctattgcggcatagtggtcttttcttttcatttcttgtttataaaactaaagttttaaaaatatgaaatgaattttgtctattcgcttgttttttcaatttaaaaatgcctttaaaagaatatttctgccttgtatataaatcaaaacttatctgtgttgctgttcgttggttgtcccatgcgcttggtttatttacacacaaagcttttgcaaaagcctccgacaaattaaagaaacgagctctggctgcacgaaagaagaagatcaaccagactacagaaggcgtccacccagttgcagcaacaggctgatgagtcgaatgagctggaaatgcacctttcagtttgccctttgttttcgagtttgaaagaatgctgggaagcaggaagcatacgaccgaaaagaaggaaggcaagcacgataattgaaagcaagaatgtttttttttgtttttttgtcttttaatatggtgaacttcctacctacttagataaatgatgtttaattttaacagttaaaaaagaaagaaaaagaaatcgttcactaagaatgaaagaaaagcagtcaaagcaaggtatattatattatatgatagcagggagaaataggagccgtggaaagcaagcctacagagactgtcagcaatccccaaacgtaaacctcgacaagagtgtcaagcagcagtagtcgcagcacaacaccacaaactttctagaaagatgtccgtccccgcaaagcgtaaggctgatgagcagctgaacggcgagagcaccaagacccgcgacgttcgcgttgtcaagctccggccactcattccccctgccatcctcctcgaggagcttgctgtctctgacgagctcgccgccaagatccacgaggctcgccaggtggcctccgacatcatctccggcaaggatgaccgcatcctcgtcattgtcggcccctgctccatccacgacaccaagctcgccatcgagtacgcccaggagctcaagaagctcaaggaggagttcgagaaggacctcttcgtcgtcatgcgcgtgtacttcgagaagccccgcaccaccgttggctggaagggcctcatcaacgaccctgacctcaacggcaccttcaacatcaacaagggtcttcgcatcgcccgtcagctcctcctcgagatcaacgagcttggtctccccgttggcactgagttcctcgactccatctccccccagttcacctccgacctcatcacctggggtgccatcggagcccgtaccaccgagagccagatccaccgtgagctcgcctcaggactctcttgccccattggcttcaagaacggaactggtggcagcgtccaaatggccgtcgacgccattcgctctgcttccaacccgcacagcttcctcggtgtcactgagcagggtctcgccgctattgtttccaccaccggtaacgaggcgtcccacgtgatcttgcgcggtggcagcaacggacccaactactcgaaggagcacgtcgagaagtgccaggagctcctcgagaaggccaacatcaagaaccgcatcatggttgactgcagccacggtaactccaacaaggaccacaagaaccagcccaaggttgccgctgatctcggagagcagatcgccgctggcagccagagcatcgccggtctcatgatcgagtccaacatcggcgagggcaaccagaagatggacattggtgtcaccgaccccgcttccctcaagtacggtgtctccatcactgatgcctgcattgacatggctagcacccgcgaggttctcgagggtcttgccaaggctgcccagaagcgccgtgaggccgcctccaactaaattcaaggtcgccatgccttacgcatagattggccttttctagcgatgccgtattcttcgtcctaaactccgtacatcctgtgccaacactacttcccccttcgcagtgacataaactctagccacaagcactgctgtctgtctgtctgatggcaatttgggtgatatgtgatctggatgagtacgctcgccccttgctcttactgctcctgctattctttttaataatccatgtgtgtttgtgcgtacgaaccttgttgctcaaataaatatactttgggcactcggtatcgtcgactcccctcaattctttctgattttcttcttctcgttcctctccactcagttgttactgtgatcctatacctttcccccccaagcctctccatttttaaactgctagattgttgtacatagttctaaagatgtacacaacagctagatgatcatggtgaagaactttttaaaaactagatcctcctttgcaagattgcaaagcatcatcatgaatttattttcatcttttaaacaagcagagaccccaaacatcagcaaattcatctttttcctttgttatccccgatcgttttgcctttgtttagctacctcacttggcctccatcacctaaaaccaacccctttaaaatcccctgtctggaatcactcattagtgctttacaaaaacagtggcagcgctcatgatcaataccttcctaggtctaatttcttttatctgttttctaatttatattttcttttctttttgaaaagttttttttttttttttactagtacaattatgagggact

SEQ ID NO: 84 - DNA, 22046 bp, unidentified
  misc_feature 1..22046: note = Fanzor polypeptide
  source 1..22046: mol_type = other DNA
tcaaaagtcgatttcagcgaagcgattgatcttctcttgtacttgctcaatatctttttggactttctttcgcatgtagaaaattgggcagtcacgcgatgtgcacaaaacatcctgatgtagactgccctggcatctctggcactcagtccaaagtctcgaaaaacggtcttcaagttcattagactcagctagacgatccaggtagattgattcccgattcttctcacagttacgacacaagccgcccttttggtcaataggggcacggcaaccaatgcactgtagctttttcaccgcaaaacgagcaataccgacagttgaagatggagttgccttgtaacgtttcaaagtgtgatcacccttgagaagagattcagggttcggaagaatcggtgcgaaaatacgcagtagcggtttcgataactggttctgtaagtagtagtcgaaatcaatgggaaggttatgctgcagaacccaaagaggatcttcagacttcatatatgcaggtgcatcctttccagccttgataatcacgtatggcacacggtcgcctactacaggtgccgaacctgcatctcgttcttgcatacggcgtgctagctcgacatgagcttgtttcacagcatagtcttcagactttccactgagggacttggtgacaatgagcaatgaaatatcgaccttgttctgaagcaacgcagaaattgtctcctttgcgtactcggtcgctccttgtacagaacggtcaacgagaatcttatgcagacaagtcccaacaacggtacgcacgagtccacatgtatcacgacgcacagtttcaagacctttggcatccatcttatcaggcttctctgaagagctgcaatagtacataccggcatagcgtttcttggcgaggagcaaaaaaggaaagtaaaccttttcaaactcaagggcgatgggtttgataaagagttctttggtcagttcctcagcagccttgagaccaagcttcatagtctccttcacagtcggcagtccaaatcggatcatgacagaatcagtatcaccataaataacttgagcatctgctgtgtagccatttgcaatggtgtacttcttctctacagattctttggtaagattaatcatgtcacgaccataggcagtgactgaagaagagatgggaatacagggtaaagcaccaattgtggcaccagtgaaaccgtagactgagttagcagataccttgagagcaagctggcgaccgttcattacagcctttacaagagggtcagttgcatttttcatgtcctttttagcgcgcttgcgagcagctaaaagctcctccaaaattgtgggaaggatacccttgttgcgctgagacgtaataaagagatgaccagatggggtcctcttatagtcttcaccctctttaagatttgcttctcccccaggaggaatcaaagtggtatagcaaaggttgtgagccatcatgattgatgggtagagagaggcaaaatccaaagtagcaactggctcgtcataaaagcctcgaataggctcaatcacagtagcaccttcgtatgacacgtcaccgccgccctctccgccagcccgagggagtacaggaacaatgagatcatgctgcaggcacttccggtaaagcatgctgagaaccttgatctgttgtccgcgagagaataggtatgggatagggacgccagtaacacgagccatctcgaggtagttgatgagaaccatgagcttttctagcagttgtagcggcaagtaagcatccttgagacagtacacagcaagacgacggcgatcctcgtcagtaccacgttggagatcgctaatgatggaatgatgcacatcctccttctgctgaccaagaaactcactagacacagcgttcaaagagtatgaagaaagcttgtgattacggtacatgtattggatcatatccataaccacgcgaccttccatctcaatttcagagttttcacgagtaccataggcagcggatgagaaagtcttcttgtttatcttggcgaccttgttacgtagcttacccagctgcgcaaattgggagtcaattttaagagcttttgcacgtccgagaaggtattcgaaatcgaaggactcaacgttgtaacctgtgacaacgtcagggtctgcacgctgtacaaggcgagtaaactcaagaagcagctctttctcgtcctgaaagctttggacttgagctccgacaattggcaggcaagtatcaagaacaagcaccaccttgcctcgagcatgatcttcgccctgaaccttgatgtaacacgcgatttggataactggatcctgctctggatcaggaaacacaccgcgacgacccatgcactcaatatcgaatgagaggatacgcaagggggccacgccagcccactcgggaagacctggatcatgggatataatgtcttcatagacagcatcaatttcgagttgacatcttgattgccgggattgttcaactcgagagcggaatcggtccttggggattgtcaaccaattactaccgacgatgttattgtccaccatatagcgaagcacaaatggtacgttactttcgtatgtcatgtagttcttttcactaaacccagggcagtgaaatccgttttgcagaatactgcgcgctttaggcacgagattaggcaagctcatcatgacttgaaggtactttgactttttgttatcgcagaatcccataatgttcatcttttcgcgaattacaacagccacaacacaggatccttccatgcgggctgctgaactcacgcgcacattgagagcctcgcggaacttgctaaggtcgctttcttcaaaggattcagaagggatatccgtgtaaaagtatggcgttacaccgtatatgtggcacatcacactttgacctttgtttgtaactccaaagatgcgaatgattggcacttcgccagttcgcatacctggcacgtgttctccagggaccgggtgtgactcaagaggttttccggagtacatgtccatgtcaatccactgcatcacaatgtcgtttttaagttccgtgccgtcgaggggtggtctttccaggctcattttcagatccgcatcctctgccgtggcaagttgcgacgcaaagtcagactcggtaacctctttctgtgagcctcctccatgcgctgtgccgctttgaggaacaggctctgtgatggttggctttggcttcttgctagttgccatggcatcgcctgcggtctttgtcctcttcgcctcgggcgagtctgaagtaggcactgcacccgatgctgaaggcgccgtaacgcgtttcattctatgtctcctctatcacacgcaactgactggccgctgccgccaattccgcgattctattttgcctcgtcttgtacctctgaagatgaattcaaaatccaaacgactaacctaacgaccgcaaaaagtctaactgtagaactaaccacctacttaccctaagtgcctattagcattattactaacaaacaggttcttagttgataaggtgcttgaagtgatatttctagcacctaataatcgccagaacggaagagttatattctgaaagttcctagtttgggtgtcacctgtccagctccagactccacccgacatacctgaggtttgggcaaacatatgtgttctacattcaattacagcaacacatgttctggagaacaatttgcttttattccctgttttctaaagtatgagaagcaagtttgtataagcaaccagatttataattgtaatttatagatggaatctaagacgttcatggaatagagatatccatgcaaacaaagtatcacttatatcgtacctaagatcaaaatctctatgatgctggtgttctctcccactttacgcttggttcaacttgaaaatccagatcactataactttttatctgaagtgggcagtcttatcgcttcatttactacaactcacggactacgtccactgtgcagagaaactacttctctcctcaacttatataccagagacaagagaaacatcaatccttattttctcctcgaagtatattaatatatctgtttaccatcaatatatgcaagactcaatggaaatgttcaattgagatgtttgccatccgttgctgctgtgtaaacgaattcattgaacgaagcgtcaggatcactgaggtaatcgcagtcagcatagtgctgaatatggtgacaactatcttgtttattattttaccagattaatcttaggggtctaggggtactaatttagcatgacttcgcacatctgccatgctgacgtgagctccaaaaaacctcgttgggggcagagaacataggagagaaaaggcaaaaatatggggaaagttatacatcacctcactaaaacattgtgttggcgagttttctgatatgctaaatctaaaactctttatgaattctgttactgggttttagcaaggactcacagtgatggctttcctctactttcactgttaataattaagtctactactactgggtcttcctcacaaggtatattcaatagtgttttatagttgcacatttaacaacgattgtatttgaatatttaaatcgaaccgatactaaaccagaccattctcgacaaattgcgaaccttggcaaagctacctaggtttctgcgcttggacaatcaaaatggctcatattagataagtaaatgaaaggcgttttggatagagaagtatttcccggttttcagatattggtttaaagacttagttactaaaaaatgaataatcaatcaaggaaagcaagcaattttgagcatcttctcaaaacttttgggaagtaagagaaatcgtctcaagcttacttatttgataacaactagtgcaaaacatctactcaaccgatctaaaaagattatttgaggttcttgctttagttgctttggtacttaaaagtattttgataaagggacacccccaaaatactgattcctttataaatagtcaggtggttcacagtagcttctgaattcagttgatatgaacacgatacagtcgtagcctcatttggagctttatctgctatccgcgtagctggagcatcaccagtatagatccttgcataaagagttgaaaagatgaaagatcatatttagaaaacattaaaataacacgaactaaggctcgtctgcatcgttcttgtgaatgattcggagtcgatagactggctgtaagtggaatatatagaatgagagttgggaggcctatatgtattggcgtatctcgtgaatttgctgattgaatatcaaccgcaaagtcttaaaaatccacaaattgagaagtgctacaattttgcttgtgagctctacatagcaaaccttcagctatgtggaataaattgagatagatctcaatggtcttgttagaacatcggatgttcgagtaaactagccaggattaaagaactgcttgcagaaatttcatcttgtttggttgaaaacagaacgtcgttagaacgttccatctgtactccatactaacttaaggttgttgttctaagcgcgagtttttcgctcagttggaacagagactttggcagccctcgtgtccaacgcaacgaaaccgaaatggtctttccctcatcgaacctactaggcaatacttagcatgtgtgcctttgtccaaacgtcgtactttaaccgacttctaacgccacagtggtgtagctcctaccatagccattccaaccacccccgcgtttcatccgaggaaacatgttattcttataggtgttcaattcagcgagtagtcgtctgacttgtgcttcagtatttttttaaaagttgattctcacttttccatcgtaaaagattaggtttgatttgaaagaaagttaaatcttgctaatgactcgtattactacccctagtaggaagcaccatgtcaactattaaattcaaaaatgttttcttccaaaatcatatcatatcaattacgaattgcaattactaactactaccatcatgattgtttttattagttaaaagtttttaactaaattatagtttattcacccttctaaaaagacctcgaattctgtaattagagttacagcaaaaaaggggtttaagcgaaacgtattcgatatatcaaaccagttgggtatcagaagtagcttgatactctctagaaagctagcgagtagatcacgaatgctggacgaggcagtcccaacccgtgagtacactaccaccaccccactggcgcggcctttcttcgcaagcttcacgtttaaggcttgcgatagtctctgcgtggaagggtataccagtataccatcggctactcagttgattgaataacaatagatgccccgtttggttatatttagctcgtatactcccttttgatcctctgtccattttttgaggagagtttgtaaacggcaccgtggcagtttgcttgggctcagccaagctactgataaactagtcaaagtcaagtgatagcttgacgaactttggtagtatgaataacaagagtaaggggtacccttcttgtgtcatcattgcttctattacagttgctttatttcttcttgcatgtatctcctctttttggctagaatcacctcttactctgctggcaccaaactggtcgataagagcaaaacaacgagataacgagaatgacacaaaatgcttaagtcctgatggttgcggtgggaaacctccgatctaaggaagaagtggatgtcccatcagcaatgtcaacaaccctgattttgatgacagagagaacacaaggagaaaatgccgcgggaaaagatgtgcatattccgtcagcaacgccaaccttgatgtcaaatggaaaacatggaggaaatgttacggaaatttcccaggtcaactgctcattttctggtgattgccagaagtggccctatttaatggcaacagatgcacgcatgcgattggcgcgccaagaacaacttgtggtcaatctaatgcatattccaaagactggtggaacctccttatataatgaagcgagaaagccgacgagaacattttcaaaatatttttcgtttcaaaaatcatcgccaggaactgatgaggtctgtttcttaaatttaaaggatgaggagtttcctatcgcgaccatctttcgttctcctcattcgcaaactttgtcacagtttttagagtgcaagtatgatctctggggccagcatgtaaccaggtttaccagtttccctagaggtaaaaccgaagattttgtcaagggtgtaactccagattttgatgcttggttagatcatttcattgccgccccatccacaagaaactattttagatgctaccaccccaaaaactttcaaacccggtacctttatggtaaagagaaacactatcatcacggttctatttgtcatggacccacttatgagccatttcctcgaagtaaggagcgaacacaggaagattattaatgagctttggtacattggtctcactgaagacatggaactttcaatttgcctgtttgaatttcagattacaggagcggtttcggacaggtgcctgtgtaattacaagacttcaaaagaatcagtggggcaaccggcaattacacatattactcataacgttcctcggcatcatgtttctgcactttctgaagcgacattgcagaagattgatttgttgactaatgaagatgtctttacatacaatcatgctcggaaaatattttacgagaaggttaatctagcccaaacctacctcaacacgtgtttgaagggtttcggtgacctttcagattccgagaaattaaagctattacaataattgattcttacgatactttttttaattcaaacgaagtttagtttaatacatgagttatgcataattgagacgcaagtgtctgggcctagtgttattccctttatttttaacaggaaaaagaaaatgataagctatggtacctctgaactcgtagattgttcaaatgtgatttgggtcgagggttaatcaacttttcactcgaagaaggaaatatttagcataatctcaaaaagtctaaaagaatatatcatgttttgatggtattagattcgagataatcagcatcaaatgttttaatttgtcatgtttgccagatatgaggttgtatacctggtatacacatattttattcttatggcgacctattctcgcaaggtcgaatagcgcttagcttttcttgtcaagatttgttcttgataagttaaatctgagtccatgcaatgcactgtttttaatgcacaaaactattcactgtttgtgcttttgcgaaatattttggaaacaacctcttgtcatcatgcgggtgacttttacaagactacctgcttgtactaattgcatttgaaaagggtggggtaattttagaattataatcattatcagttttttgtctcaaaatgagaataatacccagaatccgctaaacaaagcaaatcagcactgaactgcaacagagaatattatagaattataacaagtaggactttaattgagcctatttatcaaaggctcggtttcaagatctacagcgttcaatgatagcactctcatatcccagtgttgctagctacccaggtggaacgaatatttcgctgggaattctattgcatttctaggcttttagattcataaatcagggggtgcaaggatcgaactaaggtgtaaactttaaaaaaggtatagaattacttaaatctaatacggcaaacacgaattctgtgaacctaggcaatcgcacagacggtccgagcaagcaagcatagttgtcgaatatgttcggctatgctaaaaatacaggaagccttttgtgtggcagtgaagaaagaggcaaaactaattactgcgaatttcgtcgagtggataagatcttctcaatccatagatttccaactcagaataaaggctgactataaatcccttgaccagagatataaaaattcaggcttgcacattaaagtctttggaaactagaggatggctgcgaaacagctgtgtctgagatcttgatattttgatttgtttacttgacgtttgtataaagttgtgttcattgatggctttgcaatagagtgaaacagtcaccaacaattagcgaaacatggagatttgttgcagtgatactccatgcagagggtgaaggcagcaacgcatcgtcagtatgagtatggacacagcaatctcaaacgcgggtttgcagctacaaacaaaagttgaagccacaaatcagatggatatttgattaaacattggagcctggaaattttcgtaagcttgattcaagtgcttgctattggctcgtggcctgtgcgacgtgttgatatatttccgaagccaggaaaatatcactgatctggcgtggattcttttatgaggaagtgtgatcatcaacattatttcaaacttatacaaggcatcttgcaatgaatataacccaacacagcgaaaatgatataaagaaaattatatgattcatatacaatccccttttgatcacctaggtataagacttatgttcacatacacttcaagagggcgaatagcttattagaatgcaaaaggcaggatattttgaggaaacaacttatacagatgctaggcgcagatatttacatacgtttaacactggaaaggcgtcccctttgtgtatggagattgtttgcatatcgacaaaatctaagtgagcgctgtgttgggatttactttgtaaacaaaatgaagttgtcaaatgaactaacacccctttgttaaacatattgaaatattattacctgaccctatcagtattgatcatataagggaaaaacaaaaaacaaaaacaaaaaccgttaaaagttcgataacttatatttcatattaatcatatattatgtttatttaggttattgataagaagtggaggttaggtaagaaaatggggaggccgaggaaccgtcaagctccaaacactgcaagtggagcaaacctcgaatacaaaccagcaaagttctttcaccggaagtttggggtctcagcaagcgcccttcggggctgggccgatggcggatgcgtgcgctgcgcgcgcttccccggaggaaagcgcatctacgccagcgacgatgttgagcgcatctttgatctcggttccaccggccgcgagcaacgcaactctggatgtaccgttatctacgccagagtgtcctcggccaagcaaaaggaggacctcgaacgccagattggcgatctccagcgcgcctacccagatgcttccgccgtctacaaagacatcggtagtggggtcaatttcaaacgccaaggcctgtgctccctactggacgcctgcgaccgcggaggaatcggccaagttgtggtcatgcaccgcgaccgacttgcgcgaatcgcagtcgacctcctggaacaccttttcgaaagaaaaaatgtcaaactcgtggtacacggccaagatgcacatgccggagactcagacaccttcaccaaagacctcctcggaattatcaccgtctttgtggcatcgcatcacggaaaacgagcagcgcaaaatagacggcgacgacgcagcaaggaagaagcgaactcgcacgaaggcgcgcaagaccaccaagaaagaatatgaccttgtccgtgccagaaaggttagggtataccctactaaagatcagtgtacacaattgcttaaatggtttggtgtcactagaagagcctgcaatactggcgttgcgtttcatcgagacgtggcgaagggcgaggaagaagccatcaaattgcatcaagaagcgtgcatcaaaaaggattccaagacgaagcaggttttagtagatgaagatgggaatccaaaaacacatggggccctctatggagaaaagaaagccgttcgatctaaagaaaggaatggtgctcctgaatgggttctcgaggtcccacaggctatccgtgattccgggattctggatttcttcaaggctattaactcgggacgagccaaaaacgaagaactcgctgtacaaaagaaagttcatgagcaatctttttataagtttcggaccaagcgtgatgaatcacagattttcgaagtgaatgcacgtacctggaatttgaagaaatcaaagacctccggctttctaaaaaaaatccgaacacgtaaagaaaagctccccgaccagatttcgaacgccatgcgtgtgcaaatgaatcgccttgggcatgtctacttctgcttcttacgagaagaaaaaaagcgtccaatggaccaggcacccaaggcgcaccatggtgtcattgctctagatccaggtgttcgctcgtttcagacgatgtatgacgctgatggccgcgccattgaatggggcacagggaaagattttagaaccatattctatctctgtcgccgcgttgataagatccagagcaggattgataaagctcaagaaaataataagaaaactgcatccagtgataaagacaatttcaacacccccttgaagcgcgcattctatcgcgcccaactcaagatcaagaacaagaccactgagattcatcgcaagctcgcactttggctttgtgaaaactatcgtgttattctcttgcctaaattcgaaacctctaagatgagtaggaagatggagcgacggatatccaagaagtctgttcgaatgatgtgtcgttggtgccattttgggttccgtcaggctctcgttcacaaggctgagatgttcccgtggtgcaagcttgttctttgccaagagagctacacttcaaaaacatgcaatgagtgcggtaccctccaccataaactcggcgcatccaaggttttccaatgccctaatcccaagtgcaaccatgtagcagaccgtgatgtccatgccgccagaggcatccttttacgctacctatccaaggacatgattttaaaaaaaaatcatttcattgagtcgcgggttagtctaactagctcgtgatggagtcttagctccttctatgaaatgcaagttttgcaaattttgtagtttaaaatctaagagtacaaatctcccaaataacctattagcaggtactgccacatagtgagttcactatacaatcctaatacaagtctgttgagttcaagcagttaaaagatcgcggcggctacgatcctcgtttgagttctgattacaattcgtgagcactccagcaggagcgcgactttgattggtttcttgccagcttagtagtgatctattcaacaatttcactatctttgactagcaagctcagagacagagatagggaaactattgaggacaatcgttacctgctcttgagtgccagttcttctaggtatctactttcacgcaccacgggtgaaagagtttggggagacgtattgtatagaactactgtcccgttcaggaactgagttttgttgaagactgagctatagctcttacaaaccaagaggatcctattggaaaaatgcttagctcagggataatttcctttttcctgctcgttgcatctttctggcgagaaggtctcggttctgctcagcaatgcaccccaattaatcatcctcaccatgtacaagaccttccaggctttgctgaagaccaagataatggttttccgtgtatgtttgccggtacgattgagactgcagcagatcacaacctcttctattggcttgctcgctacgaaggagaggatgatgatgaggaagtgcctttagtgttctggctcaacggaggccctggagcatcatctcaactagcgaacttcctctttcatggacctctgcgtgtgaaagcgaatggaacaggcgtggagcgcactaaccagacatggagccgccttgcgaacgtcgtctatctcgatcaacctgttggaactggtttctcatttggcgaaccgcttttggataatatggaagaggtggcttccgaatttgttacattcatgcatgcattttataagttgcatgagtggagtcgtggtctccctctgtacctaactggtgaatcgtacggaggtaaataccttcctgtctttactcaagcccttcataaggcgggcatctctgtgaaagctacactcattggcaatccactcgttgctcctctgcgccagcgtaatcgtatgcatgtgctgccaaatgcattaggcctcttagattctgcacatttgtcccaaattgcttctctggaacgtcgatgtgaagaagccattggaaatcatcaagttatgagtgaggatgcatgtaaaaacataacagcatacatcgagcttgtcagtgcaaatgtgcatgtgtatgatgcccgtcaatttgactatgacttcaaaccgcttgaagacgtggtcctcaagtaccttctcaatccggaagtgcataaatctattcacattgatcaaagtactaagacaccagtgtttgaaatcagctctgcccgtgtggaccatgccttaagccttgacaatgttctcagttacagcaaagtttatgaagatcttctcagtcgaaatgcgaagctgcttgtatatgctggcgagtttgatactaaggatgggccgtatggtcaggataattggcttcgtgacctgaaattccctggacgggaccaattctgggttcaagatcgaaaaatatacaggtttcctgatggaagggtaggaggctactttcgctccagcgaaacattttcctttatggttgtaccaaaggccggacactatgtgccaaacaacaactttgaaacttcatttgctatgttagaggattatattaagcatgggggtcttcaatgtcacgaaagcactgggaaaggttgttcagttgcctctgatctctgtggatcaatgcatgaatgctctggacatggaacttgcaattcagaaacatttggtcgttgtcaatgtgatgaaggatttggccttgaggattgctcccttcaaataacgcgcgtccatgataatgacgaaaccaacacatataagccaggctcaattaaaacgagcgggattcaatggtttggattccaaatttatgcaaagaccgtgcgcatcgactcggatccatgttcactcgatgtgttcatttctcgtaatattcaccatcaaccaacccatttagaacacgatttggcactttacaaacagactcatttgcgcatcgaccaagaggccctctctctcccgccaggctttcgtcttacagttcgtattagtgggtttcaagaacagttcaataaggcccttgacaaccatttcagcgttgaacctctctctgatgagtctagtcgtgacacattaataacgaagccaacttcagagctcatcgccgctcgggatgtcatcgacatcaacagagacagcagaaccatcgtcagaggcagtatcttccgcagaggacttgggggggtcaccaacctcgctcgtcgactttttaatctcgtctttgtcgcccactgaaaactccgtaattgacgtacgtaaggctacaatctgtttttgcaatctttccttttccttgtacgcttcccggagcgatgcttcgagtttttgcgctgtactttggatctcgcgcctgaactttgccctcgccagatactggaaagcatgatcatgaagcgagggcaaacttgcgtaacggagataataatcatcccagagcacaacttttctggccaccacagctgggtgaggaagcaatggtatcttttcctctagctcatttggcattggtgaatacaaaatgttcacaaaatcgtttttccgttcggccaggtgatcccaaagagataccgtcttcagaggaatggcctcacgcatcctttcagactcattatcgcataaaaacgtaccatacttacaagagtataaatgtttcaaaatgcatataagatatgcctcgttaaactcaaagcatggtgcatattggttcaggagttgccatacgcagtcaataaattgtaggaaacacggcgagcgctcctcggacccaccctccattccatgccctgtgcgtgacataaagcggtatccaaaggaaagccactccttttccaccagaaccgggaagccctctagtgttcggtaatatggatctaacaagagttgagcgagagcacaaacttgcgaggtcctgtcccagccatctgaacaatgaacaagaacagggaatccgttgcaagctacatagcgagcaacagttatactagcattcagtacagcacgtaagtgattaagccaaccggtgttctctacattagctaaccagttgtgtccggggctcgagacgctcgagctactagagcttgacgcagaagtgctggtcacaagatgcattagcttatccatagatccacgaatcgtgtgaatgttctgaatgttctgaaatgatactgaggtatgcgggtaacgtagctcgtcctcataacccatacctttagctttattgccaagagcattcttgtaaggtctacagtctacaatgcgggcagcaacgctattagcacgttgaaggatactggaccagagctgttcatctgctcgacatgtgttattgccaaggcccaccttaggttgactgcttctccaaatagagcctttgttatccgcattataccatgataatgcaggaattctacctttgctgcgaaattgagcgacaacgcgcaaatcttcgtcgctgattgaagaaggaattccaagcagtgaagggtagcttgcacaaagttggtacctttgattaacctcactgagacgccatatattttcgtcgtttccactcgccccgaagagtccttgcctaatgaattcccttctaggatcatacaaccgccatccgcgctgctcgctacctttgccaagcacgaaccggccgtgttctaatgcgaacaaccaacgcagaccttgtccttcgctaacaggaaaagcagacatacgcacgaggtcatgtactttacttgcatcagcatgcgatgcgaatctaaattgtagcttgcggaaatctttacaaaccaagttcagcatgaggccgtcctttcctctactactaacgctttgtgcacttgcacctcgtgatatcttatcgatacaaccaaggggaacatcgaacatgctatcgtcctgaaagagccaattatggctttcatttttgctttgtgaagatgggttaaagtacacgcgatagtttgtaacgtgaagttttccgtgcacaatgtcctggttcatagagacgaaagcaacccggtcgatattaaccaaagtcttttctgccccaactggtttatgtgatagctcggcctcctcctctactgaaagattttcatttgtggcagcccccagttctccaacgtttgcaattgttggcgccgtcatcatatttccctgacttccatgttcaacaatattgcttaccgtcggcggtatcgtctgagcttgcaacggatcatgaccctgagctccacgccctcggccttcagtagccttacgattttgacgctgtggctccgcaacccttcgttgtaccggcttcatgaagtgcatatctccagaaactcctgaagttcttgcctcacgcgaggcgaatctttgctgctgtgagatatgctgtggaagctgctgttgagcatggttcatagcagctagagatgtcacaggtatgctgccaattggagccgtcacagaatacgacggggctcccaaagtcggattcgtggagctcccgtttgaaagcaaggatttctgcaaattggcgttattattgtcaggatctacaatattgtcattctcgagaagcataggaacctcggaggctgagggtggcgggctattaaagggattaaattcctctccctcgtcaaggcctggctcgctaccgaggccggagagaggatcccaatctacctcggagcgcgcagactcccgctgggcgctgcgaccgctgctcatggtgcgatgtacaaggcagacactaagcacagacaatatggcagcgctcaaaagcttttgagaaagtgcaagcgacaatgagcccagggaggtggtgggcacaacgaaagcactggccaacgccgaagcgtaggcggagcctccgcagtatggatttattgattagactctgattaaatactataatcgttgttcttcctatttctaccgtagcattcctttctatttgatcagctttgtataggtcatataggcatacattaatttatattctgtatgaaaaaatactttaatcgagtttacattaggtactactactggagacttggcgggttgctcggctaaattgtgaaattattttaatgctggaataatttatgtacatacctttgattgatttaccatttttttttacgggtttcatgcccatgtgatatatttttttatacaagaaatgcaggcggtgaccgaattgcatcaaacgcttctgctataaacctcggggtcttcatggcattctgcaattctacatgtagccctgctactattgtctttcaacagtaattttcggatttgaaaaatcgctgcgctaatttacaaattatgaaagcccagtctatatattgtaactcttgatttataaaggttaatttttgatccttttgaaagccccggcaattattaaaaacgattgaaatagaataatactatttctgaactttctccaattgttcgggagcttttgaatactctaggaagatgacatgccatagctatgaccacattgtacacaaatttagtagacgataacattcataccccgggtcactaaattcaaatcgattcagaacttctgggctacagctaggttgatattgtagtgaatgaagacgtgagatgaagattctgattctgacgatcgtagtcaaatgctaaccaagaaactactgacaagtctgacaatgacgaagaatatacataggcttcttcatgtatgtccatgacataggctttaatccgtatcttatcgcgaacaagttttgcaagccagtcattcgaatagagaatatgattacctttgaagaaagtaaaggcgtcgttttcgcacctgtagctcaaattagatctttacctgggccatcttgtcttttccaagcttatgtaaaattttccactgctaattagtggagtgaaacttcaattagcaggtgcgaatctcactcatgaatgtccttaaactacaaaagcaaaccaattgtagatagatagacagatagatagatagatagacagatagatagatagatagatagatagatagatagatagatagatagatagatagatagatagatagatagatagatagatagatagatagatagatagatagatagatagatagatagatagatagatagatagatagatagatagatagatagatagatagatagatagatagatagatagatagatagatagatagatagatagatagatagatagatagatagatagatagatagatagatagatagatagatagatagatagatagatagatagatagatagatagatagatagatagatacaattagactcggaatagttggtaatgagggataaacatttatcaaaaacactgctacttcatgctaagtatattaatacaaggagacacttcctgaaaaccaaaacaatttcatttctttttaaagtactacctgataatacagacgagtccaaaagtggcaacaaacatgaaaggtcgttgcacccaaccagcagagtttgcggttcctctcttggctgcgctttaccctagctatttttcataccgcagcaacgcttgaatgccttgagaggattgccgtgtgcttgggagggtgcttggtcggctggtggttgtggtggtttggtccacttgtgtagattcttggagattgctgtcttcaggtgataagtttcacacatattgctttccctattcatcctggtttgtcaaaactcatctcatagagaacgcaacagaaaagaaccctccctctgattgatttagaacattgaaaggagatataaccaggttggcccttgctcagtggaaagtagtcaattggcttagttgctttgtgcagtaccaacatctttcgttttggtcaaagaggtttagcagatagtacgtacaaaataactcgaggttcccagaacttcttacctgttaattttagagcaaaaatctagaagttcgttttgtaaagctggatcaacaaaatgctgatcctcattgagtgtgctcaactcgcagctaggcttgctcgcgcgtactgggccattgccttaacatccacagccgccgctgtgatttggaaggaagctgcagattggagtcgctatgggaagctacgaggtcttgtaaattctcaagagaccaaattagatgatgtcaaatcgattgggaatattattcgaaattggacagttccaaagcggtggtttgctcacttctacgaggtgtgttggcgatgggctttgttgctcatgattgcaacttacgcgggctgggatggagtgattcttcagtggatggagtcagtcgtgtctgacaaaggaattttagcatcctgttttggtatagtattgtgtaagtcaggacaaggctcgatcttgcgagaaactggctggcagcgtccttctacaatattgcttctcttagttctgcaagcaagacgacgtttgtatgaagagaacaacatgtttgtttccagctcagaagctcgtatgcatgtctttgggtattttattggtcttacgttctacctcgcctatggatggagcacagtgttcgactcttcactctataaattcaacaacccaatgtacatagaactcggagagaacatcgatgttataggcttactgggcattatcgtttttatcgttgcttcctatgaacaacaccggtgtcatcgaattcttgctggacttcggaactcagatgtgacctcaatggttcaccagaaaaggcaatactttatgccgaaagggcgtctttttgaatatgtatcatgtcctcattacttcactgaagtcctgatttatttaggcttagctctaatggatgtccacaacgtgtcgctatggcttgcagtaatgttcactggtttaaaccttggcctcacagctgtgcgttcccactcatggtacaaagcaaagttcgaggattaccctgcccatcgaaaggcattcattccttttattgtataattgtaaatctgaaatagcataatgcatgactggcctgtactttcttaacgtctgttgtgcgcatcttaggtgtgtctcctaagcgcttcattgctgagtcttcaaaaaataaaacgtttacaaagctattattcagcaataaattacaacaccacgtaattttagtttccttttttataaaaaatatatatatataagtaacacttttagataaagcccaaacaaacaaacaaacaaacaaacaaacaaacaaacaaacaaacaaacaaacaaaattcctgcttagctatttcgttatttcctactatatgctactaacataaattcaaaattgagctgctggttctttacaagcataaaattgagtcttcggcgattcgctgtttgctaatacaagtgcagaacaaagtctctgagcttttatttttgctgcgaggttgtcctttgctttgttaagcttatgtaattcgaagtatctatggcaaaacctgcaggcagcgaataacgtttgatggaattattttttcagaaaattcaaccatagatagtttttgtttcacctcttttcatatggcctttcctttcaatacaactgacgaagaagaataaaaattaatctgtgtatgctatgctatatctttaaatttggaatttgatgaactttaaaaaccaaacgggaaaatttgactcgtgagatgaggcgaatactcattatatacgctcaggttccagatccagaagtcttttgctatcttcgactgaaataagagcagtggaataggattatggtagcgacgattcatatttcgactcgaacccctctttcccgtcctttaattcctctgatagagcagcagtgaagaaggagtgaggtctttccagcagatcagtcgggagaatgaaactcgtattagtcttcctttctttaagaataacctcttccatggtgggcgctaattagttgcgatggttataacgatggaggtctcatataaacaaaaaataattaacgtatgtctgttgcacaaattatagataaaatcattctgaatttatgatgtaatacatttatttaaagaataaaaggaataaggcccaagatgacgtcgctattccctatatttcatgctccatcagatttactccaccttaaaaaacaccaaaaagctgacagctcaatttgtaacaaacaaagagggcgaaggacgagaagtgcctgacgttaagcttgttgcctcgcgagtccgtaagcacagttcttcgggcattgccaagcagtttaccttaagcagcattacccatcgcgtattgaacaagaggtacaatagtacgagcagcacagcttcagaagacagcatcaacgattgtggcaaaatcccattaccagatctcaccagggacccgcaaatcctacaagatatgcgcctaggccagtgcacattttgaaggtcgcattttttgggggaatgcgcagtgaagcatactgctcatgtaaatctctcatctatttcgatggtaaaacatgtcactgtgctcaagtgatggccatcggagatatcaaataaaaactgatacgctttatacaatattcaggtggaaagtcatgaatcatggcgttgttagcaaaaaggttgaagccatcctcaacaacctaacagtagttatcattacgagcaagtttggtactacattggatcatttggaaagaaaacgcgacggcagtgtttctctagtctctcatattctctgcgttttgtcaaa

SEQ ID NO: 85 - DNA, 12002 bp, unidentified
  misc_feature 1..12002: note = Fanzor polypeptide
  source 1..12002: mol_type = other DNA
gcacacgtctcgagacgcctgtggaggaggacgaggaagagagtgcaagttctcgacgacgaagtttgagctttgacgtgagtgacgtgagagtccgaaggcggtcaacaactcacccgcctacggcagccgagtcaaagcttgctgagctcgatctcagtgtcagtctgagtgtggttagctgctcgagcgattacttggatgaagatttctatgagggtgaggcaggtcaaaggaagacccagccgcccaatgtcttctccgagatccccgagttaccggagaccacgaacccgctgacgagttcgctacctccgaagccgtcggtcccgccgatgaacagtcaactgcgtcaacgtcgcgagctcatgcgtcgaatgacagagctgcgcaagaatgcagagagcgcattccagataacccaacggaacacggagatgatgcagtgtggcggtatgccgttgaaggcgcagtcggtatgtatttccacggtggaagtgggcatggacttggattaaacagacttcctcatagttaagagaactctacgcatctagcataacttcaacatcggtaatcgagtctcatcgtgattgttcagtcggttcggaaagcaatgggagatagaccaccgggcgaagaagtgcttgctgtctcccaaaggaggcagctcttcctagttgccatgtggcatcaactatcaactggatacaagcagactcgaaaagataattgaaagcagttcacggatactttcgagtatgcgcagacatcatcatgcaacactggtcgtcgataaataacttgcacaagtttctcttcgttgctcgactgctcagaggagactgacaagtatccaccccgattgtgtatgggcttaaaggaaacagaattcgcgtgagttcgttgctaacaggcagactaagctgtgcacgaggcttgtgccacaaaccagcagcgcaaagcacaaaacagtttctgctgctgctgccgctgctgagaacagccatgcacgtggttcatggactaaacgcagagctgcaagcacaccgagtgtggacgaacaacaaactccccatatcgagcgcagtctccttggccttgaaagcaactacacaccggcatttatagtgtttcgatgtgttagatttccgtcgccttttcgcctctggaacccccatctgctcctgccgaatgcgctaatccaacctcttcgtgccgtagagacgacagacactcggtttctgcattgcatttgcaactctgtcaacgacgactttgccagcaacagttgaacgctctcgtcgggtcccttgcgtcgcaagggcttccagtcatcttcttctccacaaaggcggattgtaacaatctatgtaccccgagcctggaagcgtcactttcttgatgacggcactcgccaactcgccgtcttcctcgcacttgtatgaacatctactccaccactgcggtactatcgagcaatagcaagtgattcgacaggatggggaagttcccgttgtcaagcgaggcgttcccgcccgtaacgctatcaattgagcagcaggacgctctagagactctggcggagcagcaactggcgatggccgaggcccagctagaccgccacattctggacgatggcgtggtggacaggaggcgatggaagcctctcaagacgagagaacgtatctccgtgttccgagaacggtccagcgccgccttccatcggcagtgccacggtcacagccagttccaaccatcggcgtccgcggtcttagggacacaaaacgatgatgactggccactgccgcaacttctaggggtcggagttctcaaagggacgctggaggacattatgtatggtatccacacacctactgctgtccacatgatgaccaaggcggtgatctcggaggacgaagtggtggacgctcaagtgcttcaagaactaaaaggccccaccattgcacaccccttccggtttcttggtctcaagtggctggtcaaggcgcatccggtggtgatgggggcagttgtgctgccccgggacatcgtgtacgtggaacacgcaggcatcaagacacgtgcggacggctccgagctcggacactttttaattcactcggtggagctaccgcagtatccggatcttcgacaagagcttggactagtgcgtgcgagagtgtcctcctgtgttctcctgcgtcagaatgccgatgatccgaacgaggtggacgtatttatgactgggagagtagctgcgcagggccgagtgcttgacagtctcgccctcttgtctaccgctaatggtctcacgtacttttggaaggctggagtctgcgctcaacgtcggaagttgacttggcgtctgcaacacaaacgaaaagcgccgcctgctgctgcttcagtatcgccgtcgaagtgccccttgtgtatgaaggggattgatcgtaccttctgctcaccaactcgctgtgagatgtgtggcatccgaatgtgctcgcgttgcagtgtgactcagaaattattgtttcctgggtccttcggtagcaaggagactcacttggtgtcggtggagctctgcactccttgcatcacacacaccacagaagagagtgccatggcactttcccgccaggaaattcgagccggccagtatggcgcactcacgtcacctcgaggtacgcgacatcgctcgctccgctcggcaggcaaacctcgccgagctcatttctctgcttcggctggccctccgttgacgaggaaccaactggaaagtaaaccgaggattgattttgcagcctccgctgaaccatcagagacgaaagctgccgacaacaagtcagtgacgagggaatccctgcaagccctggacaacttcttgcaggactcgacccacaatgaaaatcaacataaccgatgggaaaattcacatcacaacaaggagtatcaaggccgatggaaggagctcacaagcagcaaagaggaggcacacaatctcttgacacctcgacagacgcccatgagcattgaggacctagagtgccccaaaattgataacaacgtggataatgcaccagaccagacgccgccggcatcagacacgagcagctccacgccattgtggcagaaaatgtcggcgttgcgggtcatggccgagtccacgtaccacgacaccaagaagacgacggaaaagacgctgcaattaagtcacagcagatgatcgccgacgtatgtatcgccctcaacctcaccatgcattgagtgagggtagacgttttaatatttaactttctccaaaactccagaacaaattggaatcaaaatgaagcgtaaagtaattgctctcgttgctgatgaacgtctcattgatcagagtttatgataaactcaccgatacgtgctactagataccatgtcaaacatccgttgccaatcattggttaggagtgtattattactgatggtactgagaatgtcctactggtccctatgcctgaatatatggatgtggctggctacgcattcccgcaacacgtacactgcgagtctttccagccactttttttctgtctacgtttcttgtgctactgacctcgccgaaatgctctcgaccatctcgctccgtgcttccccttcagtccgctcttgagcagttccagcatattccttgctgcgttgacttccctgttccagaagttggcttttgtaatgggtctggtcatcccattacattggattgagggctgaaacaggcattgcgatccgcttgagctctcattgaattctatatgctccaaaaaaaaataggcaatgtggacattctcggtgcctttcatactaataacatgctttgggtttgtcatcgtctctgcaacttcaacctatgagtgacggtctgggtcgtaataaagagggtatgaaatgctgagatcatttattacaacagactgcgctagatacaaaattaatatcatcttttttcagatcatataaattatataatacacagaccatcactcacaaacgtagtcatttcgctagtattgaatcaaaaaccagcgtgtcatacccacttgccattttgcactcttccagtaaccagcaatctccatgccgcccaacgcgctctcatcctctcgtaacgagagcccaactgatgctgtggtgacctgccagatctgctgggaagaactcacgcggaaggaccagaagaagatcaatcaggtcaccaccaggttctgctccgcgtcctgccccgcagtgctgtgcgcaccatgtcttcaacgacatctggaggtgtccatgcaggtccaatacactggagcgttgcccaagattcgctgtccaatttgcctcgtcacagtgaacaagcagcggtggagacgctttctgagatcggatggcaagtacctactggagcagtacagcgaattgtgtcgagtagcatgcagtctcacttgcccgatctgccacaatgctcagtacacacatctaccggaatacttcacagaaccttctaggactaatattgcaaacgaaaatgttctcacccttcgaccaagcgacaaggctcgaatccctgagctccaacgtgtcgtgcagcaattcagtcgacaccacaagacaatcaccgcccgagatgtgatccgatatatcatggagcgtttcccagagtccaagacaatttgtatcatgcagaaagttcttgcaagaatcagcgacgaggagcggcgggctacactattgcttggataccacagcctctatcgccaagctgtcactcgctgctgcagggcagaagtctgcttcaactgcaagcgtcggcttttcggagaacagtgtccatgcgaagttgaagacgacgaagagctcggtgagactaactgtcttgagtgccgatcctgccgtgtgatgttggtgaaagttgacggctgcagcagtgtccgttgcctgtgcgggttcaatatgaactgggacgatgagcaacgaaccaacaaactcaaccgtcgaggattactttcagtcgatccatttgatctgaccatgtattactggtgggaagtctggcaaggcgcttttcgcgacgtgaccgaagaattgttgctcaaactccgggcttcagccatgctgcacagactcaacaagtcgtgtccgatctttcgagaatcgctgctcagattagtctggaaaaagcgatttcaccgcatcatcgagggttcagagcaagagttgcgccgcaagttcgtgttgcgagttttctctacggttaaagagagtctccgaactcttgtctggcaccgacgtcgctttcaccggaagctattggcagaatgccgtgttgcatttattgctcgtgctactcgacaagctcatgtgatcaagcccgtgatgctcaaatttatctggtcttgtcgattccgtttccaagtactgggttcattgtaccaccatttctacttcatctcgaagggctgggaccaacttaccgagaaggaacgggaggtggaagaggaaaaccttgcttttctcagcatcggcctcaattgaagtcattccgctggcattgcgctcttaggctgaagcaatatgctttatagttagttagtagatgtaccactggcgaccagcgtttcagtgctcgctctttcatagacactttcgtgccgaatctgatggagcaccttgtctagattaacggcgttgagctgtgccatgggattcaatttaataatgtgcataaataaccaattaccaccgaacggcttttccatcggagctagagttggctggtgcgaggctgatctggttagctaccataattgcattctcttcgcaaatgtttttgaatccctcggtcgcgtactgtccggattgccacaccatgaatgacgagacgtctgtgctcagattcgtgtcgtagaagtcgatcgatcctgaggatcctctgctgctaacaaaatgtataccttgacattcgacagatatgtagaacgccatcctgccgtcagacgagatgccggaccacaccgctgaccgactcttgttgtcccaacattcggtcagcgaaaagcagcgttgggccgtactgaacgaacagctcttggatgaatccgagtagttaccgccgctacgaatgttgatatcccatgcgggactcgccgactgcagtaaacaaagttgatagccaatactcccgtgaaaattcgagttatgacagcattatagaaattgcggtggaagtgcaggcaagcttgcaacatcctcggccatgaaatagaaactaaagccgtgaaatcagtaggacgcaaaatggatggacggcagtactcttcttgattcaaaaaggtcatagcaatatggataaggtagatggattcaaaagttcgacctagaatatgatggattttcgagactgacggcgatttttaaagtgcctcaagcatccgttcttaatgcgaacttcgatgctcgttgaccaacagctacttgctagtgctctcagccagtcgatgtgaatttgacactgtcgtccccgcggagatcgctaaacttccagttcgacagaccagcctcctcatcgtacaggatgaaagtgtacagcttgaaggcctgattgaaacttacactccccgctttgtttgaactgtagacgatgccaacggacatgcagttaacgttatcataaaacacaatcttggtgttggacggaagactcgtccaaattgcgtagaagacggtgggaagaaggaccgagttgaacttgtagcaacgctgtgtttcgggaattttgtagatcataatgcgtgtcttctcttcttggtagctccacatctttagtatgacgtctgtcgttgcttgacaagtccaggccatacagataagcactattgcaaggatgccgacaactgaagggagcatggttttgacggtagctcaatcaactacaagtgtggaataatacagagtttttttcttgcaaaatgatttatgacagcccctcaaaactccgtcacattaagtctgacggtcctgcacattactggggtagttgtcgaggaaggtggagggaactccaacgccacaaggtcgcgaatccgtgaaaccaaaggaacacggtggtgcggcttgaatttttgctgatggacaaactgaagcatgttgaccatggacaatggaacatacagaattcacttgaagagggaaaactgacttggctgatattgtcagcagcgctcagtatgaggagagcatcgttagcaacgtgaagatgatcgctgcgggtcgtcgaagataatgttttgaatcatcgaccaggctcagcattgccgtaaattgagctctcaagcgtacgccacgacggcagtagaaactaaacgttgcattgcatcttagtattttatgctactatggttgaaaagccggtattccagtagaattggcagacaaaggcttgtgagccggattcacacgagttttggacacggtctttcatgccaaaatatgtgtgtttctaaagtcagttatccccgacgaacttactgcagtgaggacgtgcttgtctttgtcaatctggcattcggggtccgagtagaatgcaatcatcgagccagacggggtatttgaccactgagcttgttcactgttgttatccccgcaggtcagcgtaaaacaccgctggattgccttgaaacgaaacgttttgcatgcgggagtgtctccaataccgggggataactcgctgctagtatagagaaagaggttcattgcgtagtatattgacttcagcaacacgagaacaataatcattacggaactcgtgcaaaatgtgcatgattaaaaatcggttgagaaatttataataattcaaggtgatgacagatagtttgtgcctgctttcagaattcctagaccttagatttgcaccaaacgacaatgacataatgaccacagggctactagatttaacgcggaggctgaagaaatttgtagtgtactacctaacgagggcggcgaaatggcgtttaagaaagctaccgcatgggaaattgcgcgcatccaggcattgtagtttcaagtaacaccaggcagaagacaagtttagttgatatagcgaatgaactgagctttggagctctaattcattttggacggatgagcacttacttatcagcgctaccagcgcaactacagcgccattttatccccttctacatcttcaccagagtttgagctggaggacgccattcgcgccgcaagcagattcatctggtctgccgtcagcacgagggcgctctcgtcacaaatactcgtgaaacccgccgtagcatattggcctgactgccaaatcataacactcgatacgttccccttgagatcggtcccggcaaagtcgacaactcctgacgattttttcttgttgacaacgagtcggtcgccaccgacttggcattccaggtctgaatagaaggcgatttctgccgttgacgggatgtcggaccaccgagcagctcgagtcttttgaccccagcaggcggtcagagcatagcatcgctgcgccgtgctgaaggaataagtcttgaaagcgtcggtgtctgcgaagccactggcgatggtgacatcccacgcacagcaaactggttgcaagacaagcaagacgagagacacgagagtagagacggaggtttgcattgcgaagcagcagcaaaattcggttgtgaatgcttgggcaagaaagaagatgttatgagttcatgctggtgacatcaaccattgtaccaccacgaactagtgctaccagcgcttgtacgtctttttgacgattaagttattacgaagggcactgaaaatgtccactttcattttttgtgaaaatgtatacaaatgagatcgatttcagagagacgagtatgctcttatctccggatcaaaggcttcactctcactcaaattgcggacatccttgatgtatgcgtacgaacagtccagcgatggctcaagggagagttcatgtcacctcgtcctttgagtcgagtcagcaagagaaaactcaatgaggatcaacagaaatcaattgtacagttctttctcagcaagaacacgagtacgaggtgagatggcatagcattcgcaaacaatgaatttcggattcatgtgtcctcacggactatcggacgcattttacatcgccacaatatatcattcaagaaggcgtctactgcatacaaggaagcaagtcacactcgtcaacaagagtttctagcaaatctgtcaagctattcaggaaaatcttggattgcactagatgaagctgccttttttctcaatcattctcgcaagtacgcatggagtatcaaagacaaaccggctattgtcaaaaagcctgggtatcgaggacaaatgcactcgctaattcttgcaacctcgtcaaaaggagttgtaggatggaatctgatgcaaggaagtatccatgcttttcgttttcatgcatttctcagtgagctgacaaacgacaccaacgtgattttagataatgtggccacgcacaaagctacccattcacttcgaaaacaaaacttttccacaatcccggaagtagcagaaacaaaacgcatgaacatgatctaccttccaccatattctcctcagatgaaccctgttgaactttgtttcaataccattcgcacatttgtgaacgcttgcgcgccaagaaactttgaagaccttcgttcgtgcgtttgtacagcaatcgaaacactcacaccagcgatttgccgttctatgtttacgagatgccttggaatccagtgaatggcagttccccttcttcatgcaatagcaaagagtttctgacggggattttgtcggcttcatgtaaccctctcattttgacttttccatcatgagtggcaagcgcaaaaagaagacggatccacctgacaaacccaagcgtcagcgccccggcgtcagcgaacgaaaagcgcgcaacgcgaacactgagtgtactattgtgaagtgttcgctcaagtcgtttgcaacgagagcgcgagcgctttgccatgggaaagtgtgctcaaggacacgaacaaggctgtggcggaagcgtacatcctcgcgaatctgtgcgttcttcgtctgtgtcaagctggtcggcctattccggttctggatcaaggcttctacaacaagtgtttgtctgctgtgactgcgggcttgaagactcctaaggagatagtcgacgaagatctctggcagtctgttcaactgtacaagtcgtggcgtgatcccagcgtgccattcgccagcagtgctcacgtcagttacggatggttccagaatgcaagcttgcagatgactacgaacgcttccagccacatcgtcgtgaacttctatcgtcggttccagaagtacatcaagcagcgattcggcattactggaaaggagcgctacaagctactgagagacgtgttggcgccaacgtatgaaggcagtgacaaacgtgtgatggagtttcgtggctggatccctcgtaacagagatgactttatcgacaaggacaacccacatttgattctgccagtgacgtatcgatttcttcagttcatcgaagaagagaacgaccgtcatcgtcgagaccctgaatttcagcaactacgatcgctcagtcttctcccattcaagcgtgggttcgagtgttctcacttcaagatgtgcaaacttggtctctatgctctcttgaaacgagcaggaattcaaattccaccgctacaagcaagggaaggaccaatctggaacgacgtcgtgaacgagtggtggtacaggctgttcaagatcaagaagtttgaaactgagaaccgcaagtttgctggagagatgttgacggacggaaaagcagtcagtatcgtgttgcggaagccgaagaaaccagagccaaagaaatcatcgaagccagagaaaaaaatcccaaaatgtacacctttggcgaagtatggggtctggatcctggtcgacgtgatcttttgtgacgacaaacaactttggtcgaacgatctcttgctcaactcgtgagttctacgaagatgcgaagtataaatcaagcaacaagacgactcgttactggattgatcatgatccaagagtgttggaagcaatccgcaacatgccgtcgccaaagacgagctctctccaagaactggaagcgtacgtgagattcctgattccgcgactcgatcgtttactcgactttcgtatggcgaagccgttccggaaactcaagttccggcgatacatcttcatgaaaaaaaaagcttcgagagctttgtaagaagttgactgcgagagctggagcgaacactctcattgggttcggagactggagcgcgaccgactacggaggcctgatcaagaagtgtccggcaggtccagtcaagaagttggagaacgagttgaagcgctactgcacagtcgactcagttccagagtttcgtactagcaaactgcatgtgggttgtcatcgagagttgacgtaccagtttgctttacgcatgtgcaaggacggagtcgttcgtcgcgtcaagatttacagtgtactccattgtcgacacaatggctgttttgatatgactgtgaaccgcgaccagaacgcgtccaagaacatcctcctccagattctgccttattttctggatcgaactcgacatccagcattttgtagacagggaacgtaggatatgatttagtgttatctagtgccctcgggttgctagacgatagctagttgattccccagcattattactcctgctcggataggcgacatttacgccttttgtggggtagacattttcgttgcccccggtaataagtacatgcatggatcgacagctagtgttggctgctccaactgtcgttgctgtgttcctcatctttctacgaaatatactatatagtacatcatcactgtctctgagggtgtctacgagtactctcaatgcctttttagg

SEQ ID NO: 86 - DNA, 12002 bp, unidentified; identical to SEQ ID NO: 85
  misc_feature 1..12002: note = Fanzor polypeptide
  source 1..12002: mol_type = other DNA

SEQ ID NO: 87 - DNA, 12002 bp, unidentified; identical to SEQ ID NO: 85
  source 1..12002: mol_type = other DNA
  misc_feature 1..12002: note = Fanzor polypeptide

SEQ ID NO: 88 - DNA, 12442 bp, unidentified
  source 1..12442: mol_type = other DNA
  misc_feature 1..12442: note = Fanzor polypeptide
tggctgcgcggagctcttgacatcgcgtgccagggtggcgtcctacgtggcatcatgactacagcaatcggaaattatgcctccctgccgccggcctcctcaccccccactcttgttgcccatgcgcaccccaggatgcctgcctgcctgcctctgagttccagcggatagtcaaggacctgtcttccattggggacaccggtgaggcagggaaggagggagggaggggtctcacagggctgctgggagagcaggggtggacgggaggcatgtggctgccagggtgtgcctgactggctgattgaggggctgaggggcatatgcgaggcgctggctgtgggagacgcatgtgacagcgcagatgcgggtgtgaccttgtggtcggctttgcggggctgggcaaactagagcctgcaataaacctatgtcaccccgcgatctattttgccatgcctgttgttgagctcaccggagttccccgcaccacgagtgttgaggacatgtgggctttgtgcgaaagcatcggggaagtgttgagcttggatttccatttcgaccgcgaaaacgggctcgctttggtgacatttgcgtctgattcggaggccttgactgttgctgacgtgaccgtaaattgcacacgttcgacgggtgacaggcttaaaggttttcacgtgcgttacatttacggttttcttctcgactacacaagcatggatgacgaccaagcaaagtatgtcgcatccaggaaggcagcaacttactacgactgcgacccaagaacactcgtcaattgggcggacaagggactcgtgccatttaggctcacaccggaaggacagcggaggtacgccatccccgtcaacgacgcaccccgcaaaaaagaggcggacaacacaaaagcaaagtactgctactgccgagtgtccacacagaagcaacgagccgacctcagcaggcagcaagacgccatgcgggcagaatacccaggccacaagctcgtctcggacatcggcagcggactcaacttcaaacgcccgggtctgcttgccattctggaatcggcaatgcgcggagaggtcgaagaaattgtggttgcccacagagacaggctcgcgcgtttctccatcgaactcttcgagtggattctacgaaagcacggagtcaggctcgtggttcaacacgcgtcgttggactcatcaccagaggcagaacttgtcgaggacctgctcgcagtggtcaccgtcttcgcctgcagaacccacggccgcagaagccataagaagcgcaaggcgggtgaggctgttcccgacaccacaagatgcgcaggtgctgaggcgctgggtggggtgctacagggcgctgtacaacacggcggtggctcactgcaccgagacgaagacatacaactacttcaaagtcaggccaacattgaccaacgacgcaactgtgccggcccacctcaagtgccttccggtcgccatgaggaagtacgcagtgaaggacgcgacacaggcgtttgtcacaaactttgccaagaagaggaagaactcggggcacagcttccaagtgaagttcaagaccaagaaacactcaaccaaggtcctcaagctggaggccgcaaagatgggcgtcaagatcgtggacggccggccaaggcttgtcgtgggagacgcaaggcaacaccagctagggcgtgaaggcatctccttcgaccgccggggagaggccctggtacgagacaccaaggacccggttcttcaaatcgacgaccttggccgcttctggctcatcaccgtgtgcacccgccagcccgagacccaagggcagcggacgcaaggtgtggtggccttggacccgggtgtgcgtacctttcagacgacctacagcccagatgggacgagctacaaacttggcgacaccgcgtccaaccgcgtgtacaggctgcttctcgtgcgtgacaagtacattggcttggcgcacatgagagggccatctcgccgtgttcggcggtcttacgggaaaaaggcagccaagatcatggcccgcatccaacacatagtggacgagctgcactggaagacggcccgattcttggcacaaggttggtccgagatcctgattcccgtgtttgggaccgctgccatgagcaagaagtaccaggcgtcgcgcgccaaacaccggtgcattggccgcaagacgacgcggcagatgttgcacctgcgccactacacgttccgccagcgcctccatcacgttgcgaagatgacgggcacgatcgtgcgcgaagttaccgaggagtacacgagcaagacgtgtggtaactgtggcgagatcaaggcggacctgggcggtgcaaagacgtaccggtgccaagagtgcggcgtgtgcttggatcgtgacggcaacggcgcccgcaacatattcatcaaaagcgtcctttaggggacttcggacggtacaccctctcttcggagtgctatacacccgggcaagagtcttttgacttggagcatgctccctttgttgcctgtttcttccatgggttacggatgaatgtggtgtttgaagtaccggcattggcttacgcaaagaatttaagtttgaccgagccacaatgttgtcatcatgagttcgtgaaagcactcgggcagggccgtgatgatgtagcggcgttcattgtacggccccggtggtgcacgcgaaatgaacgaagaggaaaacacgtctatcagcttgtcaagcatgtcaggaacgaggtgatctcgtatcggtacaaatcgatctcgtatcggtacaaatcgatcgtggttggttccccgtgcgtgcaccagcaagtgacccgggctgtgaatgacagcaaacaggctgtccagctcattcccagcaactttggccgcttgcacatccttcagccgtgctgcccgaaacctggcttcgactgcatccaggttctgcctgtaaccttcacgcagagcacggtccaattcagtgacgatcgcttcgacgagagctggatgggtcacctctgccgcggcgcccggtgttcctggcattgcgagcgcctcgacaaccagcgctgtgcccgttcccgctaatgttgccgtgaacacttgtaggtcgtcagtggcgcggccaaggaagttgaactcccccagggcgtggcgcatgctgacggtttgcggcggcggcgaggatgtgtgcatcctggaaaaacagaacgttcgggacatctgtctgaacgagcgaattgattccgaacccctgtttcagctacgcaaatgtgctgcggaaccctgcaatgccgtcagtgtgttgtactgtttgttgtactgcccacgaaggccacatttcgcatgctgagcctagcccgcgctgacaacttttcaagtatttccgcggccgcagtctctttgcaagccaacactcgtagcccgagggccgccaggcgccagtgcccagccccgtgccctacctcaatcggtatcatgaagccgcgtgtgaatgtgttttaggcagcacgtttgtctcgcgcgtgctgtagggctggttgctgactgaagagtacctgccgcaattgcgtgcaatacgaataacaactctgcacgcactctggccccgtttgtcccagggccacgccgcaaatcgcaaatcggacaaaatcggacaagtcgtcgccttgcgcgaatcgcttttcgcacctgcgttgcacaaccatggcgaccgctggccaggtaaacatcagagcactgatatcgcatgagagtgggtcatccaccaagtgactgaacctgctggcaacctgtttgtgacctcctccagatcgccaaggacagcagcagcgaaatcgatgtggtgcacagctcatccgagcttgtctccggcagcagtgactctccgtcgcaagacctggaacattcgtggtcatggcgccagtttgcgtccttttgcggttctggccttttgatggtcgctgcattcctggtgggcttcagatctatgatgcctgttatgtgcaggctgatgcatacagcgcgcctcttcctctggtttccgtcttcaatcacggtgctggtgtctcctctcacaggatcctggcaacctagaagctgatatccaagtaggcgctaagacaggttttgcacttctgtggtgggttgctcttgttacgcttatctgtggcagctcatttcagtgcctcagtggccgcttgggcctagtgacgggaaaggacttggcccgtcactgtggcgagcgctggccacgtgtcacctgctggttcttgtgggtaatgctggagctggccattgtggcagtggacatccaagagacaataggcagtgcccaagccctctttatgttgtccaacggacagttgcctctctgggcaggtactgtcgcgctaggtggactgcccttatgttgcggcctattagtgggatgattgtacctgagtgttgtatgtgcacctcccttttcatgcttctgggaagcgcacctgacgtgtagcctcacctacctctcccacgtatcatgtgtaggctgcattgttgtctctttctcagccttcattcttctgatgttggagcgctttggcacacgatggctggaagcgctttttggtagcattattgctctaatgggggtgtcaatggcagttaatttcttccgttctggtgtgccagcaaaagaggtggccctgggtgaggaagagaaattgtttacaggaagatgtgcatcagaatttgtatgctagatatgccgaacttgccgcaagtgcctaacagatgacctgattcatatgctgttgacgggttcactgccagcctgcttgctgacactgcaccttctccctgctgcaggcctattccgaccaacgctgccggcaggttctattggcccagctgttggcactttgggggccctggtgatgccgtacaacttgtttttccattctgctgtggttggtactcggtgcgaggcaaacgctcatttcaagtgagctacgctgctgcagagtttgcttgccaagccacgtgcctcttttctcctcgcaggcgtcccagcccaccatcccctggcagcatgcgtggtgtgctgcgctacctgcgtttggagacagttatcgtgctatttcttgccttcttgatcaatatgtgtgttatatgcgtgtttgcacaggggttctatggcactggtgcgtcggcatgctgtagctctgtttgcttccaagttgcaaaagtctgtgtcttccccattctgctcttccccataaatgctcagcgcccggatttgctgtagatcaagagattgggttgcaggcagcaggtgacctgctggccgacaagtttgggtcagaattcaaggtgttctgggcagtgggcctgctggcatccgggcaggcaagcaactgtgttccctgtgtagcacttcagttctgcggttcatgagcatgtcgttgcatagagaggtgcacgtcaggcattggtatgctgttgccccgggccatggctgaaccgctatgctgctaccttgctgtgtgcatttctaggtgtcgaccattgcattgacatacgctgggcaagttgtgatgagtggcctactgatgattgatgtgaagagctggctgcgcatgattggcacacgcctttttgctctggtgcctgcactgacaggtgcctgttcttctgctctagcttctacgcctgtcctcagcatgctatccccagttgcctttggctcatgcctcggtgcccagaaagatggcctactaaccctgctaagagcactccggctgtcccgcttcctttgtgcagttgcgctggttagccaaacaaacaatagctttgacaggctgaatcagatgctgaacgtggtgcaaagtgttctactgccttttgcaatcattccggtaaggtagcattgctcattgccttgatgctgtatttgagtgagcctgagcttgaacagccatgccgacatacgggtagctagctgttgcattgagatgcgcctctctctgggccatgccttgctcgcagctcatccacatggctggcaaccgggcagtgatgggcccaccgggtgcgtttgccacagcccgctggctcaatgtattttgctccgtggtggctgtggcacttgctgccatcaatggctatttcctggtgacttttcgacaagaaaatttgccagacggcactggtaagcttcgtgtgtaaagcgattgtttatctgtgatgataatgatataagcccagcatgcttgttgttttgttgtgcctgatcatgcttgctcggtggttccttgcctgtgcaagcaagcaacaatgtgcttgtagttaggcagcagtgaagtgcacagagttcgtgttagggtcgcgctgctgatgctcctaaacctgtggctgttttcaggtgtcatggtgggctggggcttcctgatggctgcttactactgtgccatggcgtgcattgcgattggtccagaacgactggatttatgggtaacaccccacttgcaccgtgcgcgaggctcagtaacaaaggcaagcagttcggccgttcgcgcagctggtggcatggcagagtgggtcaagggaatcaactggcgtgaccctgagagcctagtggaggtacacatctaagcttccagtattattgattactatcaatgcaccatggcaactggccttgctgggaagctgctcatttccacaccctatctttttttttttgagcacacaacaagctcacacatcatctctgtcccagcagctgatccagttccctcatgtacaactgcactgtttgtcttgttgcttttctgcatggagttagagcttgtctatcactctctgaacttttgatccagcaattcgtgccttaagttgcaagaaagcatcagaaatgtgatcgtcagagcagtcagcgtgccaagtttgtgacgatattgccatgcggatgggtgggttggtgacaagcacatgtacacatgcggaggcaaacatgcctctccagcagcaacagacatcactagtcagaacctctgctctgtgctgtgccatgactgaggctgccgttagtttctcgctacatacacctgcccacatgcagttgccgtgtgcaatttcagcagtgttggatgtagtacctggctttacaacaacagggtcgcaaggcacaatcaatcagcagcaaatacctatcgtgcaaaggtcagttacaatcaccccactggtaggccgcgtcagcagacctggggcaggaggcaaacagcaggtgcttataagctaaaatggcaaatggatgatgcagtgtttacgcatgtgtcagcaaaaggtgactagtactcacaaagggatgatgcgaggggtggtgcacagatacaaaattgacatctggtgcaacggctttgggaacagccataagggttgctgtgcacgataaacaacatggcatgcacgttaggtgcagggtgtgagcatgggcaggtgcaaaagtgcatgcaatgtgcaggctggacagctagcagctgctggctagctggcagcaggcagggcgcaaccgctctgcttgacaaacgggcctgtgggcagtggtttaacaaaattgtgggaattgtggccgacggaggggcttgtggcaccaccacaagaggccttggtgcacccagaagcacgctcatttggcttgcaactgctgccacactcaacgcggcaaccatgtgcagcgggcaaggcgcaggcgacctgctcagcagacaggcctgcgggcaatggctcaacagcattgtggacttcagaccggcttgtggcaccaccacaacagtgcttagtggacaccagaagcatgcttgcttggcttgcaactgcggccgcacttgacgcggcaaccgtgtgcaggagggggcgccggagtagagacagtgcaggaatcagaaccacagctgggacttggtttgtgggaagctgcctccatagcaacaactggccagcgccatttaagcagcctacacacatcaggtgcaaacgtgagcgagcaggaagcagtggcaagacccacaggtaagctgcctttacagcgacagcaattggcctggtacacaccgtaatgcattagccacaacaagcagcgaggcgccgacatccaccagcacagcaccccatagggtgaaacgccccagggctgccggaacgagcactgccacctgcgcaaacaacatgtgcgaggcaaaggtgaggtggagtggtgatgcggacggagaagatgtgagcagctatgccttcagcaataaggagaaatgaagccttttgacttgcgtgcaacgagccggtggtccgccggtggggcagctggccacaaatacaagtgcaacagggcaacacgtggcctgcccagttgctagcagagacagagcgtaatgacagtacttgagcaagtacagccaagctaaggcaattaacccacctttgtcacaactgagaaggttacgttctgccagatggtggccccagctgcacgcgccagcaggagagcagcgggcacggcgcgcacatcatttgtgaatagcgccactgcaagaacaaagaaaggggtgtcgctgaagggcaatcgcgtagtccatagccaaaccaagaagggggtggcaggaaggaatggatcgtgcgtgaagggcaggctgtgggcaagccaaaaccatgccaaccaagacaggcaaacaatcgcacacctgagccagcttccagggcggccgcgctgccagccacacccattgcaatgcctgcatctgctgctgccagcgcaggtgcatcgttcacaccatcgccgcagtgtgccacaaagactcgggtagggcggcggcgtaagcagcaggccgcagtgggcaaaaccccagggcagcagctagatgagccatgagcagactgagcatggttcttaagctctgcaaccttgtccagcttcgcttgcggcagcagctgggaaaaaacacagtctggagcgatgcctgtagcggcaccaacagccgaagccgcagcagccgcatctcccgtcaacatacaggcaacaatgccacagcgccgcagcatggctactgcttcttcagcttccgggcgcacaacgtcacgagcactgcacagccgggagcgagacggctgatcaccatgaggaaattgccagatacaagcagttccctgatgcagcctgcccactgccatatgcaacgcacgtcctgtccctcgttgcagaaccgaggatctcacctcagccagcccacaaaccggccatccaccgcaaccaggcacgcagtggcaccctcggcatcaattgcatgctgtgcagctgcgatttcaggtcccgccagatttgcacggagctccatcaagccagcagtaccagctgcaacccggcgcccatccacaattgccaccagccctgcaccttgaaccacctctaaaccttccacaggagcatcacacacagcgccctgggaggcagcatagcccagcactgcggcagccaaagggtgactgctaccgcgctcaagggaaccgagtaagcgcaacatctcttgaactgaccagccatcgcgggcctggagagacagcaaacagcagtgcagcacacatgaagtttgaaggagaagtgggcacagtctctgggacagaggtagccagagggcagacatgtggcgtaacatgttgcacagaacaaagtgttcagtgtgccagtgtgcatacctggcatgccaccacttggaaacttcccttggtcagtgtgccagtcttgtcaaaactcacgactgatacctgaaaaacactcaagggcagggcttaagaactgatcttcgcagaagtacatcaacagacggaatgacaaagcagctagcaagcacacaactcaccagcctcagtgccgcgagcgcggctccactcttgatcaggacacccttgccagcggcacgggctaaggcgcacacaacggtggccggggtagaaagcacgagggcgcaggggcaggcagtgaccaacacttgcagtgacaggtagacccaatcactccgctcgttagccggcacccaggcccagggcaggaacgccagcaaagcacaggcaaccagtacagctggcgtgtagatgcgagcaaactgcagaaagatgagcgttggcagaacagtggtattaaacattccacaaatggcaggtctccaatgcaaacaggcccatgcacaaggaaaagggagatcatcagcatttttgctactacttgcagtgcggaaagcgcaccgcaacgcattcacaccttagctacaagtgcttctgctgggctctgctgactggctgcttgctctaccagggtagccattcgggcaacagcagtatcgccagccgccgcagttgtgcatacgagcaaagtgccagccccaacgttgattgtaccagcttggacgaggctgccagggcggcgtgacactggcacagattcacctgcaagacgcaaagcaggaacaggtgagagcaatggccaagtaaaaagaggactgtagctgaaagacattgaaaacttctagccgcacactgttgctatgctttcccacacagccagacctgtcatcaaactctcgtccacgacagactcccctgccaccacagtgccgtccagcggcacagactctccagggggcactagcacctctgtgccaggcatcacactctccacggccacagtttctccggacactgccagcttagctacagcaggaacacaagcaagcagtgctggagtaacctgccaacaatgttgtagacaaggcatggccaagctgcatcaaaattgccaacatccaaacaaccctgcagcacaccaacagcaacaaaacaagaacaacgtgatttttcacctgactccgggcgtaagttgagaacagcggccacagcgttacgagccttttctgtgctgcagcgttcccagtgctcagccactgcaaacaagacaaccacggctgccgcttctgtatagtctccaatggcgatggcacctgccgcagcgaggctcatcagcaggtggatgtccatcacctagtgggagatagcagaggggcaaggcgaggtgagtgccaggaagagacagtatcatagggacccagcagcaagccaggaagtgcggttttgggtgaaatgcaagtcagatggcacaggagcaggcacctcgaaatggctaggtgcttaccatgcgacgaagcgccagcagtgcacgcaacgcaatcctcggcaaacacagtgccagagagcccaaggagacatacttgagatactccaatccggagacaccagtgggccccgccagatagtgcagcagcgataccagtagcagtaccgcgcccgccagcacatgccagggcggtagccagcgggtgcgcacctacagagaatacagagggagatggtgagcagaacatcatatatatgcacagcaggcaggaaggcgcgaccagcagcgaacataacacagggtgtacattcaacagcatacttgcagcagtaccttggcctgggtgcgcggtggtgctagggacgcttccagcatggcaccattaagagcggcaacaagcgctgcaggcggcgccagagctgcatcgtgcaccacgactacagtttgggtcatgacagccacctccacctgcaacaagaagacagtcggtctatgggtgatgggtgggttgttaaggaagcattatcatcacgcccagacagaatcctgtggcagcgcaaaactttagtgtccatgcaaaagctgctgggcgtcattatcagcaacatcatggatgagacatgaaaaccagcaggcacgcaaagatttggtcaggcgaggctggagggcagcgtctcacactatgtatgccgggcatggtatccaggatcgagtggatcaggggggcctctgtgggacagcaaatgccagcagcaaacacgcgagtggtccgaagcacagccgacggtgcctctgcagccgactcaacagccaacgagacacagctggcggcgggcgccgcaaaaggttcagcatggtgcagcaggccggcctgctcctgcacaactgggtgtgctgttggttgcctgcaacacaagcggcaagggtaatgttgagctgattccgggctgtttacaactgtgggttgtaccagcaccaaaccagacacagcctcgttccacatcccacctctgcttcagagttgagaggcggccgtggctgaccacaacaggcccactggagcactcaaggggacagcagctggaggtcacatggtgcaactcgtcctcaacctgcaaaactcgaggcaggatagaggcgcacacttgaggaagaccatgaaaagcaaacacttccgacggctcagtcgctcaccagatagtccgtgtggtcctcatgttcaacagagaggtgt

SEQ ID NO: 89 - DNA, 21809 bp, Chlorella sp.
  source 1..21809: mol_type = other DNA
gcgtgtctcgtggcatggcgttccacgatgcctacgcccgtgtgcgtgacgtgcgcccacacgtcgatgtgtttccacagtacgaatccgacacgaggcgctgggtggcttcgaagtgcaatggcgagtagagatctgtgttgctcgttattgttacatcagtccaatggtaatgttttcacaacagttgtcacggcaactagctgttgccctacgtccccaagacggcgcaaatgctcctccaacatgcgcttgaggacgctcaaatcttccatcatgccgctgcggcgcacgtgtgcgtattcatccaggtcttcgtgatatctcagataccgccccaagtccttaacagtgcgagcaaacatctccagcttttctgcttgatacaggagctcgtggcccgccattgccagcgtgtgcactgactccttcggcagagtcattctcaaagaatgaacaacaccgcgcgacctggcttttatacctggcttgtgtaccttgccacgctgagtccacgttggcacgccagcactacgcaccgcgacgcgtggctcgaggcgtcgaggaaaggacctcgtttttgaataccttcagccagttcagatgttgcttccgctgttcttccagaatttgcgattggaactctttgttgttgttggcgtgcatctctgcaatgtctgcggcgctgattctatcgcccttgcgagttttgtaccggggagatttcagctcacgtagcagctcataagcacgctgctggaaatttgcgttgtcttgtggcccgcagtatgttgcaatgtactctatatggcccaggttttgagcgagccgtttggacacaaacttgctcaatggcgtgtagaccgttcctgtttccgaggtctcaatgatgtgccgcttagccagttgcagattttgcagtctgggtgggccgccggatccgtgcatgttccggaagatggagcatgcaccgtcttcgggtggacatgccacgacaaggagtgccatccgctcgttgtcgtggtagcagtccatcatcacttcgacttctgcttggcttcctgaagggagaactttcgtcttcacaggcttggtggtggtggccgactcgtcgacagtggcaggtgctgccttggccacagcattctcgacgtcgccgcctcctgaaaccagctcagagcgcgacgtgatcccaacatcaccgcatctcttctcttggtgtctcttcacgtgagactcgtggaagctcgtgtatgcacagttggcacattggtggacggtcgcgcgaaccacatagggtttgagactcatgatcttgaatggtggaggtgcctttaaacctgcagctgaccggctgtatatacggaagacgtattggacgggtgcgaagactggaacgttctctgtatagacagggcgtttgagcgcatcccagacatgctgcactcgggtaaagaggtgctgcttgccgtggacaacacgcatacgtacaaggaagagctcatggcaaaggcctggcaccccagccggatggtcgattggtgcctggacaccgaagaagcggcagtgtttcgaaataaaagtctcgaagtcgtgtaatgagacccgaatcatactaccgcgatgccatcaactctggaaaactggataagatgtcagagaagaaacgggatgagttcctgacggcgatgatgaaggacagcatgatttccgccgacgaacggttccggcagcgatccccggtattgcacgccttcaggccgttgctgacccgcgtcgccgatgagaccggattctcggatgcgctgttcagggccagcaagtaacttaaccgaccgatcgattccctccgaatcaaagagatccggtgcacccccagtcgggaatgtgccttgacacgcgcaagggtgctctgggcttcggatgtgtgcaaataattatggctagaagtgcttacgtgacacacacaagggtgcatcgggcttcgtgcgggttagtactccaaagggctcccgtgcgtgtctatggacctgtaattatttgcaccctagtgttcacccttttggtggtgacctgcggacgaaaataattatgaaaatccttttgctgggaacaagttgcgctcaaaccgagagacccggatcgcgttcccacagcaacaaccataagccgtaattattttcgtccgcaggtcaccaccaaaagggtgaacacttgggtgcgaataattatggctagaagcacgtacgtgacacgcgcaagggttgtgttgggctttgggtgctgtagctgtaaaacacgtacccgtatcttctggaattcttcataactatccgcgccttagtgttcacccttttgatggtcacctgcggacgaaaataattatgaaaattcttttactgggaacaagttgcgctcaaaccgagagacccggatcgcgttcccacagcaacaaccataagccgtaattattttcgtccgcaggtcaccaccaaaagggtgaacacttgggtgcgaataattatggctagaagcacgtacgtgacacgcgcaagggttgtgttgggctttgggtgctgtagctgtaaaacacgtacccgtatcttctggaattcttcataactatccgcgccttagtgttcacccttttgatggtcacctgcggacgaaaataattatgaaaattcttttactgggaacaagttgcgctcaaaccgagagacccggatcgcgttcccacagcaacaaccataagccgtaattattttcgtccgcaggtcaccaccaaaagggtgaacacttgggtgcgaataattatggctagaagcacgtacgtgacacgcgcaagggttgtgttgggctttgggtgctgtagctgtaaaacacgtacccgtatcttctggaattcttcataactatccgcgccttagtgttcacccttttgatggtcacctgcggacgaaaataattatgaaaattcttttactgggaacaagttgcgctcaaaccgagagacccggatcgcgttcccacagcaacaaccataagccgtaattattttcgtccgcaggtcaccaccaaaagggtgaacacttgggtgcgaataattatggctagaagcacgtacgtgacacgcgcaagggttgtgttgggctttgggtgctgtagctgtaaaacacgtacccgtatcttctggaattcttcataactatccgcgccttagtgttcacccttttgatggtcacctgcggacgaaaataattatgaaaattcttttactgggaacaagttgcgctcaaaccgagagacccggatcgcgttcccacagcaacaaccataagccgtaattattttcgtccgcaggtcaccaccaaaagggtgaacacttgggtgcgaataattatggctagaagcacgtacgtgacacgcgcaagggttgtgttgggctttgggtgctgtagctgtaaaacacgtacccgtatcttctggaattcttcataactatccgcgccttagtgttcacccttttgatggtcacctgcggacgaaaataattatgaaaattcttttactgggaacaagttgcgctcaaaccgagagacccggatcgcgttcccacagcaacaaccataagccgtaattattttcgtccgcaggtcaccaccaaaagggtgaacacttgggtgcgaataattatggctagaagcacgtacgtgacacgcgcaaggctgtatcgggccctgtacgtgtgagtacacgaaagcgctcccgtgcgcgctgctagcttcgtaactttgacgtagttaccgcaccggcttgatgggcgcagacgtcgcttagttcatggggtttaaaaggttctcacgtacgacctggtgtttgtcgatgccggtgaccttcgacagctcggtcgcggccaagtacccgtggggccccgctggcctgcccttctccggctggctgccacgggtcgccgacacccacactctgccggccggcaatctcgctcgcgtggacagtgcagcgcgtcataccggcccgttcaggatatggcgagggagcgcccatgtggaactggactggggggagcacacgtgtgtcaatttgctggagctgcggttcgccaacccccatgggctaccgctgcaccacattattcatcgcgtcgccctggagatcggcatcagctgcgtcgatacagtgtaccccggagaacagctcgactggctgctggagcaccacgcgcgcggcccggtcacaacctcgtgcgggaccacgcgggtcccgctgccgctcggtggcacccacgctgaggacctcctgccgttggtacggcaccacgtggccaagctgaaggtcgatgtggcagacgggcacagcctcgagcacgcgcacttggaggtatgggcgatgtgctacaccgagccgtttggcatgcccgtgccagcgctgaccggggatcacgggccgccggcgcccatcgagaacccgtggcgggcaggtatcgctggtgcagccacgacgggcgcgtcgacccgcatctccaccgtgcacaagaacgcgtggaagaaccccgcgccacccggcaagcgactccacgtggtgcgcttctgggcgcccgcgtcaatgaccatcgaatgcatggcagtgtggccggcagacgacgtcgcgctcctcacggtgttagcctcccccggggtcccgcaggaggttctggccacgtgggagcccgagccggctggattcgaggacccgcgcgtgcgggcagcagcgggatgtctgagaatgctaccgcccgagctggtgtcgcggatcgtaaggccgctgttcatgcgcccggagccccgtgccgtcatctcgttctccacgcccgtcaaccccaacacggcaaacctgctggtggagctgcagttgagagaaggcgtaccagcggacacgaacttcggctacgcgaccattggcctcaatgccatggtgtttggtgggggattgttcggcctgatgtacggtggctgaggcggggaaccacgggctccatgtgtgtgagcgtgtgtgtgtgtctgtgcgtgcgtgtgtgtgtgttacaggttcaggtgtcatatttgctccaaaaatggccctgctcggctgggactgtttgccggaatattccaaaaaactatgggtgtctatggtaattaacgcgttaaatctcgaactttaatatgtctaccctcaccacgacaatacacaccgtgcaatgctcatctcaggcaagaaggcggctgcacagctcggggtctgtctcgacaccctcagacgactcgcagacgacgggcagctcgcaagcatcaggctcccctccggacacaggcgctacgacatctcagacgtacttgccacaagcacacaccccggtgacaatgccagcctcaagcgaaaattctgctactgcagagtctccaggaaacaccaacagcacgacttgcagcggcaggtcgagtacatgcgcgaacgcttcccagaacacgagatcgtcacggacatcgcttcagggatcaacttcaagcgaaagggcctgcagaccattcttcgacacgcgatgctcggaaatgtccaagaggttgtggttgcctacagagaccgccttgcaagaatcgcgagtgacctcgtggaatggatcctcacaaacaacggagccaaactcgtggtgctgcatcaggcaatggacagccccgaaggagaccttgcagaggacctcatgtcaatcgtcaacgtcttttgctgtagggcaaacgggcgcagaaagtactcggaccaaagcaaagaagcctccaaaagaaggaaagaaaccccaggcgacacactcgcggaaagttcgcatcttcccttgccgtgaagacggagagaagctgacgcaatggatgggttgccatcgggtcgtatacaacagggctctggcgtttgcaaagaagactggtcaacggaattacgcggagatgggcaaacggttcgtggcgtccagaaacatcgaggagccgtggttgaagcaatgccctcaggtcatccggagttgcgccatacgtgacctcaaggccgccttcgacagcaactttgccaagcggaagatcaacccagaacacacatttgacgtcaagttcaaggccaagaaggacgacgtgaccgctgtgcgcatcgagcgagtgaacggtgcgttcaaggtgttggacgacggcaagcacgtctccttcttccccaagtcgttgaagcccatgggggtggagcccagagctttgcaaggcatcgaactgaaacatgacatcacgctaacgaaggaccgcctaggcagattcacactccatgttccctaccgtcgcgaaaaccaagcggcacaggaaccggacacgtggtgtgctattgaccctggcgtccgcacctttgccaccgtattcagtccagcagacgcctgcaagattggcgatggagccgcgacgagactggccaagctgtgcgcacacctcgacaagctgacttcggacacgaccaaagccttgggcctccaaaggagacggaggatgaagaaggcacaagtgcgcgtgcggaatcgcatcatacacttggtggacgaactccattggcaggcggcttcgtttctgtgcaagcactacacggacatcctactgccagtgttcgaaagccagaagatggcttgccggctgtcgaggaagatcggttcgaagacggcgcgctccatgctgacgctgagtcactataagttccgcatgcgcttgatccacaaagcaagggagcatgggtgtcgcgtgcacctttgcacggaagagtacacgtccaagacctgcacccgttgcggcgcgttgaagcacaatctgggaggtgccaaagtgtacaggtgccctgtgtgtatgcttcgtatcgaccgcgacattgcaggtgggcgcaacatcttcctgaaaaacgcggtagctcttgattgagctgcctttgcctcgttagagcctcgtccaatgtgacgtgcagaagactccccctcatgagctgtggccatcgattcctgtggcaacgcaggaagctgtgaaagcagtaatgactgacgggcgagcccagactttatgttgaagtctgtgagttcttgagttttaatctagcggcccagatgcagacgacaacactcccggcagggacggcaaacgtcttcaaaccgcccggaagcgaatgtatggccgctcggagctctccggatacttcttcggagaattcggtttccagcgattcccacagcttgcggtgctcgtcggtcacactcgcccacggcaccatcaacggctccggattgaaggccgcgtgcatttcggcggcccaatctcccgtggacacgtagagcaagtactcgcgaacgtgctcggcttcggcgatcgcccgtcgttggcgcttggcttcccgagcggcggccctctcgagcgctcgctcggcggcggcagcctggcatacttccgtgagagacaaagacatcgagagaaaaaaaagtgcccgaaccataagccgtaattattttcgggaggtgcgaataattacggcctacgtggcttagcacgcgcagcacgggcctacttgaacagtcggttctcccgttcttacactttgcaatgtctgagttcgcgttgcttgtagagcacagcacggaaaccgtgttttacctgataccacaggcgcagcttacggaccccgacaggtcgttgttgggcaggctgcacggcaccgatttggacaatgacgggcaaacggaggacaaacaagcctacgagcgtatgatgtggcgattcgtggactgtggtggcgacgtcatctacttgccccgcggtggaaccgtcacgctcgtatgtcagctctttgtaacaacttgacagctctttggaacaacttgacagctctttggaacaacttgacacatggacacaattcagtgatgcgtgtggctcgtctcgctaccggcaaggcttgctgtctctgaggtgtcagtcacgtcagtctcgtccgtggtctcacgagtcaaatcccgggtctccttggggacctcgtgtgcgcgatcgttgttctggtcttgccgcagcttgtacttgccagtgtccttgtcaaactcgtacttgccattgtcgtctcccagctcgtgcgtgatggtgcggccgtagtgcaacttgtagagccagcccagcgtggccccatcagccaggatcgtgaggaacaacccggacagcgctgcgtcgatgggcatggcaccgtaccaagagccatacttcagctgcaagtttttcaagatcacgtacaatacgatgtacaggaacgcccccaccaggaatgtcctcgcgttgcgtttgccgtgcccaggttcctttgaagcaggcaggaacgagtgacacgcataccacagcatgtcttggctgttcacgtgacaaaaggaatccgtatttgacgcgtggtaattacatacagacaacacgtggatgcataccatgcggcagtgtcaatcggctggctaagtgatcccgttcaaacatggactccactgtggcactggccccgtacacctcgaggtccaacggtgtggttgtgcacagcatgggtgccgctccaaggtcgctgcgcagcttgatgagctccaaggcttgcgcattgatgcatttcagggcgggcaagggctgagccagcaacagatgagtctgcgttcgtatggtgccgagcttgcggatgactgtcagctcttccagcctgctcagggtgcccggccggtcgagcaccaccactccactgacccattcgcggtcttggtaatagcaagatcccagtaccagtctcttgaggcggggcgggtccacgtccaacagggccttgatgcggactggggcagccggggcagcctgaacggaccaagacaccgctcagaccaccactcatagcacaaccaggacagcccgtgttccaatgagcacaacgcaccttccgtctgttttggcaggtgccccagtacagcgcgcccagcacgagctcctcgagattgggcaatttcctcagcgcttcctcgaaccagccatcagcatggtaggattgcgtcgacacatccaggctggtcaacttgctgaagtccagccacggctgcttgcgctgacgccctatcatgcatctgaacaaggtgacggcggtcttggagcggcatacgtgcgcggcaacgactggctgcctggcccagtccttgcacaccaggcggtggtcggccgggcgggaggtcaggtccagcacgcgcgcctgtagctccgcgggcaaatcgttccatgtagcggtggatgcgcgcgcgactgacattgaaatgagcgaaatgtggctgcgcggagctcttgacatcgcgtgccagggtggcgtcctacgtggcatcatgactacagcaatcggaaattatgcctccctgccgccggcctcctcaccccccactcttgttgcccatgcgcaccccaggatgcctgcctgcctgcctctgagttccagcggatagtcaaggacctgtcttccattggggacaccggtgaggcagggaaggagggagggaggggtctcacagggctgctgggagagcaggggtggacgggaggcatgtggctgccagggtgtgcctgactggctgattgaggggctgaggggcatatgcgaggcgctggctgtgggagacgcatgtgacagcgcagatgcgggtgtgaccttgtggtcggctttgcggggctgggcaaactagagcctgcaataaacctatgtcaccccgcgatctattttgccatgcctgttgttgagctcaccggagttccccgcaccacgagtgttgaggacatgtgggctttgtgcgaaagcatcggggaagtgttgagcttggatttccatttcgaccgcgaaaacgggctcgctttggtgacatttgcgtctgattcggaggccttgactgttgctgacgtgaccgtaaattgcacacgttcgacgggtgacaggcttaaaggttttcacgtgcgttacatttacggttttcttctcgactacacaagcatggatgacgaccaagcaaagtatgtcgcatccaggaaggcagcaacttactacgactgcgacccaagaacactcgtcaattgggcggacaagggactcgtgccatttaggctcacaccggaaggacagcggaggtacgccatccccgtcaacgacgcaccccgcaaaaaagaggcggacaacacaaaagcaaagtactgctactgccgagtgtccacacagaagcaacgagccgacctcagcaggcagcaagacgccatgcgggcagaatacccaggccacaagctcgtctcggacatcggcagcggactcaacttcaaacgcccgggtctgcttgccattctggaatcggcaatgcgcggagaggtcgaagaaattgtggttgcccacagagacaggctcgcgcgtttctccatcgaactcttcgagtggattctacgaaagcacggagtcaggctcgtggttcaacacgcgtcgttggactcatcaccagaggcagaacttgtcgaggacctgctcgcagtggtcaccgtcttcgcctgcagaacccacggccgcagaagccataagaagcgcaaggcgggtgaggctgttcccgacaccacaagatgcgcaggtgctgaggcgctgggtggggtgctacagggcgctgtacaacacggcggtggctcactgcaccgagacgaagacatacaactacttcaaagtcaggccaacattgaccaacgacgcaactgtgccggcccacctcaagtgccttccggtcgccatgaggaagtacgcagtgaaggacgcgacacaggcgtttgtcacaaactttgccaagaagaggaagaactcggggcacagcttccaagtgaagttcaagaccaagaaacactcaaccaaggtcctcaagctggaggccgcaaagatgggcgtcaagatcgtggacggccggccaaggcttgtcgtgggagacgcaaggcaacaccagctagggcgtgaaggcatctccttcgaccgccggggagaggccctggtacgagacaccaaggacccggttcttcaaatcgacgaccttggccgcttctggctcatcaccgtgtgcacccgccagcccgagacccaagggcagcggacgcaaggtgtggtggccttggacccgggtgtgcgtacctttcagacgacctacagcccagatgggacgagctacaaacttggcgacaccgcgtccaaccgcgtgtacaggctgcttctcgtgcgtgacaagtacattggcttggcgcacatgagagggccatctcgccgtgttcggcggtcttacgggaaaaaggcagccaagatcatggcccgcatccaacacatagtggacgagctgcactggaagacggcccgattcttggcacaaggttggtccgagatcctgattcccgtgtttgggaccgctgccatgagcaagaagtaccaggcgtcgcgcgccaaacaccggtgcattggccgcaagacgacgcggcagatgttgcacctgcgccactacacgttccgccagcgcctccatcacgttgcgaagatgacgggcacgatcgtgcgcgaagttaccgaggagtacacgagcaagacgtgtggtaactgtggcgagatcaaggcggacctgggcggtgcaaagacgtaccggtgccaagagtgcggcgtgtgcttggatcgtgacggcaacggcgcccgcaacatattcatcaaaagcgtcctttaggggacttcggacggtacaccctctcttcggagtgctatacacccgggcaagagtcttttgacttggagcatgctccctttgttgcctgtttcttccatgggttacggatgaatgtggtgtttgaagtaccggcattggcttacgcaaagaatttaagtttgaccgagccacaatgttgtcatcatgagttcgtgaaagcactcgggcagggccgtgatgatgtagcggcgttcattgtacggccccggtggtgcacgcgaaatgaacgaagaggaaaacacgtctatcagcttgtcaagcatgtcaggaacgaggtgatctcgtatcggtacaaatcgatctcgtatcggtacaaatcgatcgtggttggttccccgtgcgtgcaccagcaagtgacccgggctgtgaatgacagcaaacaggcgttccagctcattcccagcaactttggccgcttgcacatccttcagccgtgctgcccgaaacctggcttcgactgcatccaggttctgcctgtaaccttcacgcagagcacggtccaattcagtgacgatcgcttcgacgagagctggatgggtcacctctgccgcggcgcccggtgttcctggcattgcgagcgcctcgacaaccagcgctgtgcccgttcccgctaatgttgccgtgaacacttgtaggtcgtcagtggcgcggccaaggaagttgaactcccccagggcgtggcgcatgctgacggtttgcggcggcggcgaggatgtgtgcatcctggaaaaacagaacgttcgggacatctgtctgaacgagcgaattgattccgaacccctgtttcagctacgcaaatgtgctgcggaaccctgcaatgccgtcagtgtgttgtactgtttgttgtactgcccacgaaggccacatttcgcatgctgagcctagcccgcgctgacaacttttcaagtatttccgcggccgcagtctctttgcaagccaacactcgtagcccgagggccgccaggcgccagtgcccagccccgtgccctacctcaatcggtatcatgaagccgcgtgtgaatgtgttttaggcagcacgtttgtctcgcgcgtgctgtagggctggttgctgactgaagagtacctgccgcaattgcgtgcaatacgaataacaactctgcacgcactctggccccgtttgtcccagggccacgccgcaaatcgcaaatcggacaaaatcggacaagtcgtcgccttgcgcgaatcgcttttcgcacctgcgttgcacaaccatggcgaccgctggccaggtaaacatcagagcactgatatcgcatgagagtgggtcatccaccaagtgactgaacctgctggcaacctgtttgtgacctcctccagatcgccaaggacagcagcagcgaaatcgatgtggtgcacagctcatccgagcttgtctccggcagcagtgactctccgtcgcaagacctggaacattcgtggtcatggcgccagtttgcgtccttttgcggttctggccttttgatggtcgctgcattcctggtgggcttcagatctatgatgcctgttatgtgcaggctgatgcatacagcgcgcctcttcctctggtttccgtcttcaatcacggtgctggtgtctcctctcacaggatcctggcaacctagaagctgatatccaagtaggcgctaagacaggttttgcacttctgtggtgggttgctcttgttacgcttatctgtggcagctcatttcagtgcctcagtggccgcttgggcctagtgacgggaaaggacttggcccgtcactgtggcgagcgctggccacgtgtcacctgctggttcttgtgggtaatgctggagctggccattgtggcagtggacatccaagagacaataggcagtgcccaagccctctttatgttgtccaacggacagttgcctctctgggcaggtactgtcgcgctaggtggactgcccttatgttgcggcctattagtgggatgattgtacctgagtgttgtatgtgcacctcccttttcatgcttctgggaagcgcacctgacgtgtagcctcacctacctctcccacgtatcatgtgtaggctgcattgttgtctctttctcagccttcattcttctgatgttggagcgctttggcacacgatggctggaagcgctttttggtagcattattgctctaatgggggtgtcaatggcagttaatttcttccgttctggtgtgccagcaaaagaggtggccctgggtgaggaagagaaattgtttacaggaagatgtgcatcagaatttgtatgctagatatgccgaacttgccgcaagtgcctaacagatgacctgattcatatgctgttgacgggttcactgccagcctgcttgctgacactgcaccttctccctgctgcaggcctattccgaccaacgctgccggcaggttctattggcccagctgttggcactttgggggccctggtgatgccgtacaacttgtttttccattctgctgtggttggtactcggtgcgaggcaaacgctcatttcaagtgagctacgctgctgcagagtttgcttgccaagccacgtgcctcttttctcctcgcaggcgtcccagcccaccatcccctggcagcatgcgtggtgtgctgcgctacctgcgtttggagacagttatcgtgctatttcttgccttcttgatcaatatgtgtgttatatgcgtgtttgcacaggggttctatggcactggtgcgtcggcatgctgtagctctgtttgcttccaagttgcaaaagtctgtgtcttccccattctgctcttccccataaatgctcagcgcccggatttgctgtagatcaagagattgggttgcaggcagcaggtgacctgctggccgacaagtttgggtcagaattcaaggtgttctgggcagtgggtctgctggcatccgggcaggcaagcaactgtgttccctgtgtagcacttcagttctgcggttcatgagcatgtcgttgcatagagaggtgcacgtcaggcattggtatgctgttgccccgggccatggctgaaccgctatgctgctaccttgctgtgtgcatttctaggtgtcgaccattgcattgacatacgctgggcaagttgtgatgagtggcctactgatgattgatgtgaagagctggctgcgcatgattggcacacgcctttttgctctggtgcctgcactgacaggtgcctgttcttctgctctagcttctacgcctgtcctcagcatgctatccccagttgcctttggctcatgcctcggtgcccagaaagatggcctactaaccctgctaagagcactccggctgtcccgcttcctttgtgcagttgcgctggttagccaaacaaacaatagctttgacaggctgaatcagatgctgaacgtggtgcaaagtgttctactgccttttgcaatcattccggtaaggtagcattgctcattgccttgatgctgtatttgaatgagcctgagcttgaacagccatgccgacatacgggtagctagctgttgcattgagatgcgcctctctctgggccatgccttgctcgcagctcatccacatggctggcaaccgggcagtgatgggcccaccgggtgcgtttgccacagcccgctggctcaatgtattttgctccgtggtggctgtggcacttgctgccatcaatggctatttcctggtgacttttcgacaagaaaatttgccagacggcactggtaagcttcgtgtgtaaagcgattgtttatctgtgatgataatgatataagcccagcatgcttgttgttttgttgtgcctgatcatgcttgctcggtggttccttgcctgtgcaagcaagcaacaatgtgcttgtagttaggcagcagtgaagtgcacagagttcgtgttagggtcgcgctgctgatgctcctaaacctgtggctgttttcaggtgtcatggtgggctggggcttcctgatggctgcttactactgtgccatggcgtgcattgcgattggtccagaacgactggatttatgggtaacaccccacttgcaccgtgcgcgaggctcagtaacaaaggcaagcagttcggccgttcgcgcagctggtggcatggcagagtgggtcaagggaatcaactggcgtgaccctgagagcctagtggaggtacacatctaagcttccagtattattgattactatcaatgcaccatggcaactggccttgctgggaagctgctcatttccacaccctatctttttttttttgagcacacaacaagctcacacatcatctctgtcccagcagctgatccagttccctcatgtacaactgcactgtttgtcttgttgcttttctgcatggagttagagcttgtctatcactctctgaacttttgatccagcaattcgtgccttaagttgcaagaaagcatcagaaatgtgatcgtcagagcagtcagcgtgccaagtttgtgacgatattgccatgcggatgggtgggttggtgacaagcacatgtacacatgcggaggcaaacatgcctctccagcagcaacagacatcactagtcagaacctctgctctgtgctgtgccatgactgaggctgccgttagtttctcgctacatacacctgcccacatgcagttgccgtgtgcaatttcagcagtgttggatgtagtacctggctttacaacaacagggtcgcaaggcacaatcaatcagcagcaaatacctatcgtgcaaaggtcagttacaatcaccccactggtaggccgcgtcagcagacctggggcaggaggcaaacagcaggtgcttataagctaaaatggcaaatggatgatgcagtgtttacgcatgtgtcagcaaaaggtgactagtactcacaaagggatgatgcgaggggtggtgcacagatacaaaattgacatctggtgcaacggctttgggaacagccataagggttgctgtgcacgataaacaacatggcatgcacgttaggtgcagggtgtgagcatgggcaggtgcaaaagtgcatgcaatgtgcaggctggacagctagcagctgctggctagctggcagcaggcagggcgcaaccgctctgcttgacaaacgggcctgtgggcagtggtttaacaaaattgtgggaattgtggccgacggaggggcttgtggcaccaccacaagaggccttggtgcacccagaagcacgctcatttggcttgcaactgctgccacactcgacgcggcaaccatgtgcagcgggcaaggcgcaggcgacctgctcagcagacaggcctgcgggcaatggctcaacagcattgtggacttcagaccggcttgtggcaccaccacaacagtgcttagtggacaccagaagcatgcttgcttggcttgcaactgcggccgcacttgacgcggcaaccgtgtgcaggagggggcgccggagtagagacagtgcaggaatcagaaccacagctgggacttggtttgtgggaagctgcctccatagcaacaactggccagcgccatttaagcagcctacacacatcaggtgcaaacgtgagcgagcaggaagcagtggcaagacccacaggtaagctgcctttacagcgacagcaattggcctggtacacaccgtaatgcattagccacaacaagcagcgaggcgccgacatccaccagcacagcaccccatagggtgaaacgccccagggctgccggaacgagcactgccacctgcgcaaacaacatgtgcgaggcaaaggtgaggtggagtggtgatgcggacggagaagatgtgagcagctatgccttcagcaataaggagaaatgaagccttttgacttgcgtgcaacgagccggtggtccgccggtggggcagctggccacaaatacaagtgcaacagggcaacacgtggcctgcccagttgctagcagagacagagcgtaatgacagtacttgagcaagtacagccaagctaaggcaattaacccacctttgtcacaactgagaaggttacgttctgccagatggtggccccagctgcacgcgccagcaggagagcagcgggcacggcgcgcacatcatttgtgaatagcgccactgcaagaacaaagaaaggggtgtcgctgaagggcaatcgcgtagtccatagccaaaccaagaagggggtggcaggaaggaatggatcgtgcgtgaagggcaggctgtgggcaagccaaaaccatgccaaccaagacaggcaaacaatcgcacacctgagccagcttccagggcggccgcgctgccagccacacccattgcaatgcctgcatctgctgctgccagcgcaggtgcatcgttcacaccatcgccgcagtgtgccacaaagactcgggtagggcggcggcgtaagcagcaggccgcagtgggcaaaaccccagggcagcagctagatgagccatgagcagactgagcatggttcttaagctctgcaaccttgtccagcttcgcttgcggcagcagctgggaaaaaacacagtctggagcgatgcctgtagcggcaccaacagccgaagccgcagcagccgcatctcccgtcaacatacaggcaacaatgccacagcgccgcagcatggctactgcttcttcagcttccgggcgcacaacgtcacgagcactgcacagccgggagcgagacggctgatcaccatgaggaaattgccagatacaagcagttccctgatgcagcctgcccactgccatatgcaacgcacgtcctgtccctcgttgcagaaccgaggatctcacctcagccagcccacaaaccggccatccaccgcaaccaggcacgcagtggcaccctcggcatcaattgcatgctgtgcagctgcgatttcaggtcccgccagatttgcacggagctccatcaagccagcagtaccagctgcaacccggcgcccatccacaattgccaccagccctgcaccttgaaccacctctaaaccttccacaggagcatcacacacagcgccctgggaggcagcatagcccagcactgcggcagccaaagggtgactgctaccgcgctcaagggaaccgagtaagcgcaacatctcttgaactgaccagccatcgcgggcctggagagacagcaaacagcagtgcagcacacatgaagtttgaaggagaagtgggcacagtctctgggacagaggtagccagagggcagacatgtggcgtaacatgttgcacagaacaaagtgttcagtgtgccagtgtgcatacctggcatgccaccacttggaaacttcccttggtcagtgtgccagtcttgtcaaaactcacgactgatacctgaaaaacactcaagggcagggcttaagaactgatcttcgcagaagtacatcaacagacggaatgacaaagcagctagcaagcacacaactcaccagcctcagtgccgcgagcgcggctccactcttgatcaggacacccttgccagcggcacgggctaaggcgcacacaacggtggccggggtagaaagcacgagggcgcaggggcaggcagtgaccaacacttgcagtgacaggtagacccaatcactccgctcgttagccggcacccaggcccagggcaggaacgccagcaaagcacaggcaaccagtacagctggcgtgtagatgcgagcaaactgcagaaagatgagcgttggcagaacagtggtattaaacattccacaaatggcaggtctccaatgcaaacaggcccatgcacaaggaaaagggagatcatcagcatttttgctactacttgcagtgcggaaagcgcaccgcaacgcattcacaccttagctacaagtgcttctgctgggctctgctgactggctgcttgctctaccagggtagccattcgggcaacagcagtatcgccagccgccgcagttgtgcatacgagcaaagtgccagccccaacgttgattgtaccagcttggacgaggctgccagggcggcgtgacactggcacagattcacctgcaagacgcaaagcaggaacaggtgagagcaatggccaagtaaaaagaggactgtagctgaaagacattgaaaacttctagccgcacactgttgctatgctttcccacacagccagacctgtcatcaaactctcgtccacgacagactcccctgccaccacagtgccgtccagcggcacagactctccagggggcactagcacctctgtgccaggcatcacactctccacggccacagtttctccggacactgccagcttagctacagcaggaacacaagcaagcagtgctggagtaacctgccaacaatgttgtagacaaggcatggccaagctgcatcaaaattgccaacatccaaacaaccctgcagcacaccaacagcaacaaaacaagaacaacgtgatttttcacctgactccgggcgtaagttgagaacagcggccacagcgttacgagccttttctgtgctgcagcgttcccagtgctcagccactgcaaacaagacaaccacggctgccgcttctgtatagtctccaatggcgatggcacctgccgcagcgaggctcatcagcaggtggatgtccatcacctagtgggagatagcagaggggcaaggcgaggtgagtgccaggaagagacagtatcatagggacccagcagcaagccaggaagtgcggttttgggtgaaatgcaagtcagatggcacaggagcaggcacctcgaaatggctaggtgcttaccatgcgacgaagcgccagcagtgcacgcaacgcaatcctcggcaaacacagtgccagagagcccaaggagacatacttgagatactccaatccggagacaccagtgggccccgccagatagtgcagcagcgataccagtagcagtaccgcgcccgccagcacatgccagggcggtagccagcgggtgcgcacctacagagaatacagagggagatggtgagcagaacatcatatatatgcacagcaggcaggaaggcgcgaccagcagcgaacataacacagggtgtacattcaacagcatacttgcagcagtaccttggcctgggtgcgcggtggtgctagggacgcttccagcatggcaccattaagagcggcaacaagcgctgcaggcggcgccagagctgcatcgtgcaccacgactacagtttgggtcatgacagccacctccacctgcaacaagaagacagtcggtctatgggtgatgggtgggttgttaaggaagcattatcatcacgcccagacagaatcctgtggcagcgcaaaactttagtgtccatgcaaaagctgctgggcgtcattatcagcaacatcatggatgagacatgaaaaccagcaggcacgcaaagatttggtcaggcgaggctggagggcagcgtctcacactatgtatgccgggcatggtatccaggatcgagtggatcaggggggcctctgtgggacagcaaatgccagcagcaaacacgcgagtggtccgaagcacagccgacggtgcctctgcagccgactcaacagccaacgagacacagctggcggcgggcgccgcaaaaggttcagcatggtgcagcaggccggcctgctcctgcacaactgggtgtgctgttggttgcctgcaacacaagcggcaagggtaatgttgagctgattccgggctgtttacaactgtgggttgtaccagcaccaaaccagacacagcctcgttccacatcccacctctgcttcagagttgagaggcggccgtggctgaccacaacaggcccactggagcactcaaggggacagcagctggaggtcacatggtgcaactcgtcctcaacctgcaaaactcgaggcaggatagaggcgcacacttgaggaagaccatgaaaagcaaacacttccgacggctcagtcgctcaccagatagtccgtgtggtcctcatgttcaacagagagg

SEQ ID NO: 90 - DNA, 4141 bp, unidentified
  source 1..4141: mol_type = other DNA
  misc_feature 1..4141: note = Fanzor polypeptide
catgttcatgtctgaattgaatcaacctaatcgtttgagagttggaagagtgtctgtggagatataaaatgagaaaactctatctattagcttaaacaatattgattcgtcgaatggtttgttgtgttgcaatgtagtgcagttttatatgttatttttttctaatgatgagtgagacggaatgattgtttgattgctcttatatcgttagaaatcaaagtggcccgaatgacaccttaaggttatatacttgtctggcataaacattctggtcgtgttgcgtctggacgtcgttggcaagacgacttcggcaaacgagatgatgttcggcggcgtccacgcactcacgaatcgctcctgcagtacatcaacaacatctcgaatcttccacagcttgtcttggcggttcgggttgtcgttgttggcgaagtggagatcgcgaaggatcgacgtgcagcggttacgactcatgaacttgccgaatgctcctgcagtcagagcaccatcgtcagtcatcgcccagtgctgggaaaagcgtcgcgttgggttcaacatgtgagccacgagaagaccaatcactcgcagtatctcgcgcggcgtgtaatcgtcctccctgcgaatgcatcgtcggagatcgcggagcgtctgcatgttctccgttctgggcaccctggctcgctcaaaacgcgctcgctggtccacagtctgcctcttgacgcggttggtctctctggtgatccgcatccacgggctcttcggtaggaaatagaacatcaagtcaagaggtgagtccttcctcgcgcgtagtcctgggattggatgggcggtctcctgcgccaagccgcgaaaacacgacacctcgtcctcaaacactgacgatgctgcactccacttcaggtcctgaagcgcattctggtccatctgatcaatggacaaggagccacccagtgcctcaataaaggcagcatccatgtgtggtgactcctcgtcatcagacccgtcctcatctggctgaggacggacaggctccacgtagtcgtcgtccgaaaactggccatagtcggagttcgaactcaaactctcgtagccgtctcgatggtccccgggcttcatcaagttcacgtcagctggatctcgcggcgcgagtggtcctccatcgtcatcacacccgcgatcgtcctttgcctcctccaccgattcatctccagagtctgagtctggctccatctcggagagcagccgctggaaggctccgatcacgacagtatgctccgtgacgtccatcgtgtctgccgtatctggttgggatagctcgaaagctcttccaactatgttctgcgacaaatcgggagtttcaccgccctctctatcgctcctgaacagcgcatcgactgtgttggctgagagcgccacgctgcagtcaatttgcgacgctcgcaccatctcatcgccacctttatcgtccacagtgccgcttacctcgccactttcctctccattgtgccctgcattctcaccaacgtcatctctactttcctcgcccctagcatcgttctcgtcatcctggatcaatctggtttcaatcgcgtgctccacgacagctctctcccctatcacataaagttagtagcaacccgtattcatacagcaggtgcgaaacgtaccatagaaaacgctctcgccttctacgggagcatcgttcgacggtttatagtacgcccacatggtggacagtccggtgggtcgctttgatgtccatcctgcggccttcagttagcgccacatgtggccgaagtcaacgagatgcgcatctagcgctgatgccgacgcttgcgccgcagctttcgttctcatactggctcgaaccggcatctcgcttgtcgctgacgcagcaaaatctcgaatggctgagaattcccccctcttctcttctggtcacgaatcatttgtgacagttggaaaggtgcactcttacctttcccctggtactgtcttgtgtgtgcagcaaaaacctctcccgtcttatatcctttcgccccaaaaataaacttgattttagtatcgggtcgccgtttccgagccaactcctgtttgagaaaaatattaagtcgtaacttacgacttaaaaattggactacgtcgtaacttacgacgttggtaacagggggttaactgtacacattggtatacattttctgtaactataccgcttcgtaggccctgtgtatacggactatatgcacattttatcattagtgtccacttctgtcaattgaggcgccacagagataagtcgacctgaaacaacaaaagtaccggcctaaagtcaggtcgtcagtataataactgcagcaaatgtcaggttatcagtgcttagaagctagcctgatttgaccgaaacgaagaataattaccttacagccaggacgaaaagcgtcaatgtcgcttctcgctcaatcaataatgctggagtcaactagctaccgcctagcaaacctgagggcactaaacgtcactaatgttgcgtgccttgcgtcgggtatcttcgattgttcgtttgcgaccggtcgataaagtgaagccgtgaagggccaggagatgatgcttggcgtactctctcaccagacacgccaccatctgcgggacaggttaaaatcgaagattcccgacgcaaggcacgcaacatggcgcgagtgcgatgcgtctgaaagtaaggaactcctcagtttattttgtgccagttgatcggcgcacgcaagcacgatggagtccatcatggatggagtgcggagccgaaccttttcatccgtgttgactcaaaccctgcgggatcgatcgcagatgaacaacttgtcttgcttttcgtattgctacctgtaaatccttcacgacgaccagccagcagctcttcattttcctttttttcgccatgagcggcaagcgcacaaaggtggacccgcctgacaagaagaccaagcgtcaacgctcaggcgtcggccaacgcaacgcacgaaataagaacaatgagtgcagtattgtaaagtgctcgctcaagtcgttttgtcaggagagcgcgagcgtgtttccgtgggacaacgtgctcaaggacacaaacaaggcagtggcggaagcatacattctcgcaaacctgcgcgttgctcgtttttgtcaagcgggtcgacctattccagttctggaccaagagttctacttactaccagtgtctgtcaaccgtaagtgtgggtttgacagctcggaagaaggttgatgacgaagatctccggcagtctgtcgaactgtacaagtcgtggcgtgatcccaacgtgtcgttcgctagcagtgctcacaccagttgtggatggttccaaaacgcaaggtcgcagatggcagctaacgcttccaaccacgtcgtcgtgaacttctatcgtcgctttcagaagtatgtcgagcaacgcgttggcatcactggcaaagagcgctacgaactactacgagatgtgttagcgccaacgtacgcaggcagtgacgagcgtgtgctggagttccgtcgctggattccccgcaacgctgaaggatacatcaacaaggagaagccacacttgatcctcccggtgacgtatcgattcctccagttcatcgaacaagagactaccgcaagcgcgaggggccgagatatgagcagctgcgatcgttcagtcttctcccgttgaagcgcggttttgagtgttcgcacttcaagatgtgcaagcttggcttgtacgctcttttgagacgagcagggatccagatcccagatatcaaacgaaaggaagggcaaccttgttggaacgacgtcgtggacgagtggtggcgcaggctcttcaaggttacaaagtttgaaacgtgtgacgaggcggaatgccaagttcgcacacttctggtacaagcggctcagattttggacaggcaggcgtggacctgggcaaccgatgggacccagaccacttctgcacagcgggctatgaatatacagcacgctgttggtcggcgctcacaaatgtgtatccctttgggtcggttcttttgatcgaggcaatgtaacgagcccgtgcaatgcttggacctcgccactaactctccctttcagactcctttcgcaggg

SEQ ID NO: 91 - DNA, 14882 bp, Nothophytophthora sp.
  source 1..14882: mol_type = other DNA
cgccagaatccaacccgccagtacctgccgcaaaagccccacaaatggggcacgaagttcttcgtggcatgctgcggcgacaccaactactgcatgaggtgcgttctatgcgaggagtctaaccttttttttgcccggcgagcttcggctcaccgggcttttttttttttgcttcgattttactatgttggatataactgacatttgtttctcgcatccaacatattatccaacatagactggagatgtttgttggtgcgaaaacgcatttgacagtccctgttccagcggacaactcttgcggtgctgcagctgtcatccggaacatgaatgccctagttccgccgtcctcgagctcaccgtaccgcatcgtagtgacggatcgctactacacttctgtggttctggccttggagctactgcaccgccgcctctacttcaccggcaccattcagacgcgacgagcgggctacgcagacggcatcattacaaagaagaaggtgtcaaagagtcggccatccgaacctccgcgtggcacagtgaagttggcggagaacaagacattcccgatgatgactgcagccatgtggatggacagtcatcccgtgcatctcctcgggactggaggcagccgcgtactcggcgacgtgtgtaagtaaaccctgctgtgatgaatggacatgcagttagaatgactgacacatattatgctgtgaattgtgtttcataaagtccgccaggtcggcaagaaaaaggagaacttccctgctccggggctggtcagggactaccagcgatggatggggggcgaggacatccatgaccagctccggatgcagcgctacagcgtgcagctggcctacaagccgaagaagtactatcgctcattatttctgggtgttgtggacatggtgatggtgaattgctacatcgtctaccgccattaccgtaaaatgactgatcagcgtcccgcgaagcactaccagttcttcgagttgctccatgagcagctcttggcagtggacgaggagaagtttgcggaaattgaggtgagacttgcctggtttggcttgtagctttctatactgattttgtttgtatttacacaggcggcaacacgagcggaagacaggacggcggcatcgccgcgaacgacacccacctcacaacgggccgctggtgggatcgaccctgggcataggtacgctgagtgccccgacttcgtggacacctccaagggcaagaagcgcgtggcgcgaagctgtaaggtgtgcgccgtgtacttggtggagccgcgcaagtacaccaagtggtactgtgtgggctgctcgactgctccattgcggtgagttgtgcagactcatatttgaatggtttcatacgtggtctaatggtaatgatgctctgtttgatcggcaggaagcacatgtgcaacattgcccgtgacggcaagagcaaaacgtgcttccaaatatggcatgaggattggcacaatggcgaagacatctcggggcagcttctggcccgtcaccgtgtccaagaccgccgaccaggtgcgcagagcaagcgcaaccaccggcgccgggtgaacatggctgaaggagtggacgaggagacccaacaaggggagcaaggagcggacgacgtgcttagcgtggatgaggaagctgaccaagagtcaggttgagcattgtgcgagcgggcggaatgtgtatttttgttcgtttttgcctttctctagtgacttccagtcagcgtaatgatcagcagaaatcactgcacctccttccttttcttttgattggccatcgtttccatgtgatgttgatgacaagacagcttttggccagaaaatggatactcagataaaaaggacgtcataaatgttggacccaccttattaatttattcgaatccgtctaatcggcgccaacatatacacggatatgctggatatgtcctgtcttgcacagaatcacctacccccttcccccatccttcccaatccaacaaaatagtacaaaaagggaacatatacaaattcctatattaaattatgctggagccaccaacataaaaataaaaatataccctagggttagctgccgggggttgaagggttaagggtcaacatcaaaaacggattggaaatgagttaccgttcgcaaaaggttgctttcgggcaatcatgctgacgtcttgctgctgattatgcgttgtttacttgatcgttgccaccacacacatgtcacttcacttgatcgctacgtggcatttgtcatccgctgtgcgatataatactccttcgctctcgatcaacactcgtggatttcccccgagtttacctcgtatcctgatacgtggccgtgctcaactgccagtgtcaacgccgtgctgccgtcatccgccatcaagtcgacctttgcgcctggaagcagaagggaactcgccgaatcaacatggtcgttggcggtcacgtgcattagtggtgtttcgctctctcggtccgggaaatcgacgtcggcgttcgctttgattagaagtccgaccgcttgctgcttctccttcgctgcagcgatccccagggcagttcccccttcttcagtggcgagatttgccttggcacctgcgtcgataaatacctccatcacctccaagtgtccctttgcggtcgcttccatgagcggcggccggtctttcgccaactcatgatccagaatagcgccgtgcttgatgaggataccggcggcctccaggataccacgttcagcagcgatccagagtgtcgcggtgttctcagtagtgaccgcgtgcactgtgtcggaggtttcagccagtacgaacttcatgaactcgacgtgtccactgtacgtagcagccacaagtggagtgaatccctcggagttactggcactcacggtcggcgccacgtttgagcagtagacgggcaactcgcacgcagttgttgtaggccgcgaagtgcatggcagtacaaccgtccgaggatctgatggcaatgtccgcgccgtgttggagcagcagcttcacgatgcggagattgtccagtcgcgtcgcttccaccagcgccgtgtggccgtcggcgttcagagcgtctacgtcagcgccacgcctcaccgcccgctcgacgtcctgccagtagccagccacggccgcagcgacgagagccatgtcgttcacaaatgattggaccaccagaatcgatcaaacggcggtcacgataaagaagcttgaattaatcgggagattgaagcacagctaaattaaaaccaagacgaaagcgtcaatgtcgcttttcgcacaagcaataatgctggagaatcaaccagctatcgcctagcaacccgagggcactaaacgacactaatgttgcgtgccttgtgtcggatatcttcgatttttcgttcgtttgcgaccggtcgataaagtgaagccgtgaagggtcaggagatgctgccgctggctccttggcggactctctgcttgccctgacgagctcccagcggggacaggttgcgaacgaaaaatcgaagatacccgacgcaaggcacacaacaaggcgcgagtgcgatcgtctgaaagtaagaagctcttcagcttattttgtgccgtttgatcgacgcacgcaagcaagcatgcacgatagagtctatcatgggtggagtgacggaaccgaaccttgcatctgtgttgactcgaacgctgcgggaactggaacgatctttggatcgatcatagatgaacaacttgtcttgctcttcgtattgctacctgcaaatccttcacgacgaccacccaccggctcttcattctcatttttcgccatgagcggcaagcgcacaaaggtggacccgctatataagaagaccaagcgccaacgctccgacgtcggccaacacaaagcacgaaataagaacactgagtgcagtgttgtaaagtgctcactgaagtcgttttgtcaggagagcgcgagcgtgttgccgtgggacagcgtgctcaaggacacaaacaaggcagtggcggaagcatacattctcgcaaacctgcgcgttgttcgtctttgtcaagcgggtcgacctattccagttctggaccaagagttctactaccagtatctgtcagccgtaagtgtgggtttgacagctcggaagaaggttgatgacgaagatctccggcagtctgttgaactgtacaagtcgtggcgtgatcccaacgtgtcgttcgctagcagtgctcacatcagttatggatggttccaaaacgcaagctcacagatggcaactaacgcttccaaccacgtcatcgtgaacttctatcgtcgttttcagaagtacgtaagcaacgcgttggcatcactggcaaagagcgctacgaactactgcgaaacgtgttagcgccaacgtacgcaggcagtgacgagcgtgtgctggagttccgtcgctggattccccgcaacgctgaaggatacatcaaccaggagaagccacacttgatcctcccggtgacgtatcgattcctccagttcatcgaacaagagaactaccgcaagcgtgaggggccgagatatgagcagctgcgatcgttctgtcttctcccgttgaagcgcggttttgagtgttcgcacttcaagatgtgcaagcttggtttgtacgctcttttgagacgagcagggatccagatcccagatatcaaacgaaaggaaggacaaccttgctggaatgacgtcgtagacgagtggtggcacaggctcttcaagattacaaagtttgaaacggagaaccgcaagtttgctggcgaaatctcgacggacgggaaggctgtgagcatcgtgctgcggaagccgaaccagagaagtcaccgagtttgaagaaggacccgatgcaatacaactttggcgaagtgtggggtctggatcctggtcgatgtgacctcttcgtggcgacgaacacctttgatgaaacgatcccatgctcaacacgagagttctatgaagatgcaaagtacacgtcgagcagcaagacgactcgctagtgggctgatcacaacctgaagatattggaagcgatccgcaacatgccttcaccgaagacttgctctcttcagaagttggaagcgtatgtgaggttcttgagtccacgactcgaccgcttgctggactttcgcatggcgaagccgtttcggaaactcaagttcagacgatacatcttcatgaaaaacaagcttcgagagctgtgtgcgaaattgactgcgagagctggagcgaacactctcgttgggtttgggaactggagtgcaaccgactacggaggcttcatcaagaagtgcccagcaggtccagtcaagaaactggagaaagagttgaagcgctactgcgtcgtcgaatccgttccagagtttcgtacaagcaaactacacgcggactgccatcgagagctgacgtatcagtatgctctgcgcacgtgcaaggacggcatcgttcgtcgcgtcaaggtttacagtgtactccattgtccacacaatggctgctttggtatgactgtgaatcgcgaccagaacgcgtccaagaacatcctcctcctgactctgcctcattttctgggtcaagaccgacacccagcgttttgtcgacagggaacgtagtgtaggatatagtgtcgtttgatgccctcgggttgctaggcggtagctggttgattctccagcattattgcttgagcgagaagcgacatggacgcttttcgtcttggctgtaatatagtacatttgccacgttaccagcaagaatcgaaaattacatgatcgtagccaggggggtacatcgtaacccagtttcccgtccgccaaaggccggagcatattggatccgttccctcggccgtgatggagaacccgtcgttggagcgcacgttccgcggccacaagtcggcggtgacgggcgtgagcttccacccgaatgtgcagcaggtggcgtcgtcgtctctggacggcgtggtgatgatctggaacttcaagccacagctgcgagccttccgcttccgcggtcacagcggacccgtccacgccgtgagcttctcgccgacgggggacgtgttggcgtccgcgtcgcaggaccgcaccgtgcggctctggacgcccacggtccgcggcgattcggtggtcattaaggctcacgcgggcgccgtacgcagcgtgagcttctcgtcctcgggtcgggagctgctcacggcgtcggacgacatggcgctcaaggtgtgggcgttgcccactcgccgcttccgctgctcgcttacaggtcacagcaactgggtacgcagcgcaaggttcagtgccgacgcgcgacgtatcgcgtcagggagcgacgataagaccgtgaagctctgggacaccgaagcgcgtcgctgtctgcacacgttctatgaacacgcaggcatcgtgaacagcgtcgcgttccacccgacggacaatggcaacaccctggcgtcatgcagctacgatcggagtgtgaatctgtgggatacacgggcgggacggctggtgcaccactacaaggcacacgacgctagcgccacaagcgtggcgttccatccgacaggcaactacctgctctccacgtcgcacgacaactccatcaagctctgggacgtgcgtgaaggccaagtgttgtacacgctacaaggtcacgatggcgccgtgaactgcgctgagttctcatctgactgcaagctgctggcttcgggagcagtggactcgtgtgtcctgatctgggaggccgatctggacaagtgtctgcagatagatcgccctccaccgcaggtcgaagcgacttcggcagtggatgagcagcgtcgaaatggcagaagcaaggaggagagcgtcgactcttccgctagcagtcaggtggatacgggccgacgaccagcagcggagaccccggcggcttctccgcccccgacgcccacggctacgccattgccgacgccgcagcagaagcctcgacacccatacgcggcgtctaagtatgagatgcgacctacgcctacgatctccccgatgaaatcgccatctcccagtgcatcagccgcgcagccgcctccagctccgcttcaaatgccgacgacgcctgggagcgaaccaagatcgacttcaagtcgagaggggacaccgacgagtcgcgtgaatggggagcggtactcgatggatatgaacaccacgctgcagcacattgtcggccagctggagatcatcactcgcacgctgtcggtgctcgagcggcgaatctccatcaacgaggaccggatctgcgatatggccaaggcccagaaggagctgctcgagcgtcagaagcagcagtctgcacggcgacctgacctgtgaaaggagaactgagctcaccaatatcttacccgcagattggggtcatgcagcaaccttgcgtgccatcagagctccttcacattgcatgactcgccttgccagtgttgtccgttcttgaagacttgctccagttgaatgtcgagtgtattttcactgtcttggtcgctttcttgagtcaaagccgagcgctcctaccgcgtcaccttctatctgcaaaacgaaagcagccaccaccaatgtatccgccaatgtatcctccatacgagttcaggaactgacctcaacgcaaaagctgcttcacgctttggcaaagtcgcttcgcgtcccccaacgcaagtctaaagcgtggccgtgttcgtcgaccgtctacttcttcgcggggccaaacagtccgccatcagcatcccaatcggaatccgacgagtcatccgagtccgactccgcggcgcgcattcgagcggcagcactggggatcggcgggtgaacgaccggcgctgcggtagtggccgaggaggacggcgcgctgaacagcgacgtcgatggtgctgtagctgcctgaggtggggcagtcgtgacggacggtgccgcggtcggagtcgccttggctggagcaggcgtcgatgtcggcgcgccgaaaagcccaccgtcgtcgctccagtcatcgctgtcgtcgtccgaagagggcttccgattgatcagcggcctagccggcggggcgctggtcactacaggagctggcgttgggacgggtcgcgcgggtgtcgcaccaaatagtcctccagcatccgactcggcctcgctggaatcgctgagcacgcgggatggtcgagtctgagctggcgggacaactgcaggcttggcggcgacaggcttggctttagctggggcgccgaacagtcctccatcgtcatcatcgtcgctatcgctgtcactaacggtccgtgtgagtacaggcggcggtctcgcggcaactaccggaggttttgccacggccgggggtggagcagacgcactagtcgacttcttcgcgccgaacaagccaccgttgtcgctatcatcgctgtcgtcgctgtcgccctcaccaaatagatcactattcgaagcacgttgagctggctgagagcggggagttaccgccagagctgctgcaggcggcttagtggcaggtttggcgccaaagagacctccatcgtcatcatcagcatcatcgtcactgctatcggaatgcgtgctcgctcgtggagggatccgagctggggtaggaagcatcaccggttgtttcacagccggagcaggtgttttcttcggtgcggcgccaaaaagaccgccgtcctcgtcgtcctcgctgctgtcgtccgagaaattgagacgctgcgagcgctgtggaggtggtagcactggaacacccgctggagccttcttcgtatccgctttgacgttagattcacgaccaaagagaccgctcacagttgactcagcctcgctgtcgctcgcggaaaagtagcttttcttcgattcgagcgcaggaggcgggttcgaagtggtttcgcccatgggcggcaagcggaaaccttgcggaggcgcttgggtggtgggcgtcttgggctccttcgagctgccaaacaacccgccgccctcttccgacgatgacgagtccaaggaatctgatcgtcgtggtgtcaaccgcttgctgctgccacgccgctttggggtactgctactgccaccgaacaggtcgtcgctggtcgaggactcctcagcaaagagagacggtcgctgcttcggttcgtccacttcgtcggtagcgaacacgcgcggcttcgtattggtggtgggtgccgagccaaacaaaccggcgtcactctcttcgtccgagctgtcgaagaactggttcttccttgctggggtcggcgcagcaaaaggtggcggcgcttcatgttctcggcgactcgctgcgctctgtttgcgcttgggcgtcttagcaccatcatcatcgccgctagtccactcgctatcgtcactctcttcctcgtcgtcatcatcgaaaacggggcgacggcgagagcttcgagacgacgaagctctgggcagcgacggaggtgcttcggccacaggcggacgaccgaacagtccgctagtgtcactctcatccgaatcagcacgtcggcgcggaggtggcgcagcgactgacgaatcatccgactcttcagaactggaacgatgacgcgcagccccgcgcttccgacttttcggcgcaggcgacgcatccgaagaagacgccgactcggaatcagagtccgagctgctgtatgaagaggcgtactccgagccactatcgctgtccgagtcatcgtcctccggagcagcacccaatcccagcgtctcgtcctccaggaactcgcgcgtaccgatgataaacggcaacggccgctcgttgtagatatccaataccgtgtcgaactgtgaggacgtctcgctcttgccgtcctcatcctcgtcgtccatcatggcgaacagtttcatagcctccaagcccatgtccagcgcggagcggtacttggtcacaatggactcagcggctgccttcgttcctccgtcctgcgccgcttctgctggcgcgtctcccgcggcctccgcagcctccacgccggtcttgtccgtttccttattgtctgttgtcggctgcgaggtctcaacgccgaagaaatcctcctgctcctcgtcgtacacgcgattctcgatgaactggttgttcgagagcatcaggaactggttgaaggtgtttttcagccgcacatgagccgaatcggcctcggccgcgatgtcccgcacgctgttctccaagtccttcgtgcgtgcgaacaagtcgttcgagtacttcttcaggaacgcatgcagatcgtggtccgagtgcaacgtccagttgggtacttcttgagccaagtccgacagcgtcttcgcctccggagccttcggcaggcccgtttcctccgcgggttcggcctgcgcgccatctacggacggaggaggcggcgggggagcgaccaccaacgcgccctcgccaccgggggcggcctccagcgccagcatctccgccatcgtccttcgctctgattactgggctttccttctgatcgtgagattgaagagggggaatgcttctggaaatttagagctagaaacgcgtttctaacgacaacgtgtgcgtgcattcggaaccaggtttacccttgattgagtgacttcatgagttcccattcatttgtagcacacatactttatcgttgcaacaggcgtttcccttggctttactgaccggcacacgacagcaaagtgtcgcagggaaggttaatggatatttctaacgtccatccacacgcaacgcgaaattgaagtcactttccatttcgcccgcggagcatcaaggcaagttgaagagggaggaggaaggacgagatggagccgcgtcgccccaagcacaagcaggcgccgccgctggaggtaccgcaagcagagctggagcgcgcgctgcgtgacccgaaggcgtacgtcttctcgaactcgaatgcggagcgcgcggcgttcccgcgcggggtgcccgccacaaatgaggacggcatcccagtgatccacacacacatgtcgatggtgttcttgctgcctgagcgcgtatacaaggtgaagaagcaggtggatttcgggttcgcagacttctcgacgctgtaccagcggtttcaagcttgctttgctgaggtgcaactgaatcagcgcctcgcgcccgaggtgtactgtggcgtggtgcccatttcgatgaaacgagacacgcgcgagatctgcgtgcgctgcgacgacttctggacgcttgagaagagtaacaacttggactattggcttaatgacgagttcggagagattatcgagtgggccgtgcacatggtgcggttgcccgacgagtgcacgctgctgcatcgtatggatcagggcgagttgacgcagcccatgctgactcaagtcgccgagaagctggtgaatttccatgccaatgcgcgtcgaggaccctgcctcgaccaatttggtcaagaaaacatgattcgccgcaatattgagcagaatttccaacaaactgaggcacacgtgggtgtgacagtcagcgaaccggtgtacaaccgtgtgagggagttgacgtacgcacgcttgaagcagctgaagcccacgttagtctctcgtgtagagaacggttatatctgcgacagccatggggatctgcgacttgagcatgtatacatgctgccgggcaaatcgaccgcaggcaaagagacggcgcgcttcgtcattttggactgcatcgagttcaacgagcagttccgcttcggagatccgctgtctgacgtagctttcttgatgatggatatctggcgaaagggccgtccggaccttgcgcggttcttgcaaagccaataccttctcaaggcggttcaagacagcccagagaatgccagcctgtttgcattctatgcagcataccgcgcagtggtgcgggccaaagtgagcggctttcgtgtgatggacaccactttgtcgacagcgcagcgcgcatccgaggcccaacgctcgcgctgttattggctggtggcactggaatttttgagcccgcctccgcagcgaccctgcatgcttctcattggcggcctcccagcaagcggtaaatccaacctggcgcgaatgctggcaggtgatgacagctccacgatttggctgcgtgccgatgcaattcgcaaagaacttatgaagcagcaaaaggcagctgcgagcgagacagaagatggttcgctggttaagggcggagggagcttcgaggaagggctgtactcgcctgaaatgactcagcgcacgtatgacgagatcttggcccgaagtgttgagcacttgcgtcagggcgggcgggtgattgttgatgccacatttcgtgacccgcttcagcgacagaaattcgtcgcagcggcacatagtgaaggtgcactctttgcgttcatcatatgtgagtgcaaccgcgagattatcaaaggccggctgttggctcggaaggacgacgtctcggacgccacctgggaagtttacgaaagcatggagaaggagtggcacttcccggaatgcagcacgatggcagagtgcagcgttgtgaacacggagaaggagcaagagttgacactgcgtcgtgtgcaggtattcttgcgcaagatcgggttgctctaactggtgcgaagtaagcggtgctgaagctcgagcgtatcttgagacgacgacgatggagtagctggctagtacggagctttgcagacaatactgcacgtagtacgcgctgacgctggcatgttgctggtgaaactcggcagattgaagatggagggagatacagctcatgacaggatcgacaattgaaggtgcttgctttattttttttgtttttttattttctgtgccacattcggcgggagatttgacggaaagcccttccattacgacgtctgctgttctggtgctgaaggaggcgacaccatggactgcggcgcgattggctgttgcttgcaaacgcatggctgctccgaacgcccgccacaatagcagcacttggtaagcactttggagccgaaggtggtccgccagtggggcggccacgtcgtctcgatcgacgcacgcgcgcacaagcgcacatagaacatggccagtcgaggatacaggccatcgagctgcaagccacaccggacagcgtacgcgatgttggtgaagagcgtgaaatcgcataaatacggcgtgtccgggtccacgaggaactggtggccgttcaagtacgcctcccacagactcagctcgttctccacggacgcccatttggcgtccaccaaggccggattgcgcttcccttgtgggaatcgacgcagatacaccaccaagtcgcccacggcggacaggatctcgttcgcctcgtgcagtcgcgactgtgccaccgcgtacaatgctggcgactctggcatacaaggcatcagcgggtacttcttctccagatactcgagaatggcgcccgactcatacacaatggtgcggtactgggctgcgtccggcgtcaagaggcgcgagatgcccattgccgccgctgccactgcgtctttcgtcgccttagcagcatcgctatctccctcggagaccatcggcagctctgccggctccaccagcacagggatgcgcatccgcgggttgagcgcacggaagaacggtgtcttcaacacgccgctcgagaaactgacacatacgctgcggtacggcagctgtttctcctccagcgcaatcaggatccgccaagctgttcacgcacaaccacacacatgtacgtgaccatcgtcaattcctggaaatgacaggatgacacgcatccatgcagcttttgccgcctgctctgagtgctcagacgcaccctgtggactaccagagccccagtacaccacgcgctcgtgcggcagtggcgccgcgcgcagcagctcctcctccgtggacaccagacgactggcgtccgcttctaccgccgttggttgccgccgccccgcctgcatcatgatctcaggtacgcgctgcttgttctctcgcccttcttcgctcaaatcgggagctgtgggtctgtcgccttgatgcagcgaggatgggtgtggtgtgtgtgcgcgacggagaacaggcgtatgatacgcgtccgattgaagcgtgcgatacgcttgccctgcggaagttgatatctgtgatgacgcgcgtggcgtgacgttatgttggtggtggcattctctcccattttttgacgaaccaaaggcgcagagcgaagggatgcggccaatcagcgtcgcgaacgacgccgaggtggatttcgcggcgaatcttgtgcaatcctttgcgctcgcagtccgtccaagcaacgctgccaatgacgagcatcctgccgcgcaggtgtccgcgcacccatccagcgactcgcatcgatgatctcatccacaataccagaggcttctcaacgctgtccaagctccgccaacgcgaacgttgaatgggttgcagcttcaaagcaatccgtgaagtgaagtgagaggacatgatttcgactttcagacgcatcggccgagtggatactagagtactggtgtcacccatgtccagcatgttcatgcggttgatggggccaactcaaaggtaccatcgcaacctacgttaaaagcacgttatcgctcgctaacggacgttaccagctgcatagtcagctctacattccgccacggagtgccgagttgcaatggcgacgatgcgcagcttcagtcattctccacacgtcgccaccacccacccacatgttcatacgacttcgctggccgtggtggcgctcgcgtcattcccagaggcggcacgactcttgcggattcgctggcgcaaccacaagtcgcgcagctcgcccggag

SEQ ID NO: 92 - DNA, 4085 bp, Klebsormidium sp.
  source 1..4085: mol_type = other DNA
atccgtgaccaacatcaacacgatcgaatgcacgaactacatgaatcctccggctcctcgagtggtggtgagcaagatgataggcaagccgggcgaagcccgctcgttcgactgtgggcccgcgggcctcagcggaatgctcctgaaagcgtcggccgtggtggattccatccaacccatctgcggcacggacctgggcacgaaggacgtcaacgcgtacatcaaaggctacccctggtccaccggtgcttccatcggcggacctaacgcgccccagttcgctcaatggtgtgcagccggcagtcgaccggccggcgacaaggctctcataacatccatctcaggaggcccggcgaacaacggcaaccaccctaatgatctcagcaagttgtcgttcacgtgcaaagactttgcggaaatcgatgccgtgaagaacgatccagagcggacggcggacgtctgcatcgggacggatccgctgacgcccgaactgtccggcgcgatcgactgcaatggttcgatgaagggttactgcaccggtactcgggcctggtccaacaagtgcaacatctacgtcggcaaggttccgacgcaagccgccgatcaagacagagcgaagatggaccactgctcgacgggtcagaactacaagagtcaggtctgtcaagacttttgcctcgccggcggagtcgacatgtacgtccccggcggcccgggaaggcccgccttcaaagatcagtgtaacgtgctctatgcgaacaagtgcaagggggactcttcggacctgtgctcctgcgtcaacaaaccccgtctagaagactggggggcggaccagacgtaccaagcggtgatgagcgccgtgaacggaacggcaggagcgaatcgcaatccccagtgttacttcggaccttgcaaggaaagaggctacaaggccgtcagcttctcgaaagctggatgcccgagctgcttgaacagcatcaccgtctcaggaaccgacggaggagtcgctagcctgggcagtgccgtccagtcctgcctcgccagcgatgcgccggcaccagccgccgctccctctccctccaagagcggcacgtcctccggttcctcggggtcccttcagacgccagcgccctctccacccaaggggtggctgtatgctttgctcatcctcatcgccgtcgtcctcgtcgcagcgctgctcgagtgggtcttcacaggcgacaaacccactccgagacccgcagcttccaccatgaaccatgcgccgacctagccggtcttcgggaaaataatctgatcttctttccgaacggtatgtcggaacccttaccgcgatcgagcgattcgggcgaccagacctcgaatcacaactccgacgctagggctaagaaaccgccaccgagtactcatccgccaaagaagaacatggatgcaggcgttccgcccccgaaacccatcgaacgttccagcagctggttccgttacctcaccggatcttggttctaaaagttgtggaactactccctatgcatttagagtctgcgtaagtctgcgtcccaaagaatgtttgatgtcgagaagcaccgatgggtattgacgtttacgccatttgtccagacacgcttattcagaagagcatggaatccaggatgttagaagagcttggctggacggaacccagaggtccttgctgctgccagctttgcttctcgatcctactcaatccttctcgaaacctatcgaacttcggtcacgtcacaccttattaagaccgaacaacattgctgaggtcaccctgccatcgacgcgcctataaaagcccggattacaaacattctctctcatttccaaagatgctccctccacacaatgttcctcggcttcaaggccgccaaggcccacttcggggtctcctcttgcacactccgaaggtgggccaatgaagccaaggtcgtctccaagcgcaccgctggcaaccacagggtcttcctcgccgccacctcccaagcggaagaaggccgggaacgcctcgcctactgccgtgtcagcagctccaagcagcgcgacgacctgcagcgccagaaggactttctcgctcaccaataccccggacaccgcattgtcacggacgtgggctccggcatcaacttcaagagacccggactgctatcccttctggaacgagtcttgcaaggccgagtatcgcaagtggtggttaccagcaaagaccgcctgtgccgcttcgcgttcgagctccttcaatggatctgcctccgccaagggacacagatcctggttctcgattcaggagacaagtcaccaaacgaggagtgcacagaggacatcctggccatcatgcaagtattcgctggtagatggaacggcaagaggcgctacaagcagggaggcgcgcgcaagcggggctcccccgacggcagttcaggtggctcgggcgtgcccgactgtgtgcaggaagatccgggccttcccgacggcgcagcagcgcaacatactccggaggctggtgggcgggtgcaggaagctgtacaacgaggcggtctccatgatccgggatcgcaggctgccgttcgcgagcgaggcggagttccgggaggccgagcgagagcgagggctccggctcgccgagcggaagcgcaaggccagaagcggccaagaggaggagagcgggcgaggggagggggcgggagcgtacaagggcacgaagcacccgtggctcgacaaggtgtacgtgaagaactttctggtcccggagaagagtgcattcgtgcgggcgaacccgtacctgaaggacgtgcctaaggagacgaggcagcaggcggtggaagacgcgatcgaggcgtgcaaggcggccctgagcaacgtgcgagcgggcaacatcgagcacttcagcctggggttccggaagaagaaggacccgcggtggtcgctggcagtggcgttcaatgcggtttcaggcagcaggttctggccgcgcaagatcaaggagttcgggcagctgcgggtggcggagccagggcacctgaggccccactacgacagggagctgaaggtctccaaagacgagctgggccgctactggatgctggtcctgagtgcgaagggccccgccaggggcacgaacgaggctgcggccagggtggaggcgctggcagagtcgacccgcgagaaccaagcgggggaccggcccgtagctgccatcgaccccggcgtgcggactcggcactcgatctacatgacggacggcagggtggtggacgtaggcgggggagacatcgcccgtgtggtgcggctctgccgccacgtagaccgctgcatctccgcgctgaagaagggagaattctgtgtgtcacggaagcacgtgaggcgtgagcctggtgcgtctactatgcggctgttcgaccactaccgcccggccaagaaggagcagggggcgcatgtcgtcccgctagacgggcgtagcagggagcacattcgggcgaagatgcaccggctgagggcaaaggtacaggcgctgaaggacgaggtagacaatcagacggttgcatacctggtaagggagtgcaaggcggtgctcctcccgccgttcgacacgcatcgcatggcgacgcggctgaatcacaagacggcacgggcgatgatgcagtggaggcacggggcattcaaagccaagctgttggagcgggcagcacggatgggcgtgcaggtgatggtcgttccggaggcgtacacgagcaagacatgtggggcgtgtgggtggctgcacccaagcttgggaggggcgaagacgttccagtgcaggagctgtggagtggagttagaccgggaccacaacggtgcccgtaatatcttcctgagagcaattcggtcttggggagtagatagccccgaatgaacctggcgctgccggggacgagtcggagagatggctcctagtcccagaagtatgaggggcttggtactaggctagaggtaggagatagcacggtacacagaaactgagtaggattacttaagtttcaaccatcggatctgtggcagacggaagtgtagtctgtccatatcat

SEQ ID NO: 93 - DNA, 18004 bp, Klebsormidium sp.
  source 1..18004: mol_type = other DNA
  variation 11581..11600: note = n is any nucleotide
  variation 3787..4166: note = n is any nucleotide
  variation 9044..9095: note = n is any nucleotide
ccggattgatgtggcgattgaagagtttctgggcgtccaccacgaagtacctaggtttctgatctgcactctacacttcaccatcgtttaggcggaaggggtcgaagaaggaaaacttctctactttgtctttcaacggcgaccaggcgtgatcgaacgagccatacgtcccggcaacgacgcgtttcaaccgtggtagcgtgcagagcgactaaaaggtggattctacatggtcaatgccagtccatcgcgagcgctatgttagggaactgctccttcatgatgtccttgatcttcgatgctatctccttgtgctcgcgctgtgagccgttgctactcctgaggtccacgtaatgtatccagtccctcgcgttcatggtcatgtacagcttggtctgcgtggacatgggcaggacgaaacgtgcacactcctttgctatgcctttctccaatgcctgcgaatatgtggcgtacgaatccttccacagcctatcctgctccgccacgaaccaggccttcacgtctggcggcaggtcgtccacggacgactgcctgttcttggggtcctggctcctggcttcgtacaccacgttcgcatcggcctttgcatacctggtgctgaattgctgaaaagtagccgacctgtgcctcaggatctgctctgctatggctctgctggtggttatctcgaccgtcatggaggcggtctcgaagaccgaccagtgacgattcttgatgcaataacgcaacagcttggcaccgctctcgtagttcctctggttctggggattggaaacccgcgcggcgtgcactatgatgtcctccggccctagcccctccagttcgcccgcgcctctgctgagtgccaccagcttcacctcgcaagctgccatctttttatgtggactacaaaaatacaaatccagtgcctaaaccgacacatcactttcgtagcacgttcagaaacatcccgatcatctccccgtgaccctccaaggggtatactccgcctaccgcgtcggtcagtcgccagcaggtgtatatcgccaagtctcggactctggattcgatactcaatctaggtatggcaagagccagctgcgagttcaatctacgcagacgttctccgttatcgtccttgcagagctccatcttggcaatgatctccagcagcacccacacccgatcttccaccgtggactcgggagacagagtcgagaatctcctttggagctcgcccaggacctcggcagtcgtccgaaaccacatccttgtctgacgcaaaaggaaaaaattggatccatgcacccgaagtcgaactttcggacggtatgctcgcagttttcctacgcccgaaaccgaccgcccgagaaatttctttcgggcgccacctttcgcgaaaatatactcgtaggtttttcacgcccgaaaccgaccgcccgagaaatttctttcgggcgccacctttcgcgaaaatattctcgtaggttttctacgcccgaaaccgcccgagaagtttctttcgggcgcttttcaagcagtatgctcgcggtatgcctcaaagcgaaagcccgagaagtacttttcggacggagatcgctctataaaaggaggttcctctcgttctcattctcaaaaacgcacttggcctcccccttcccaacagcttgcaagcaactccctcgcacacagcatccttctgcctatctgccctttcagcagcggcacagcttagccgcttccttctctcccaacagcaccctattctcccacagctcgcttccctttcctccactcaccagccagcagcacctcatactcgcacagctcgcttcctccaacaccagcagcaacgaggccaagtcgcgtcagatagtcacgccggccggccttttgccttgtccttgttttcctttttgctggtctgcgcagacctctcttttcttcttcgtgtctctgcaagcctggccaggctgtcgtgtcatgctgctcttcggcagctcttttttctgccgtgtcttagctgggctcccgcttctttgcggctcccctccactgtctttgtctttcgctggcctctcgggccttgtagctgcctcgtgcagctccttccgagaagtatcaaggtgagcattagtgaagtaggatatcttgaagttactccatgatctgcttctcgtttgctttgcgaaatatttgcatagaaatgttccctctgttgctcttcaaactcgttgtttgcagcatcctcgcatcgactacctcctgaggctccgctcgcatccgctagctggcctctcggcccttgcagctgccttgtgccgctccacacctatcaatcagataagttccctctcttgctctccaaacttctgatgtttgcagcatcctgcctccttgagtaggctccgctcgcacccgtcgggcagggtgccgataagagcgagcatttgcggctctgtgggtagtgccgtttgtccacggtacgcataccactctgcctgtaggctccgctcgcacccgtcgggcagggtgccgataagagcgagcatttgcggctctgtgggtagtgccgtttgtccacggtacgcataccactctgccttttcactccgtctgacgatgtcgaaaagctgtccgagctactgatcacttttacgctccactcacaggtcctgatcatcgagccttttgacgagcggacgcgactggagatcactaccctgtgcctcgtctacgatcaggggctcgacacaccatctatggtccagatttgaatcaaacggaggcaagtctcgactgagtcttcgaatgcattcgctgctgagtcatatgcacagggcgtttcgttccttcgtagcagcaatgacaaaatcccccctgccgcctttgtcttaagagtaacatgtttctttttcttcttacaggatatcgctcgccgcatggaggagtcttcgtttgcactctgagtcctttttctgggcgtgtgctttctatgtgacgtgattctgggttcttttctgggcgtatggaatgatttttctgtgacttttcttcgacttcttggctgtcagtctgtctttctgtctctgtcgagtcggtcggtcggtcaagtccagtcgagtcggtcggtcggtcaagtccagtcgagtcgagtcggtcggtccgtcgagtccagtcctgtcccgtcggtcagtcccaccagctatacacaccctacactagacaccctacactatacacacccctcaccctcttacccactccaaataccctactgccttacccttccctcccacacaccctacttcttaaccctttcctcccacataccctactgcccttacctattcctcacaccctaatactacccttacctatccctcacaccctatactaaccttacctccctcacaccctatactacccttacatatccctcacaccctatacttacccttacctatccctcaaacacacccgcagtagaaccacagatggctgctgcgacccgcagctggggttcgattccccatgtggttggacgacgttgcacatcgaattattgccggttgagattactggttgtgaatacgtttcttagtatacttttctctctacatcatgaagacaacaaccagcaaccagcaaggttggggaacttaagggagttcagagatcgatctgtccaatctagaaagatcagatcgatcaccccttttcttagggtcattgaaaaatggaccggttgccggttgctggatggtgacgtggcacatcgaaaagnnnnnnnnnnnnnnnnnnnnnnnnnnnnnnnnnnnnnnnnnnnnnnnnnnnnnnnnnnnnnnnnnnnnnnnnnnnnnnnnnnnnnnnnnnnnnnnnnnnnnnnnnnnnnnnnnnnnnnnnnnnnnnnnnnnnnnnnnnnnnnnnnnnnnnnnnnnnnnnnnnnnnnnnnnnnnnnnnnnnnnnnnnnnnnnnnnnnnnnnnnnnnnnnnnnnnnnnnnnnnnnnnnnnnnnnnnnnnnnnnnnnnnnnnnnnnnnnnnnnnnnnnnnnnnnnnnnnnnnnnnnnnnnnnnnnnnnnnnnnnnnnnnnnnnnnnnnnnnnnnnnnnnnnnnnnnnnnnnnnnnnnnnnnnnnnnnnnnnnnnnnnnnnnnnnnnnnnnnnnagagatcgatctgtccaatctagaaagatcagatcgatcaccccttttcttagggcctctgaaaattgatccggttgccggttgctgggtggtgacgtggcacatcgaattattgccctgacatgcggtgggatgccctgttcctcagggcactggcgttcctcctctgaaggcgcccagagaacaaagtctccctcgttctcgtaatgatcatcgaatccttcgcttcgatgtacgccgatcgggtccatgggcgcgatataggaaggtcgcacgaaaagtgacgggtacgcggatatggaccctagattgcacatcctgtcggtcggcgaagagcgcatcgtcgctacttgtctcgcggacgtcagagacaggaccaactccctagccgctcctctgatcaggagtctcagtgacagaacgtgcacggccagggccgtagagttccgcgactacatgttcgacaagcagtctctggaggccttgagcgagtacctctccacatctacgaagctggaaaggatagtctttgggaacggctgtgcttccgagatatgcatggccggggccagcttgtctagagtgatcggtgcgtgcgacagggatgtcttcatagagggctccttgccgcgggcgatgggccacgtgagcgtcatccaggcggccgaccctaccgggcagcgattgcgacgggctctgctctccttcgagccggagcactgggcgtacgactggtcttccgactcggagacgctgggtctcatgccttccgtcaccaacggagacttcgtctggactcgactacatccggatggcatcctgaccttgaacgtcacggacgaggatatgctacaagtggagtggagcgtttgcgcgaacgagctcaagagcacggcgctacactctgcagacgacgtcgcctcattcgccagggctcctcgcactttcggctccctagagagcttgacggtctcctcgtgcggatccaagggactcacttacttcggacggcacctagcggcggagacgcgcgtgagacgcatccgttcggagggtccgttggcggactcggtggctctgttgaagggattcgaggaagggctcgtcgaggggagaccctatgaggccgagtgcacgtcgcatctcgctcatgacggattgggcgtgaggctccgcaggctggagaatctgtgcttcctcaggtgctaccgtctgactctgcacgtccgagtagacggttgcaacggtttcgagaggaggcgcttcgacgagaccatgacgttcctgctcgggtggttcccgaagctggaggccctggaggtggacatcggcggagactctatgggcggcccttaccaagggtgcgtccccatagggcgcttcgcagctgcggtgccgcggacgttgaaggagctgcggctcgctttcggtggggcgtccacgctcttctgtgccgcgagtcggctccacgagttcttagaggcagctcgatgccggttgcggtatctcagcatcgagggctgggcagccggagcggaggccctatccagagtggtacggatcgagggtctcgagcgactttgcatacctcaggcttgcacctccgtagcaggcttgaggaacgctttacggagacggatgagagagctcgacgtgggaatctcgctgctgggcaggagggatatagcagagttcgctcgcctcgtccagagcttcgccagacccacccgtccgagcaagctgctgttgcggaacggcgtccgaagcgagatgatgggggagctaggacgagctctgagggcagcaggatgcttcgactacgtctacacgtctgccgatgagaagacgatcacgatctggctcgctctgcccgaggaagaaaaagattgccaatgacagtaggaagatgcatctcttctctacttctaccgtcttggtcgtagcccgcgttctcttgttcgcatgcgtcaccggaggggtcatgtggtggttctacctgaaggaggagaaaaggaccaagcgccctgtaggagtggtaggatcgtgcgatacggagagagtcgtgcagccccaggaatcggaaaagactccggagttgcaggatataccccctggtcacgaaaaatacgctaatgtattcgagaagcatgccgagaggttcgacgatgcatacgataagatccgggaggagacactctgcctggccaagaggaggcggcagtattccatcatgttggacgcttcgtccaggtgcatgcgttgcctctacaatattcgcatgtggatgcacaacgacctcgccatggaggaacgcatgcgcaccttcgagctcatatgcgacgactacttcgccagatgcctcaggcatgcgtatgatcgttcgtacactcctgccgacgagacgctgatcccgcggcgttggaataggaggtggtcggatccatctccgagcgtcgcgtgaaagaaatattctgagttgagatacggatctggtctataccgtccgagatgctgcgttggcatactgctgcgttggcgtgctgcgttggcgtgctgcgttggcatatattgctgcagcttctgcagcattgactagaaaacacggcctataaagaaggcattaggcaccatgtgcgtctcattctaaatctttcttctcgacatgtacagtagctttcggagagctaaggaccattttggcgtctcctctagcaccccgcgtagatgggctaatgaaggaaagatcgccaccaagcgcaccgcaggcaaccaccgcgtcttctccatccccagcctcgaagagaaagaaactcgggcatgcatcgcctactgtagggtcagctcctccaagcagcgcgacgacctgcagcgacagaggaggtttctatctgaccaactccccagacacgagagtgtctcggacgtgggctcggggatcaacttcgagagaccaggactgctatccattctggaacgagtcctacagggcagagtatcggaggtggtggttgccagcaaggacagactgtgccgtttcgcattcgagctcgtggcctggatattcgaacgtcaagggacacggatcgtggttctcgatacgcgagataagtcaccgagcgaggagttcacagaggacatcctggccatcatgcaagtattctcttgtcgatggaacgggaagaggcgctacaggggtccacaagagcgggggcgcgataaaagaagcggaggtggctctagcattcccctcgaggtgcaggaagataagggccttcccgacgggacatcagcggctaatcctgaggaagatggtgggagggtgccggaaactgtataacgagacggtggccatgatccgggacaggcgtctcccgtttgcgaacgtagaagcattcgaggaggcagagcgacggcggaagaccaggcttgaggatagaaaaaggaagaaggcggaggatgatggctccgagttcgaagaggtgcactacaaggggacgagtcacccttggatggacaaggtgtacgtcaagaactttctggtgcccgaggacagcgacttcatgaaagcgaacccctacctgaaagagatacccaaggagaccagacagcaggcggtggaggatgccattgaggcgtacaaggctgccttcagcaacatggcagtggggaacatcagcaactttgaggtgggcttcaggaagaagaaagacccgcgttggtctatcgcggtcgccttcaatgcggtttcggggagcaggttctggccacgcaaggtcaaggatttcggagagctggtcgtggcggagccacggcacctgaggaagcgctacgggcgggagctgaagatctcgaaggatcagctcgggcgctactggatggtcatcatgaacgacaaaggacccaaggctacgacggaagaggcggcgaagggcgtcgaagagctgcgcgagtcgacccgcgagaaccaagcgggcgacaagccggtggctgccatcgacccggggattcggactcgacacaccatctacatgacggacgggcggctcgtggaagtggaaaatcaggacatacagaggatcgtgcgtctctgtcggcacgtggacaggtgcatatcggctctgagcaagggagagctcgcggtgtccaagaagcacctgaagaggaacccgaaagcatccgtgatggccctcttcgaccactatcggccttcgaagaaagtccagggccagcatgttgtgcgtctgagtggcgaggacaagaacaggatacgacagaagatgcaccaactgaaggcgaagatagagagcttgaagaacgagatagacgaccagacggtggcctacctgcttcgcgaatgcaagacggtcctgttgcccccattcgacatgcactccatgtccacaaggctgcaccacaagacggcgagggccatgatgcagtggagacacgggacgttcaagaccaagctcgtggaaagagctcccggccggggggtgcgggtcatgatagtgtcggaggcatacaccagcaagacctgcggggcgtgcgggtggctgcatcccagtctgggtgggagcaagctatacgtctgtcgaaggtgtggggtagagatggacagggaccacaacggtgcccggaacatattcctgagagcgattaggtcagaatgagccccatatgaacccggcgtgccgggggatgggtcggagagatagctcctagtctcagaaggtttgagagacttggcaccaggcgagaggtaggagatcgtacggtgcacagagacttgagcaggattgcttaggtttcaactatcggcggcgatactcaaccatgttgaacgcttcctctagatgcatgcgttgcctgtacaacatnnnnnnnnnnnnnnnnnnnnnnnnnnnnnnnnnnnnnnnnnnnnnnnnnnnnctcagacaagaccaagcccgcctgggtggacgccggggtcgcgcacgacttctccgagttcgccgtctccgggaagaacctctgcggcatcaaccccgggcagggcacaaggtcttctgcaccgccgactggaccgcggcagcgcccgtcttcaaaccgctgcagggagacggcatgctccgcaacctgtccctctcgggaacgagcctgtgcggagcggacgcccgtcccggcgtagacaacatcttctgcagcaacgacttcatttcgaaaccattgactcaagtacaaggcagcggcaacgtgaccgctcaggggaagggcaggctctgcgtcgtggccaaggaccaacgagtgttctgtaccgactctatcgtccaaaaccccgtctggaccaagagaggggacctcgccatagacctcgccatgaacgagtcgggcgggatatgtgctttgaaccccgacgggaccatcttttgccagccggacctgacgtcggggaaatgggtggccacgaacgtcgccgaaaagaagaacgtgaacctcgccacgaatattcatgggacgaagctctgcatcttcaacagcgataaggcccccgcttactgccatgacaacgtctttgcaggcgacaaggcgggttggtatgggttggcagctgctggacaacggttcgggttggaaaaagtgtaggccctcatgccgtcagagctggcgcgggtgctggaacgtgggtagtgggttcgagcgtgcgatcgacccagagagggttgagcccggctaggactcctcccagtagagggccgacgatgaagacccagatgtgagtccattgtttccgatcgttgctcccggatgcgaccgccgttccgagggatctcgcgacgtttatagagcagccgtctaagggaaggagtgccagatgacagaccaggaccgcgccaccgatagcgatgggagcgtgtccgtacaacttggtagcggcgtaggaagtgttgagcacgaccgttacgaggaaagccgtcgccagtatctccgccaacagggcttgccacagggcgtgtccatctaggacgtgattgactcctttgccgcccgcgtcgtagaggtcccaattgctcacgagcctcgcgtagcaggcgccgcatatcgcccctatgacctgggcgacgatatacaacgcagccttctctatagatatcatcctctgcaacaagaaagccagagtcacgctcggattcaagtgagctcccgagatggagccgaaagcgtacgctaaggtccctatagtgcctccaaatacggaagcgacacccagaggcgcgagaatgctgccgttatcatagatagggagagcggggtaattcgtgagagacagtgtgatgatgaagaggaaaatgccacttccgacgaactcggccgctaccgccttgtacatgatggcgaccgatacctgataaactacaagcgagaatattatgccggccatacgcccgaggccgcggcaggcatcgttcgccggcttagggcaagcaggcctccccttgccggtgctataggattgcggtcgatgcacatggtgcgtttcgcgaatatcttcgcggtaagatatatcgagtatcgagtaccttttgatggacgaagcgaggatccaacggaacatagaggaggcgataacgctcttgagacgtggcctctctggggacgacatcctcgcgatcttccaggcccgaaacgaaggtcgcggacccacgtacgctctgcaccccgaggcttgggccaccgtgatgcggcgtgcgaagcggagagcttctcgcctagatcccatccccgtcccgactgcagctcctgcagggccgagtgagctatttcagctggacgaagcgaggatccaacggaataccgaagaggctataacgctcttgagacgtggtctctctagggacgacatcttcgcgatcttccaggcccgaaacgaaggtcgcggacccacgtacgctctgcaccccgaagtctgggccaccgtcatgaggcgtgcgaagcggcgagcttctcgcttaggtcccatccccgccccgactgcagctcccgtccctccacgacctgtaccgagaccatttgtacctcccgtctctccacgacctgtaccgagaccacaggtacctcccgtccctccacgacctataccgagaccacaagtacctcccgtccctccgcgacctgtaccgagaccacaggtacatcccgtccctcagcgacctacaccgagacctcccgtagctcccaaccaggatcagaatagaccagctaccctgttcgactgccacgacgtccctggtgatgggaattgcttttactcggccgtcgcggtcgcgttggcaaacaggccgcttcctctacctcaactacgagagagggctatgcagttgcgcaacgccggcctcgaatactttgataggttccaagaggcgctcttcgtcaatgcnnnnnnnnnnnnnnnnnnnngtgatgcggcgtgcgaagcggcgagcttctcgcctagatcccatccccgtcccgactgcagctcctccacaggcaaagccgactgagctatttcagctggacgaagcaaagatccaacggaacaccgaagaggctataacgcttttgagacgtggtctctctagggacgacatcctcgcgatcttccaggcccgaaacgaaggtcgcggacccacatacgctctgcaccccgaagtctgggccaccgtcatgaggcgtgcgaagcggcgagcttctcgcttaggtcccatccccgccccgactgcagctcccgtccctccacgaccgataccgagaccatttgtacctcccgtctctccacgacatataccaagaccacaggtacctcccgtccctccacgacctgtaccgagaccatttgtacctcccgtctctccacgacatataccgagaccacaggtacctcccgtccctccacgacctatgccgagaccacaggtacctcccgtccctccacgacctatgccgagaccacaggtacctcccgtccctccgcgacctataccgagacctcccgtagctcccaaccaggatcagaatagaccagctatcttgttcgattgtcacgacgtccctggtgatggggattgcttttactcggccgtcgcggtcgcgttggcaaacaggccgcttcctctacctcaactgcgagagagggctatgcagttgcgcaacgccggtctcgaatactttgataggttccaagaggcgctcttcgtcaatatttttggtctgccctctggtgacagaaaccgagtgcgtcgcggacgacgcgctaccttcatgtatccgcaatgggcgaaccacgtccagatagaatgtgtcgcccgcgctatgcggtgtcggatacgcgtgttcggcatgtggcccgatgtatatagtctcgccgtaagactcgcagaacctttgacgctggaacaactggacctcctgtgctcgacggtagacgatgggcaactacggaggcggagaagtcattacgtaaacgatgatccgaacaactacgacagaaccatttcattgataaactggacggacacacactttggagttgtcttgccacacgtgaggggcaggccgaggcaacgtgtgagtgctagcgggaatataccccctgcgaatgtcagttatggagaggctctgcaggtgacacaaaggctcgctggacgcgaggcgatactcgtgagggagaggcgggagagagcggaccgagaaagacagatgaggggcaggagtgcggcaggagtacggcagagtgctacggtcagtgccaggtatgcgaacacgagtagcaacgaggctctggcactcgccttacaggagttggaattctcagaagattgactctttttcttctgatcgaatcgtaggataggatgaccacggccaccatcaagacgaggaaactgctcgtagatagcccggacgcggatgactttctgatcgtctccaacggtgtgcaactggtgacgaacgtgctcgtagacgggtccctctccgcgtcggtccccgtgatgaccttgcaagcaggaacgattcagtgcttcggcagcaacggcgacgcctggttcctctcgcgtgcggcggacgggacggtctcgctcgggcagaacgtagcggggtctcgccgtgcactggcatcgctcgcgtgctcagtggacgacggtgcatctggattgggaacgttgagcgtcaggtctctacagaatgtcgaccaggccggtcgttacccatttcggacgcgcattgacaccgacaagagtctggtgacgcagtgctccaccgacggcacggcttggacgacgatacggagagatgctgcttccatcgctacctttgcgcaatccatcctccccgcatcgggcaatctcaacgtggggaccggcagcaaccgctggcttggactgtatgcttccaacgtagatgcggatacgatcgcatgtggggccgcgacgttctcgtgtaatctatcggtttcgggcgatgcttcggtcggggggtcgttgcaggcgagcagtgccgtggtgggagggagtttagcggtgacgggtcccgtcgctctatcgaacgctctgacgggcacctctgcgacgttttctagcaacgtgaccatcgctggatcgttctcatattccaacctcgcactcagtgggagtttatccgtggctggtctcactactatttcaaacactctgagagccacttcggcgacgttctccagtaatgtgaccgtgtctggaacttctactctctcgagcgatgcgaacatcagaggagcccttgctgtgaccgggccactcactctttccagcgccctttggggaaattcggcgtctttctcaggtaatctaagcgtttctggagctacgactctctccagcaatactacggtgggaggaagcttggcagtaaccggccccgtgactctgtccagcacgctaggaggcacttctgcgactctctctagcaacctgaccgtctctggatctacgactgtatcgggcgctctgggcggaacaacagcagctttttccagcaacctcagcgtctctggagttacgacgctatcgggcgctctgggaggcagctctgctaccttttcgagcaatctgaccgtctctggtacttttactctctccagcaatgcgacggtaggcggaagcttgtatgtcagcgggcccgtcaccctctctagtaccctgggagccacgtcggctactttttccagcaacatgagcgtcgccgaaataacctctggaaccctatcagcgagcggaccggtcactctctacaacaccctcggagccacctccgccacgttttcgaacaacgtgtcgattggcggcaccctgtcggtagcgagcaatctggcggtcaccggccccgccacctttgcatccaacatcaccatctcaaacaccgatccgatcaactctcacaagacgtgggcctcttggaccccatcttctgattctaacgcgacgttaacgactttcttcgcgagatacacgtcgatcaataagagagtcacggtcgcttactcgctgagtttcactgtcgcgtcgtccgtggccagtaccagcatctccctgcctccaggacattcagttgcgtattcggcacaacgcacgcagatcttcagcaagaacggcgggtcgaacatctacgtgacaagctacgggagtatcaccgttccgaccgcagggactgcgacaggtctggtcacggccgacagcactacttctcggctagtatttgccctcacgaacttcttggcgggtacctggactgcatcaggtaccttggattatgagatcgcttgaatggtccctccttttttcacgtctctctgatagcagcccatgtcttcatccgtgtactgccccaccttgcacaccagctacggctcggtcgcaccgctgtccccattcggcgagaaggtcggcgtgcataagacgaatatcttcaatctgaagcctagctacggcctcagcgtcatacgagacgacacgtacacgaccggcaacggcaccgtcactggaactttggggcagccagaattcgtcctgacggctcccgcatcgtcctcagctagcctggtgagtgcggagcgtggtcgctatatcgccggcttctccgccgaagtagggatcggggtgcgggtgccacaagccctgacgggcactcagacttttcagtggggatacacagacagtagcttccagaacggcttctactttcagatctctgcctcagggctgtctgccaacatcgtgcgcaacggggtagtcagcagcatcccagcctcctccttcaattgcgaccgtctcgatggcaccggccccagtggccagatcttggacatgaccaaaggcaacatctggcacatcgtctactcgtggtatggttacggagcggtcaacttccagctggtctgcaccgatactttcggtaatcagttcgtgcagtcgctccaccgttgggcgccgtccggtcagacttccacgatgtttccgaacctcaacataagtacgttgctgaataacaccggaagcggcaccatcaatgcctacgtcgccggccgccagtattcaatatacggggaggagagcacgactcaccgcgtcacctccggttacaaccaggtcaccgtgacttcggcgacctggaagcccatagtctccttccgtcgcaaaaccggttggacgcactgcggcgttcgtctgatctcctacgatgcattcgcgaatcaggatgcatacctgcaggtgcgggtgacgtctacgctgacgggagcgtcctggactaccgtacaagattctctcgatgcggagacctgcctgcaggtcgacacgtccgcgaccgccatcagcgggggtctggtgctatacacgaccggcgtgagcagcgcaaaggccggcggatcgaccgacgtgctcgacatttacctcaacgagacggacatcatcacggtatgcgcaaagtgcatcaccggcttcagcggcgccatcactgcagtgctgcgaatggaagaactgtggtgagacagcggagcttctttttctcgggtacactcaggagggcacacccatgtcgctcattccgggaaacgccaccgtggtagggaatctggccgtggcgggcaacataacttctttcaccaatcaagttccgacggactcctgcggcgacatccggacggtcgaaaagaccaacatcatcgacctcaactctacctgcggcctcactcagctgcgcgacgcggtgaccacgaccggcaccggcactttgacgggcaccgcagggcagccggagttcgtactgacgctcacgggctccggcgactccgtactcctgcagagtgccgagcgcggccgcttcgtagcggggtacacgttcgaggtatgccttatcctgcgctccgtcgtcggtgccgccgcctggggggcggggcagtatctcaaggtcggctactatgatggcaccaacggcttttacttcctcgtcgactcgaccggcctgaacgcgtgcacgatgcgcaacggcgtggagaccaggaccaatcaggcaaacttcaacgtggacaagatggacgggaccggcccgagcgggctggtcttcggtatgaccaccgggtgcatgtttaagatcatctatggctgctacggctacggggcgttggtctttgcttcttgcccggtcacttctgcaggcgtgcagtatctgcagcacatgcaccgcatggtccccggcacgcagacctactctatgtaccccaacctgccgctgtctatctacgccaccaacggcacgaccgccacgagccgcacgttgtacatcgccggtcgtcagtattccatgatcggacactggctgcctcacaagcgcaacaacgcggcgtacgttctcaaccgcggaggggtctccacgaccttcttacccatcatcagcctgcgccgcaagagcaattacctccactgccccgtacgcctaaagggcatcgacgtcctctccaccaccgactgtctgatccaggtccgcgttgcgacgaccgttaccggcggcacctggacggatctacaggatcagccaaccaccgagagcgctctgcagtgcaacacgagtgcgaccgccgtgtcgggagggatcgtgatctacgtggagatgctccaggcggggcgcatgctgaacgacaaggaccaggtagagttcgactttagggacaacgacgtgcttacgttatgtgcgcgcaccttgaccggcttcacgagcatcaattctgtcctgcgcgtcggagaaggattctgagtcatctgtacaaggggtctttcttcgactcctttcagtcaacaatcgaagacgaggacgggtctcatcaccaagtacttatttctagaagattcattcgatgcacggtttagggccgctctcggctgaggtctccacttagggcggtcgatggacggtttcgggtccttgttcatcgagccggtggaccgtcgtcgattcggcaggaccgcgagggacgagatcaggatcagcacgccgcacggtgccttcgccttcgccacgtcatccgtccgagcggtcaagctcggccacgtggtcgctccagttcggaccctacttaagacggacggatcggatagagatactctcattcgacatggagccggacgcgcagaagcgaaagagggaggagaaggagccgaccggcggggcgaagttcacaaagaccatccgggggtggagagcggacgctaagcagccggaatatgcgacgctgttgcaaaccctcacggatctcttcctgaagcacgcattcgttcccgactcggaggtag

SEQ ID NO: 94 - DNA, 12856 bp, Coccomyxa sp.
  variation 10699: note = n is a, c, g, or t
  source 1..12856: mol_type = other DNA
ccatcaccctcacacagggcgtgtggtcctccttcgtcctggagcacactaccgccggcaccaccaccgaaaagctgctggtggagtgctcgtcgaatgcgggcacgctgtacagcaccctcgcacacgggaccgcaagcggtatgttccaattcgcgtacaacctgcaggagttcccggcggcgcagctcgggacgagctacgcgttcgggagggtgtactttggcgacacggcgcgcatgggcaccggcatgatcctgccgaacgccaactacttctcgggcaacacctcggagctgaacaacgacgccgggtacatgaagcagctcagcgctgccaatgcatttcagggcaggttctactccgcatccgcgttcaccacgagcaacagtacctggacctgtccgagctcgggtattgctgttgcgacgaacagcatcccatccattaatgcaaacgtgggcaccagcatgaactcaagtgctttgacttacaaccagtcccttccaggtatctatctgcctgtcacaggtttgtggcacatgaccggatactttcagatctctcagacggcgttagagatgaggtggacagttatgtcgatgccagcatttcagggcaatgcagctcagaactttggctcaacggcatacagcaatacggccgcagtgctcgcgttgagtggattcgtaagtggaacatcagagaacgggctgtcggcttctgcaatacttcctgcaggcactgtcattcagccatgggtcattgcgacctcgggtggctcgacaacgttctatggcgtcgtaacactgggagccccaatgagatgacagctctcagcctgcagccatgtcatttatcgaagagcgactgcaaggtgagacaaccgtacgtctctcaggatttcggggtcatcaaaagcgctgcaggagagatatgctcatagtgatgtacggcgagggtggcgatgatgcagcgatgttggttgcagctgtgaagtagagggtcggtgtgagcacatcaccagcggccaggggccctgtgtagctgcaggttgtcacagtgtactgattgacgctgatctgtgctgcgcctagtcggccgctacctgatccactccagtcgaaccacatctgctcaacacctccgactgatccaggatcccatccgagcgtcatggcatagattcccctgtagggtatgacgatacctccggaggcattcatgatcgtcacgcctgcaggaatgctggaaacactggacagaagcgtccagaaagctggtgtcaacttgggaggagtgttggcaggtgcgctgacagccccactctgctgccagtaggcagtcaagggcgtgggattgattgctggtcctgtagtggccacagcactggaggccggtgcgctggaagatggtgcagcgtaagttgcggtgccagtaggtacagcagtgacaggtgtgacatccccaagtgcgacgatgtcgctggtgttaaagttggacagaatccaatttgccggaatacccgtggcgtttggcactccaagctgcagatataggtcgtactggttggtcaacgtggaggatgcgctctgcgtcagcaccaagctagcggtgatgattgtcggagtcgcccaattgctgctgtcccaggtgtttttctggaccactatcggggccgaatcaggtcctgtcccggtgttctgagcaagcacaaagacagtttgacgagacccgcctgcagactcagagtttggataaatttctagggtcagggcatggctctggttggctgccgagtttacgaaggtcgcaaccttgatccaagtgcctttcgtattggcgctgtggtccgtagacccgagcagggccaggcgggtgtccacgctgccccccacgaccgaaaaaggctctgcgatgtccgatcgagacgtcaggatgagcacactcagggtgattacaaagacgcacgcggcgaacaggtagtgacggggctgcatgctacctctgataacagggcctaaaaaaccatcatgtcagctaatcatactacaggattccagtgcaaattcgatgggcgaatttgcgctagagtcagagtcggcattcagcaaaacaaagaacacacaaattatgttgatacacgccatcatcctgtctctcactgccttcgccgctgccaaacacaccgagccctacatcaacgccaacacgacactcatggcggctcggtacaacaacaacacgcgagaattcgaaaaggacaccatgagagcgtttgcaatacaggttatgatgcaacagacgatgcatccagactccctcaccagtatcgccaaggccttcttcgcaagtgctgagccgctcgaagtgaacgtggggttgctcagcatcaacttgacaatcaccgacgaggtcggcactcccgtcgcgaatgtcactcagatgcaggacggcagcatcatgtacaccatctaccagatgcccgtctctgtcaacagctccaactgcgacgtgtatgctcatgccaaggtgccacgcacacgcaggggtggcaacgctactttggacagtgatctcagaacgctcatcacgaacgccgaaatccagtgccggaaacacatctcagcccttgatgaatactcactcgagaaagtcttccctggctgctggaacgcacagaacacgacctcacgccttcgtctggactgtctgcagaccaccgtcaacagccgcacggcattcatgaactccctgatcgcgcgtctggcgactgaggagatcgcctccggtctgcccacagacagagtcaatgcagaggtctatcagaaggatctgaagaatcaggccaacctggcgatagccgagggtttcttcctgaacaccctcataattcccttcacagttcctcagcttcgctacgcaaacaagctcgatcgtgagctccgagcaaacgcaactatgcagcacggcaccgtgacgactcaatagacgatacctactcttttcctactactcttttcctactactctttttactactctagacaatgccagagcactctggcttgattttttattctttttgcagggccgctgccagcgagtctgcattttctgcatacacagtaccgacatgagttccgacgtcgtgaaccgatcgaagctcgcgatctcccgggcgagtcttcctcaggccctgacctacacggggagctccaacacatccctgcctggcaacctggccatcaccggctcgctggccatctctggttcgctctcggtagccggtgtgtcgaccagcggggcaggatcgagcgcacccgacaacgtgtatggcagtgtcctcatgcgggtctttgacgacagcaccgtgtacgccggtcagaccctgacggccgggacgccactcccgcccccattcctgacgcgcccgttggtcgatgtgcctaccggatcgatcacgctgacgcaggcagtgttcgggtctgccacagcctattcggttcggctggcgggttacgtgtgtcctccgaccaccgggacgtacctgtggcgaacgacgtaccgggatggggccaccatgtacatcggcacgcagaaggtggtagattcatggtcgtacacagggagtgtgacgcaggctgtgggcaccctgagcatgacgcagggcgtgtggacagacatcgtgctggaacatgctgccagctcgacgctgaccgaacgtctgctggtagagttctccacgaactcagggagtgtctacagcaccctggcgcacgggacagcctctggacagtttcagctggcgtacaacatccgggaggttcccaccgccatgctcggcacctcctacgtctctggtaggacgtactttgccgacacagctgcgttcaattccgcgttggtgctatcaaacacgacaggcttcacaggcagaagcagcgagctgctgaacgacgcaggatacttgctatccggcacagcgacctccataacatgccagagcctgactgcgagtgctatcgtgccaacgactgtcacgggcacgctgagcatcacaggcgccagcctgtacaatccaattcctgccagcacaagcactttcttttacgctgccttcagcggcggcagcatatcaccgtcaggcggaggcaattacgtcctgccctttcagacggctgtactgagcaagggtctgaacagcatcagttacaacaacagcacatcgaccttcacgtgtcctcgaacaggatactggctcatcacggcaaccagctcgtactacgagggtagctcgtcagcctgtaatgccaccattgcacttttccaaaacggcaatagcgtggctaccgcaaaacaggctgtcatcacggccggggcagccgtgacaaacgtgctgaccaggttgctactactgaacactggcgacacgctgcaggcactcatcaacttcgatcagagcctgaacttttcctaccaggaccagaacgtgttctacggacaactgatttcattgtgagtctatatcacgcacatgagcgattcgattctgcgcaccctgctcgggaagctgcacgccggcagcgccttgaccaccaacatcgccagcactctcactgcgacagcgacctctgtgcccctcaccgggactctcactgccatcgcagcgagcataggctctgtcacaaagctggcgatcgatactagtggcaacgcgaccacacccggcacagtgacagccctgcaggtgacggggagcaatatcagcatcgctggctcactcacactgggtagcagaatcgcggcgaagctgccgcaggtccaggcccagcaggtgttcggccccttcacgggaggcacgaacacgagcttcgtgtttctcggcggcacccaattgtggcaggtctctgccaatgtatattgcacgtcgtcggcgagtggtagagcgacctttagcgtgcaggtcgatggtacgacacccatcggtagcggctccaatgtcgtctacttctatggcaacacaacgtgcagctcggacctctcgtatcctgtcatgatgttcaccacgactcttgcagccggaacgcacactgttcagatgagttccacaggcacaggatacacgtctgactccaacaagatggcaaaccttgcggtcaccgagtaccccacgtgatcgtaggcacgcctacatagacaagccagtcctcactggctccctgctcacattggactcgatttatagcttttacaaatctaaggaacaaggcacgatgttccgactcgccagtcagccagtgtggcctgcgaggcaagccatacccggatcccatgtcaagccagcgagaagacggtcggttatcacccggtctgtgcaggttcagacaaggttggactgtccgacgcccttcttcgagcccctcgtcaggtccttcctgctcggcgtcggcacaggggctctgttcgagggagcgcacgtcagcctcagcgccctgcgtctcgtcggagatgtcggcctgcacagagtatcggaggccttgccggcagccttcgcaggcttcacacccatgttcctcggcgatcacgtcgtcgccctcagcagttggctcctgttctacatcgtggaggcagtcgcgatatacgcggtcctcaagcggcaccccgatgacgcagagaaggcagcgaaggcgttggacaggctgaagaccctgccgaagaggctcctgccgctgcgccttatggtcatcaagcagatcatcctggcagggttggataccggtccgctacaattcgcaagcgtcgccacaactgtggagaccacagagtcaaccatcctgcccaggcctgtgcggatacccccacacccggtcggcaacgcccaaaagagcagggagcgagagctcagcgaccggcgcaagttcctcaggaacgcctggtacgccatcgcgatctcggaggaggtcaaggacgatccggtaggagtggaggtcctggaccagcacctcgtcctcttcagagacgagttcggggacatcaagtgtgtcgactcggtctgcccccaccgtggagctcccctcgacaagggggtgatgtcagagcacggaggaagacgttgcgtgacatgtccctatcacgcctgggcgatagacggagaggggatcctcagggacgtgcccgctgcggagcactcggaggcatggccgcgcagaaaggtggtcgacgcccacacggtcaaggaccgtgggggattcgtgtggttcatggccctggacaggctacacccgctcccggaggcagagtggccgccgatcccatacgtgtacgagctggacgaccccacgtggcgacccactttcgggtccatcgagttcgagtgcaaccactcgggcgtcttcgagaacgccatcgatatcagccacatccacctgctgcacggggactcgttcggaaacgcggagcagcaggtcatccggggcatgcagtgcagagcagaccccttctcggtgacggcctcctttaccctctccaacaagccggcgagcgctctgtgggagttctccagggtgccagaggtgcacgtcacagcccgcgccatgctccccagcagcagcgtgatcacattcacgctggccaggggattgtccttcagcacggtcgtcaacacgaccccgatcgacgagcatcgcacggtgaaccgcttcgccctggtccggaagcttgcagtggatcctgtgggggccgccgtgttcaactggcctgtgtgggacgggctggcgcgtcaggccatgttgaagatcctcggacaggacaaggtcatggtggagcagctgaggcccgagtgcctggacagggaggtcagcgtgcgtgcagacatgattcaggttgcattcaggcggctcaggcaggcgtggctggatgctagttgatggagagtcgtagcagacaactcatgatcgattggctcgctgatcagctctccaagctcgttgtcgtcttctgtcacgggcgagtctgaccctctctttgcagcacaaagaaagactggcgagctctttcttctccggggttcattttctcgatatcctttattcaatgaacagcatggctctggttctgcggatactcaaggtttcggcaatggtgctgacgaccatctctgtgctcattgctgccattacaatttcgttccggaataacccaacagacgacacaaagcagagggctgtgtggagcgcagtgatcgctgtcagtgccagctcacagatcatcctcattattgtcggggctgtgtgggttgccgctgttgctccaagcgcccacagctcgctcttcagagtaattctgttgaacagtgcaagcgcaatattcgcgctcatatatgcaggccttctcgccagcggtcgagatggagtggctctcggagcattcgctgtaataatcaccgtcacatacacaatcttgaaagctgtacgaatgtctgtttagtacagggacgatgtcggaagtccgacatcgtcattcatcctcgtctcgtgcaagctcctcccaaaaaccgagccaggcattcttgatggccttcctgcatcgcgcaagtccctgaacagcttcgtgggcgttgttgatgtaagacggcaccccgagcgaacaccccaaatgctccagaagccaagcactaccgtggtgacagttgttcctgatcaggtcgtatgaagagcctggaaaatttactttgtattgcgctatcacctcttgaatccacaaggttcccttgttggtggttccaaggatgttgccctttacgaatcgcctgtgcacatcctccaaggcaatgtagggagtgatgaagactccttgtggaccgaaatgaacctctccgatgccgtcgatatagacacctgtgtggtatataccgatttttgctgcgatcaagatacagttaccagggacgcatgaggcatactcgaccagccgtatgtgcttgtcctgccccccatgaaggttgagatgttccagctctttcagcatggcatctccctcctctctggacaccctgtagtatatcttccagaagttagaatcctgttcacgttgctgtggtgtgactggcacttcagcatcaagtgcgcctgctggactgatctcgaagctgtcaaaggacgcaaacatggtagcgcgacttgtgtcatagctttccagggaatctcacaacagatgtcaatttcctgtattgagagagtcatgcactcagtaattagcaactcctctttccccagtgcaccgctttcagtggtaaaatgtttgttcaacctccccagggagcacctgaacaggacgattgacaggtccgaatcgagcgatgtttgcacagaccttgcgcaattgagtgttcacaacagactcttggagtgtgttgtgggaagtggagatttcacaaatcaaacacacgcagcgtgcctgtgactgtttctctacatatggggcaccgagtcccgcatgcttcgccgcaagtcttgcacgtcactgtgtgtccacaaggaatgaatgccacctccggcgctgtctcctcacatatgacacacatgggcttggctgctgggggcggtggagcgctcgcctcgatcaatgcaagctcgccgatccgggcccagcaagtcctgaaatcggtcgtggtcatccccatggcccgcaattcagcaacaagtctatcgttgtccctctgcagcacatcgcagcgttcaatctgttcgtctcggagttgcctcttctcaatcaggtcggatgcgcctttgaggcgaagcctcaccacctcttgcctgagtgaatccctttccctttcggttcgttccagggtggtgcgaagcgcttcttctcgaggagaggcgggccgtcttcgtgaaaacatgcttgcagcgttgatgccatgtggtggtcggtaacgcaaccctcaatcaattttttgatgaatcgcacaccacgtctgtgctacctcgaagagtcaaggtattacccctaacgctcagaatgtcacttacccctagcgcccacaaaggcagtcatcgagatctcagattcttctgagattccttcctcacctactcaccaacccctctccacatcatgaggcctcaagccatcagagcttgtttcttccgcatgcgctctcagggatgttcctttcgacacatgtccgatgcactcgctgtctctcagagacagctctaccggtggcagcgcgcgcccctgctcatggcacggcccctggacagaagtcatctgcgtcggaagacgacgacggcgatcggggatgccgtcatctgttgggtcacccggcacaacgtcgccaccctggacgcgatccgagagcacctcaggtccagcctctcggtgctgccctccaaacagtccatttcccgaatgctcagagagcgcaattggacgaggaagagaggcacgaaggcgtacactgaggcggacgcctccaggggtgcacagttctcaagatccatagcggcagggttgagctcgcgcaatctcgccctcgacgagtgtgctttcttcctcaaccacagccgacactacgcctggagccctcgaggcacccgagctgtggtcaggaggccaggacggcgtgggagaggctattcgctcctgttgtgcatcggacacagtgggtacacctcctggtccctctttgagggagccgtcaccgggaagcgatttcaggactttctgcaccatttgccacctggcagcgacctcatactcgacaacgcagccattcatcgtgccgctcgcgtcctgaggctccaaggtgtcccgaccatctccgaaacagccgatgccctgggcatcggcctcaggtacctcccaccctacacaccccagctcaaccctgtggagctggcgttcaacaccatcaggcagctcgtgaacctcaggcagcccagggatcctgtcacgctggagcgatgcatagcagaggccgtcgcacggctgacacccccagtctgctccgcaacctttcgtaaatgcttcccggcaacctcatagagaatctcggtgcgtcaggatctggacaaataaatctggaggacatcaaggtgagatgaagagaccgaagaaacctcccaaggatccacaactccgcctgcaggagcagtacctcgtctacgccaagaacaagctcttcaaggagagagaggtgcaggagaaggctgtgaggaaggatgtgcaggagcgcgcgctcaccaacgccaactccactttcactgtggtcaagaccacctggaaggcgctcggcagacgcgccgtccgcctgctcgatctggaggctgccctgctcgaggtcaacaagaccatcgccgaggcctacctcctggccaacgtgcacgtcgcacgcctctgcaccgccggcatcccactcggcaagctcgaccagacgttcttccatcgctgcctctcggcagtcagcgtcagcgagaagcgaaagccagagaccagagacttccagctgctcgtgtctgcgaggctgtacagatcctggcgccccgaggggtacgtgccaccggtgagcacacatctggcctccggtttccaccagcaggccagtcagcagatggcgaccaacatgcgcaactcgacggtcgccaacttctacaggcgattcaagaggtacctcaagctgcgctactcgttnaacgcaaccctcaatcaattttttgatgaatcgcacaccacgtctgtgctacctcgaagagtcaaggtattacccctaacgctcagaatgtcacttacccctagcgcccacaaaggcagtcatcgagatctcagattcttctgagattccttcctcacctactcaccaacccctctccacatcatgaggcctcaagccatcagagcttgtttcttccgcatgcgctctcagggatgttcctttcgacacatgtccgatgcactcgctgtctctcagagacagctctaccggtggcagcgcgcgcccctgctcatggcacggcccctggacagaagtcatctgcgtcggaagacgacgacggcgatcggggatgccgtcatctgttgggtcacccggcacaacgtcgccaccctggacgcgatccgagagcacctcaggtccagcctctcggtgctgccctccaaacagtccatttcccgaatgctcagagagcgcaattggacgaggaagagaggcacgaaggcgtacactgaggcggacgcctccaggggtgcacagttctcaagatccatagcggcagggttgagctcgcgcaatctcgccctcgacgagtgtgctttcttcctcaaccacagccgacactacgcctggagccctcgaggcacccgagctgtggtcaggaggccaggacggcgtgggagaggctattcgctcctgttgtgcatcggacacagtgggtacacctcctggtccctctttgagggagccgtcaccgggaagcgatttcaggactttctgcaccatttgccacctggcagcgacctcatactcgacaacgcagccattcatcgtgccgctcgcgtcctgaggctccaaggtgtcccgaccatctccgaaacagccgatgccctgggcatcggcctcaggtacctcccaccctacacaccccagctcaaccctgtggagctggcgttcaacaccatcaggcagctcgtgaacctcaggcagcccagggatcctgtcacgctggagcgatgcatagcagaggccgtcgcacggctgacacccccagtctgctccgcaacctttcgtaaatgcttcccggcaacctcatagagaatctcggtgcgtcaggatctggacaaataaatctggaggacatcaaggtgagatgaagagaccgaagaaacctcccaaggatccacaactccgcctgcaggagcagtacctcgtctacgccaagaacaagctcttcaaggagagagaggtgcaggagaaggctgtgaggaaggatgtgcaggagcgcgcgctcaccaacgccaactccactttcactgtggtcaagaccacctggaaggcgctcggcagacgcgccgtccgcctgctcgatctggaggctgccctgctcgaggtcaacaagaccatcgccgaggcctacctcctggccaacgtgcacgtcgcacgcctctgcaccgccggcatcccactcggcaagctcgaccagacgttcttccatcgctgcctctcggcagtcagcgtcagcgagaagcgaaagccagagaccagagacttccagctgctcgtgtctgcgaggctgtacagatcctggcgccccgaggggtacgtgccaccggtgagcacacatctggcctccggtttccaccagcaggccagtcagcagatggcgaccaacatgcgcaactcgacggtcgccaacttctacaggcgattcaagaggtacctcaagctgcgctactcgttggacggcaagcaggcctacgaggccctgcagagcatccgagccgtcgagtacgagggcgatgaccccctggtgaagcggtacagagacctgctgcctccgaagcccgagaagggtcgcctggaggacaatccagagctggttatgcccctccaacacctcttcctgcagcatttcgaggcagcgcagtcggaccggcagacggacaggcctccgcggctcttctctctggtgccaacgaagaaggggttcgagtgcagccacatcaagatatgcgcgaacggtctttacagcctgctgaagaggaacggcatcaagcacctcccgaaggacgccgacacgttccgacccgtggccgacgcctattggaggcgcttcttccacatctcgaagttcga

SEQ ID NO: 95 - DNA, 2411 bp, unidentified
  source 1..2411: mol_type = other DNA
  misc_feature 1..2411: note = Fanzor polypeptide
gtgccccggggtcgttcgtttcatatcacagggtgtgcagggctgggcctggatgtaggcagacgcactgttgcctggaccctgctgcatgtatgttatatcaaatgtaatttccctgtggcaacttcgccggctttgccgacaaagttggttttggtgcgcagcaccaaaacttgggcgccactacgtggctgcccaacccgggttgcaagagagtggcacactgtgccactctttgccacctcagtcgccgaaatctcagactctgtctgagattccttcctcacctactcaccacccctcttcacagcatgacgcctcaagccatcagagcttgtttcttccgcatgcgctctctagatcacaccttccggcacatctcccatgcactcgacgtttctcagaggcagctctatcgctggcagcgtgcgccccgactcatggcacgccctctcgacaggcgccatctgcgtcgaagaacgacttcggcgatcggagatacggtcatatgctgtgtcacccggcacaatgttgccactctgggtgcgatccgagaccacctccggtccaccctctcggtgctgccctccgaacagtccatctcccggttgctcagagagcgcaagtggacgaggaagagaggcacgaaagcgtacaccgaggcggacgcctccaggggtgcagagttctcgagatccatagcggcggggctcagctcgcgacatctcgccctcgacgagtgtgccttcttcctcaaccacagccgacactacgcctggagccctcgaggcacacgagctgtggtcataaggccaggacgacgtgggatagcctactcgcttctcttgtgcatcggacacggtgggtacaccacctggtctctcttcgagggagccgtcaccgggaagcgatttcaggagttcctgtcacgtctgccgcccggtagcgatctcatactcgacaatgcagccattcatcgggccgctcgcgtcctcaggcttcagggtgtctcgaccgtccccgaaacagccgatgccctgggcatcggcctcaggtatctcccaccctacacaccccagctcaaccctgtggagctggcgttcaacagcatcaggcagctcgtgaacctcaggcagcccagggacccggtcgcactgcagagatgcatagcagaggccgtcgcacgactgacacccccagtctgctccgccaccttccagaagtgcttcccggcagactcataaagtctgtgctgcgtcaggatctcggggaacaaatctggggaacaacaaagagatgaggagaccgaagaaacctccgaaggatccacagctccgtctgcaggagcagtacctcgtctacgccaagaacaagctcttcaaggagaaggttgtcaaggagaaggctgtgaggaaggatgtccaggagcgcgcgctcaccaacgccaactccactttcacagtggtcaagaccacctggaaggcgctcggcagacgcgccgtccgcctgctcgatctggagaccgccctgctcgaggtcaacaagaccatcgccgaggcctacatcctggccaacgtgcatgtcgcccgcctctgcaccgccggcatcccactctgcaagctcgaccagacgttcttccatcgctgcctctcggcggtcagcgtcagcgagaagcggaagccagagaccaaagacttccagctgctcgtgtcggccaggctgtacagatcctggcgccccgaggggtacgtgccaccggtgagcacacacctggcctgcggattccaccagcaggccagtcagcagatggcgaccaacatgcgcaactcgacggtcgccaacttctaccggcgtttcaagaggtacctgaaggtgcgctactcgctggacggcaagcaggcctacgaggccctgcagagcatccgagccgtcgattacgagggtgaggaccccctggtgaagcggtacagagacatgctgcccccgaagcccgagaagggtcgcctggaggaggcgatttttgtggtgcatagcaccacaaaagtcggtttgtgggtttcacccacaaacttgggcgccaggctttgcctggctgcccaaccctagggcacaagggtggctatggccaccctttgcccctacagtcccgagctggtcatgcccctccagcacctcttcctgcgcactttcgaggcggcgcagtcggaccggcagacggacaggcctccgcggctcttctctctggtgccaacgaagaagggattcgagtgcagccacatcaagatatgcgcgaacggcctttacagcctgctgaagaggaatggtatcaagtacctcccgaaggacgccgacacgttccgacccgtggccgacgcctattggaggcgcttcttccacatctcgaagttcga

SEQ ID NO: 96 - DNA, 20606 bp, unidentified
  source 1..20606: mol_type = other DNA
  misc_feature 1..20606: note = Fanzor polypeptide
aggagcttgcacacgtccggccggtcgcgcttcacaagcaccacacccttcagcatcaggtcctgtgtcggggggacgggcttgaactcgaccacgccagacgccgtcttctcaaccagaaccttgttcgcgacatacgtcttcttcttgaagaagatgatggtctcgtagatctcgccctcgagggacatgttcacgggtatcgggaagcatgccttcagcgccgtctcagtggatgtggctcgggcccacagggcgggaaaattgtcggccgcgattcccgggaaggtcacatagcacgagtccgtgtccccgtaaacgaccgttgctccgagctcctggaacttggccaccgcgatgcccagcgacatccgtcccagcgccgtgcagctgctcgccccctcgttgagcggcagcatgccgtgcttctggacccccagcaccccgtagatcgagttggcacacaccttgagtgcctgctggcgcttgtccagcacgttgtactggacggtgtacagctccgtcgtcttgaggatcttcttcacggccttgcgcgcgctcagcaggtcccgcagcagcttgggcacaatgccctctggttccttgaggaaatggtggacgttcttcgccccgcccttggcggacgtccacacgaccgtgtggtacatctgcgggggcatggcgggcggctcggtgcccaggtaagtgctgtagcagatgttgtaggccatgagcagactggggtacagcgagtcaaagtcgtactgcagcacgttgtggtagaggccgggcacgggctccagcacgcaggcgccctcgtacttggcggccaccaggtcgttctcgtcaaactcttcgggctcgtacgcaaagtccagactgtcgatcgcggcgtcgcagtcgtcgacgatcttgcgcttggcgagcttgattttctcggcgagcacgttctccctgtggtggttggcgctcacccagcgtgttccaacccgcacatgcatcgccttcgggtagttgaggacaattcctcgcgtcgagcatgtctgatacattttggaaaacacgcgctgctgctgccctgcaatgtggatcgtatcaatggagacgctgcattcgcgggacagctcgatgaggtagatgagggccgtgaccttgtgggcgagcacgtgcaccagggcggagtccttgacgcagtacagccccacatccgtgtacagtgtgctcgttgtgtcgcggcgcgtctcgtagccgtcaaagatatccgacacagtgatggggtccttgtggtcgcccacaaagtcggcggcgacgctgtcgagcttgtacgaggagcgcttgaacatgtccttgaaaatcttcatggtgtccatgttgattatgccaggcattttaaggtactggatatcgacgacgccggctcctgatgacgaccaccggacactggccgtggacgactggctgaccccgttgaacgaggaccccgttgttgatacaccaaacagcgcgcaccggcaaagtatgtactcccaatcgaacccaaacgtgttccacccggtaacgacgttgacccgcatctcacggatgtaggccaggaaagccgcgaggagcttgggctccgtgtcaaaggaccgcagctcgatgcctggaagcccgtcggcgtcgcagccgtcgagggcaaacagcacctgctcctcctcgctggtgtaggcggagatctggaacacggcgtcggacggcttgcttgcatcgggcatcttggaccggtctatggagtaggcctcgatgtcaaaggccatgatgcggaagagaggcacgctgtggtcgtcgacagcgagagggctcacatggatttgcttggtgcggtggcccacagaggtcgtggtgaactgtgcaatgtgcacccagccgctgaatcggattcccttgctggtgacaaactgcagctgcgagctgacgttgtgctcgtagacgtgctcgcgcagggcggtgtacttgccctctcggtcaaagttgagggtgttgatcagggccctccggttctcctcgttcttgaagcgcagccgggccatgcaacgcttgctcggggcgtagtacagcgtggtcgagaccacgccctcgagtgtgtggacgatagcagggctggcgtgcgtcttgtcaatgagcgggacccagcggtcctcgcagcgagagaaggtcttcgaggtctcgagcttggcgcggaggcgtgagatgtcggagcccgcggcctgcaccccgacatagagctgcgggaagacatcgcaaacgttgacgatgtgggtggcgttggcgcggtcgatgccgtacataagcaccttgtcgtggtcgttgatgcgcttggcgggcacggtgtgccaggcgtagatgaacaggtccatcggtggtcgttggtcgttggtgtgtttacaatgtgtttacaatgtgcagagtgtgaaagtgattcattttttgcaaactcgatgattaatattccgagaaaaaaaatcacttggaatgtataaatgtcaccatatacacagagagcgtgccccgcaggcaaagcgcaaaccattggtggaggtggacggggccaagacctgtcgccttgccagggctgcaacaagatcccatctctagagggtggtgcgaagcctctcaggcctggtggcgcggactaggggtcatcaagccgccctggtccatcggtgtccaccagccccagcccctcccccagacacgtataaatataccattcctttcctacaattcttcacttctcggtgtagagactgatcctgcgtgatctgcgccaatgaaatgcacggagacagatgaccttttaacttgaacatgggccatggtgtagagactgattctgcgtgatctgcgccaatgaaatgcacggagacagatgaccttttaacctgaacatgggccgtggtgtagagactgattctgcgtgatctgcgccaatgaaatgcacggagacagatgacgttttaacttgaacatgtgccatggtgtagagactgattctgcgtgatctgcaccaatgaaatgcacggagacagatgacgttttaacttgaacatgtgccatggtgtagagactgattctgcgtgatctgcaccaatgaaatgcacggagaccgatgacgttttaacttgaacatgtgccatggtgtagagactgattctgcgtgatctgcaccaatgaaatgcacggagacagatgacgttttaacttgaacatgtgccatggtgtagagactgattctgcgtgatctgcaccaatgaaatgcacggagacagatgacgttttaacttgaacatgtgccatggtgtagagactgattctgcgtgatctgcgccaatgaaatggacggagacatgtatcgcgaacatgtaccctactaggcagttattttttgtcgatacaggctcctccagctcctgccggctacctgcagagctccacgaccccatggccttcaagctcacccccgcgggctcgacggcagctggtcgtgggctcggtcggcggctggtgatgcctcgcagcccctgccggctcctcgcacccctacaggctcctccagctcctgccggtgagccagccgactcatagaggaaaataaaaaattaaatatattattgtgttgcatttttatttctgattcattttcacactaacgtagttgctgaaagtattttgtgatcatgtcgaaacgctcatccgatgcccgttcaccccccgtggtgaaatccgcccgtctgacgggtggcctctctgactacgacgatggactgggcgacgggctgtccgatgctggcctgggtgacgggctgtccgatgctggcctgggtgacgggctgtccgatgctggcctgggtgacgggctgtccgatgctggcctgggtgacgggctgtccgatgctggcctgggtgacgggctgtccgatgctggcctgggtgacgggctgtctgacgctgacctgggtgacgggtctggcgctggctctgacccgggtggctctggtctggatgctgaggatgacgtggcatgtgagtgggatgcctgcaccgagcgactgcgcgacactcaggctcttgtcgagcacgtaaagcagcacaagttggccacgacatgcaaatggagaggctgtctgcgagaccaaccctttagagattcttacaatctgcgtcaacacctggagatgcataccggagagaccgtcgactgccccgagtgccgcaagaaaatcacaccgtgcaacctcgacagacacttgaagacgcatgatgtcagcagaccgaaggattttatctgcgacgtgacgtcatgtacagcgcgcttctacactaaggcccatcttcaggctcaccaggcgacgcacacaaatgatcgtccctttgtctgcgatttgaaaggcaaatcatcgcacactgtctgtgggaaaaagtttaaactgtccgataaactgcagaagcacaagcgggaagttcacgcgagaaccaaatcttatgtctgcagacatcagggctgtgccgccgccttcccgtcgagagacaagctgacaaagcatgaaaaacgacacagcgacgaaaaacgacattcttgtacagtgtgcacggcgcagttcaacactaaggacgatcttaaacagcatgagaggactcattctgatgacagaaattacgtgtgtgatttcgaggactgtggtaaatcatacaaacaatcctgcgcactgagtcaccataagaggtgttggcattccggggaacggccgttcaaatgctcctggttggttctatcagacgatggtgagtctacacgtcagtgcggcaaaacgttcaaactacccagcctattgcaacgacacgagagtatacacaaaaaggactattcttgtccatcgtgcgacgtggagtgtacctcacctaagactctcagcactcatctcaaaagacagcatccaggcgcacactgcccctgcaacaaaccagcacctgccggcagcctgtgcctgtatcactccgggtctctgaggtaccggctacgccagaccactgtcaaccagtcgctcaaccggctcatccaacaggaccccaggtggacattcgcctgggaggtcccggtcgacggcttccgtgtcgactcgctgtatacctccacgactcgccagtacgtcgtgtcgacagacgaggagcagcacaagcatgagagtgccgaggacttcctggaccgcacacgtgtcatcacgagttccctcacggagagctcgaagaagcccctcgtcttcctccgggtgaacccagatgggaacaatgtccatgtcccgacctcgctcggtgagcgggttcgcaagacccacgcaacaatgcagtggctcgacagcctcgagctggactgcggggtctcgtacgtcgtcttcatcgcctacgatgtcgtgcgaccgggagtgatcactcgtcgggcaaaggagctgctccagcacaagggcgtccgccctgcacgggacgatgacgacctcgctggtgaagaggatgatgtggtcatcatcctccccccatccatcagccccacacccgagcccaccgacggctgggacagctctgtcgcgagcgacctcgagtgggggacactgcgcgaccttggtgcgtacagcgtgccggcatcagagcgccggcgagagagtgtgcggtacaatctcaagctcaggtccgagaacacgatcttgaactacctattataaatatgttcatcttattgcacgagtctccaaaatataaaataaaacaatggtgtcaacttaagcgattttctttttttttttgggttatagaactattgttttcaaattgtcaatatggacaaattaaaatcattttgcaacctccaagaccacaaatggattcttcgaaaacggtctataactacattcgacgtcgtcctccactacatcctcactgctgtgttgaacatcggtgttcgcacagcagttgccatgtccggttgtacgtgttcccccacggcaatggcaaaggccatgaatagaattccctgctacgtactcgaatcgatattgcgagagtacacgccacaacaaccatatccgttacggatgcaaacaattgcggttgacggctcgtttatccgccttcggcctagactaagggcggattttaaagtgtcgaggaatagccgtaaatatccccatgcgctaattagcacaatgtacgactgtcatacacatcgcgtcgtcgattcacaagttttttgtatcacacaacgaacgcgacgcatttcttgctagatttgtatctcgcggtgatatgtatgtatttgataggggctatttcagccggacgttggcggacaaaatacacaccaaaggatcgtactttgtctttcgcgttaaacataatcagagatcattcccctcttacacacggcgacactcttacatacacgacggtaagacgtaccatgtcttaaccaatctgtctgtactaagtcctgggcagattgcccaggcgtatggacatcgctggaaggtagaaacttactttcgccatatgaaacagacacttggcaaccgggtctttcagaagcaatcgattagtggtatgcagaaagaattacttgtcaggcagattgtggacctcatctctcgccaatccgattcggtgatgtggagtaggtctgatgttatgactcaacttgcaacattactccgagatcatactgcaccacgtcgatcaaaagcacctcatgtgattgaaatgtatccaattatatctcttacacctatatcgcgtggaatagttcttaccagatcaccaccagcgattgatggcgttgcgactgtattcaattggtctagatgtaaatcgggaatagggtaatccccctgtgtccaagaaacatggctgatccatggaagacatcctactcttaaggtttatgaatcggttttgaatgatgatacgtaaaactcggaattagtatataagggcattcaaactgtcaaatacaattcacaattacactgtgtatgttttatacagatagatttgcaacacaatgcccttaatcagcaagcgatcgctctacatcgatcttgcaacctgtgcgaatcagaccccccggacttaatgttagtatgatcgacaagacatccgctgagatgatcgaggtcttagcgggatacaatcacgctgtcgtaggtggatttcagcgtctggtctttgttctacccctctaccaagttgactcaatgaaatctatgcacaagttggtgcacgacgcaagatacaagattaaccatcggcgtactccacctatcgtctggccccatgtgctgatagatgcagcccgggttggcattcgtcgcaaccatgtggacattgtttctagtgtcgatcctgctcgatggattgcaacaaattcgtccaccgaggatgttgtgctgactagagataaggtagtactatgggcaagaggtagacacaccaccaacctcaagtacttgtactcggcagttgactccgacatgattgagacattagacgactatagtaatacacccacacccaattcgatcattgactggtgcgtgtacgaagtaggaacactacggcgagcgtttgccatgtcaagaatgacagtggtaaatgccacccacgccgatcgctgggaccccaatctatttcagtctcggcgccgaggatcatcatgtagatcagatgatgcgctatatcagggccgagtatgaagaaatttcggttaagcgcgagaataccacgggtcgagctgagtcgaaattggacaagcggttggctgttttggatgcaatagatcgcatcgatattagctggttcggacacctactatgtcgcatgacatcagatagcccagtcgctacgcgtgggacgcctatgcgtgcatttgaacaatttgacttgtttcacaacggggagctgtctttgtcacagtgtttgggggaggagaagcatcaactgcttcagaaggtcgcaagaagtgcccctaaacgaaaattagcatctcgcctttggaccaggcagaaacagaccaaagagaattcatccacccaacgtccaaagaatgggagagtatctatacctagaacacgcaagttcacctgggaagttggacgcgaagaagcactgctctactggggtgtgaagaatgaaagacccaaccgctttgtcgggttgttagagatggcggacactggagcattcaagaagctgggaaacgatgaaactatagactatgatccgacgtcgaacaccaggaggcctaaaggagatttgctgatatgtgaaacgtgtggagagcgcgttcaagacctgatgaaacacaccaaggcggaacattggttggaatgtccagtgtgcaacaagtcattcgagactctcaaggaccacatatgcgtcaagtgccccaagtgctgcaagacaatgtcaagtctaaaaaaagcacaagtgccagatgtgtgggaagtgtgggtcattcttctatgcaacgcgacactattgtggtgagtgtagcgggtgcgatgccaagtttaaatctaagaacgctgaagatgcacataagtgtcccggaagacgaaggaaaggtctgtggacaacacatccaaacgacgcctgacgaaggcgtctgaacgagactctataggggtgttgaagaaacagaagttggacatcgactctgttgcaaaaaattatacccgtgaagagacggaagcgcagcggggattctaatgttgtgcgcgataaactggctcttacaaaggggagtaagcgtcaaaatctggatggatgtagaaatagaacaaggtataccaccattgggcgacttccacatgcaaaatacaccatccatagatacatccagcgatgtaatcgggagtggtacaacaggttgtcgttgtttattgatggagcgtcagatagaactctcgagggacttcttggtgtgtttctgggattagaagccggtgtagcttcggttgacgtgggtgagagtgtagaagatgtggtgggcccacttgatgatgacatagctgccggtgacgagctgaactctgacgtagactcggtggatgtgaccaaattggctagtcgtctcaccgccacggtaaaggatctggtatacaatatccgacgaaaggattggcgacatcgtttattgaggtgacaaagctattttgtcaaaattggatagagacattgcagaggcgatatgctgaactccagttgcttgtggacacaccggggacgtttcaggtcatctattcgaccgtgagaagtcatgatgatattgttttggacaagctaacaccagttggtcgaaagctgccacttgcaatccgaattgatccttctgcattactcgggatggcaaaatcgtgttggtccacaaccgagggtcgaggtcggaagataccaacagtcgacgaatcgcagtacagtcaatttgatgtagttcccaacacagaccaattgacgggtatgcatgtgcttatcggcaaggatcttaccctggaggttgtgaagcggatgaacaaggcgaacaacaaactggtaagaccatcgttgatgatctcgaaaggtgttgtgcgactacttgagcgagttcccgactacaacaagacgatgaagatgggtgatggggtcaaccttgagactattctcggatcggagtataaggctggtggattgtttggttcagcaaaggtgggtaaacagattaatcgaacatatctggcaacactgaaagatctgtatgcacagtatggtgacagtgcaagagcaaagtttgtcaaccgcccgattgtgaccgtggacccgaatatgcatgaggttgtgtttggagtattctatccatccagactgagggtgaaatatgttgacaacgatatgtccgaacacacaaagtacaaggtgtcagtgacgtacaggacatttagtgtgagtgcagctacactgaggaactcgtcgaagctatggcgggtgtacttggcaaaacacccgatcgcgaggaagggtcatttgcaaaagtcgcaaaatctgtatttaaatccgaagctgtaggtgcacgtggactgggtgagcggctgaaggtccagtttatacagcacgtgatgcggatgttgtcaaggtactgcagtgaagggcgagctggctacaaaacactagatcctattgtgttgtatggagatggacaatttacgagcaacgcgaaggggcttgttggcttcggacagacattggttcgagagttgagcaaacactgttttgtgatgttttcagaagagttcagaacatcacaggtgtgttctgtgtgtcatacgaacgagccgatgactcctgtagctgttgggcgtcacgcaccgtttaagcacatgcgctgcatgcattgtgtgacaggtgaaggtgtgacaaggagaaatctattgtttcagcgagacgtgaatgcgatattgaacatgtttcgcaatgcactggagactacggtacttggggatgtcgggaaggtcttcagacgaacgaggaatacacgacgagccatagggtagatatatagatatatagatatatagatatatagatatatagatatatagatagaaaaatcatgggatttgccatccaaggcatacccttttaaattcagaacgtgccgttataggaacgcaacatatagacaattgtatgctaagttaacattaatgaaaataaaaaatgcctagatttatgatacatgatatttttcagggccctcacagtttgtgtactttacatgccggctgccgtggtgagctccacgaccccacggcacccccgcgggctcggcagctggtcgtgggctcggtcggcggctggtgatgaatcgttctcatggggccaggcgtgcattttttttttttgcaaactcgataatttaaaaggaacattgcgcccgaatcgccctctgagaaaaaaaaatcactttataacgtataaatgtcacacatacacgcagcgccaagcgcgccccgcagacagggtgcaatctccattggtgccctggatggcgcgaaggcaggtacctacatttcaatcggaaatctgattggagagacggagcaggtcgacaacagcatcatcctcaattcctccggtgttgcgctctcagcccccaacccgggcgtgtttgtgtcctccgtcagacacgtcgatccgctaacctcgaacgcgacgctgtactacgatgaggcgacctccgagatcatgtatggtgtaccccctggagtcccgaaaggggtggacggcacatgccctggcgactacttgtcctggaacggtaccgagtggatcgctggtggggacaaagtcgccattggctgtggagcgggtgcgtccaaccaaggggcaaacgccatagccatcggtgccagagctggtgagaaggaccagcctccgggcagcatcatactcaatgcgtcaggtacagcgctcaacgcatacacatctggtttgtttgtggacgcgatgcggaaagtggacatgaccacaaacgcactctactttaataccgccaccagggagattgtttatggtgcagtgaacacaacaacggtgaacgcaggcagcgttgtagccggaactgcgataagcgataccctgcgttgggacggcctcacgtgggtcgcgggcggcaacaaaattgctctcgcgcactatgcaggcgagttctcgcaggggaacaagtcagttgccataggctttgcatccggccagtcaaaccagggtgtcgagtcaatcgccataggtgtgagtgcaggggggactgcccaaaagaactacgcggttgccataggccgatatgccggacaaacgtcacagcaactgagcgccattgcaatcgggcggagctgtggcatggaatctcagagcgcgggggccgtggcaatggggtacacgtccggccagacaacccagggggccgatgccgttgccatagggacggcttcagggaagaacaaccagggctaccgggccattgcgataggggcttactcgtgcgacagcgcacaaggaagcgagtccatagcgctcggcaacaacgccgcaaagatcacgcagggggactactccatcgccattggcaaatatgcggggtattccacacagggggccgatagcattgcgatcggcgacaatgctgggcgcacagaccagggtgccaacgccatagcgatcggcacaaaggccgggtattcggaccagtcgagcgagagcattatcctgaatgcctcggacgtggaactaaacgctccctactccggcctcttcgtcaagcccatccgcaacggcgggggggtcgcaggtgctcgtgtacgaccccgagacgggtgagattacgtacactgacgggccgcagagtggagatggtatatgggcgcgtggtgtggagactattaacgattccgacaccagcagcctggcgcttctagtacagcaaaacgagcaactagaggccaggctggcgtccgtggaagaccagttgacggccattcggggcgcgatcagagcgaagcccgcgatggacctccggccgtagtaggccgggttgccggatacgacagtctgagatactccttgtccagcgaactgagcttgttgttaaaggggaacgtgaccccgttgagcgtcagcgccttgtcaaacgagtacgtcatcagcgagtaccggtcaaactttgacgcccgcaccttggcctcgtcgtacgtcatgaagaagttctggtcaatctcttctctcgacatgttgttgggcggccccccaaatagagcatacacaaccggcttgttccactcgaggacctccctgacatgcggactctggtgctcgtggtcgagacccaggacgtgagcgaattcgtgcatgacggagaacccgttcgtctggtcgccattgcgaggggctgtcgcagggacaatgtactcgatgccgtcccactcaaaggcccgcggtgcatccaggaacgagaggttcatggtcgccgccaccagcggcgcctccagacacgacatgcccacgaagctaaagctcccggccgcctccacaaagctgattctgatctcggcgtacgcgtggtcctccacaaacataaaggccaggttgacgagggggtcaaacacggtgcgcacgaccttgatcacccagttccgctgccacggctggccacccaggaacttgatcctcaggatggcgccaactggccatgtcagactggtcaccacgacgctgcggttgttcttctcgtccgcggacttgcgggacacactgatacagccaaacgggggttttatcatgttgttttattatatcgattccaaaccctaaaccctaaaacactgtgagtttgatatctggtcttgtatattctccaccaatatcttaatctcacagatgcttatgtttgtgtcgtatgcgtcagtgctcagcttactgagcatctggggtatcatctcgtgagacagttgccgctcggacactgtggagtgtgtctgcagatccgtggacagctgggcgttttcgcccttgagctgcttgattgtgctcaccaggtcgtacttttccgtctggaacgtgcgctgcttctcctcgagctgctgcatggcggcggtgacctcgctgctgcgggcgctcagctcgctgcgcaaggtggcgacctctcgcgtcatacgatcgagatccccctgcttgcgtttgctatcctcgataatgtcggcctgtgccttttgcaccagcctggcttggtggatctcggaagcgtgggcgttgcgttccgcttctaaccggcggacctgcgcctggaggtccgcaaactgaccaaggcgtgccacaaggtcgtcctccgacgccaggcccgtcgtctttgctattcgctgggtggtctggtagactcggtcactgtaggccatgtttgaggtcataatatccaggtacgtgtccacctgctgggggataatgcgattgtcgattcggatatccgctcttgtcaagatccgctgcagactgccaaacagagtagcgatatactgggtctgtaggtcaagaacactcttgtcgcgggccgcctccgtctcgagattcatcagacgctccccgttgctgggaaatggcgctgaggggggcgtcgggtatggggcagtgtggtagggcgcgggcgctgaggtcggctgaggcgtatggtatggggcagggtgcggttgcggtcggtagccgaccgtgggctcaggcggggtggtcgagtatacagtacggacctcgccctgtggcgacgaaacggggttggcgtaggggtcgtaggacccagaggacgtgacatcagtcccctcgcagttaccgccgtcagagatgtgctccatagtgacggggttcagagtgactgacattgagattgtttcttgtaggtgtgaaagtctataaggttttaaacgtcgcagactgcgaaaagacgagaaaacaatctcgttttttcggaactcgtaggggtaaactgacagagacacaatgctgccctttagcgatatcaagatatccacccagaccattgtcgcgtactccgagtccaagttcaatatagtctacatctttgacaatatcaacctggacaatgtcacgcacgtcggcgaatcgaagaggggggatatcccccatacggacatccgtgtggacgggcggccgctgcaggacggaaatatcgtgtacatgacgtacctcaacagctcgaagggcgtgtgtgtgcggcgcaagcgcaccaaggggaaggccgatgataagggggaggtgtctgcggtgcccaccaagaagcactttttccgcaacgcgctgtccatagtcgtctttgcgtccaacaagctcatcaactacaagctcgccatgaacggcaaggtgcagctgacggggtgtctgaacgaggaccaggcggtgcgtgtcgtgagcacgctgtacgagcgtacccagtccatggataaccctgcgctggccatcgagtcgccgcccaatggctttgaggtggccttccgcgtcgtcatgaccaactttgacttcaggatcgacttccgtatagaccaggagcgcattgagaatgttatccgggccagccccgagtacagcaagcggctgatgacgtcgctggggtacaccggggtcaacctcaagtacgagtgtaaaaacttcgagtacccgcccatccgtgtgctcaactttacacacggcacaaacaggttcatatcgtttgaggagtttggggtgcggtacctgacacccgcaaaactggcaaaggtgctggccaagaaggtgtactcgacgttcctggtgttccagagcgggtgcatcatcctctcgtcgctgtcgacgggatcgtcggaagactcgttcctgtactttaaaaagtttcttgatgacaaccgtgcggacattgaagaaaagctcgacgagccaaagacgtttccgctcatgacgctggccaggtaccagtccattgtgtcgaaactctagtctgagctcgtggtggtctggcgggcccacgaggcaacgtcaggccttggagtgtatgaggatggtggttgtggtgctggcgctgcagctggcgctgccgctgcagctggcgctggcgctggggctggggctgcggctggggctggggctgcggctggggctgaggcctgtggggctggggctggagccgctgcggcgggctcgacaagggtaccctccttcgcgtcggtgcttgccgcggagacaaaccaagtccctatcagagggatcttgaccaggatgtggggtgcaaagaagtacagcccgccaatggcgagggctatgatgaaaatgatcatcaaccctttgttctcggcccagaaccgcttgtaccatggggcagtggtatctagagtcgccatggcgacggggttgggctggtcgaccccgacgtggatcgggtggacgtcatccgcgattttagtcagactctcattgcgctcaaaggtcgtctttacaatcaccgacatgctcttgtccacttccggtagacggatgacaaggaacttgttgctggacgagtccacgtccagcgtcgagttgccgttgaccgaattaaccgcatcctcaatctgtgagtcggtgctctccttgggcactacggcatactcgtagtaggtcttggggtcgctgggctcaatggtcagcgtcagagggggtgagtttgcatcactcgacaactggacccatgtaaactccgagtcgagggtgacggtttcttggctcgagtagatcatggtctttttggttagtgggtgtgtgttttaaggtcttttcggagcaagtcgaggttggcctcgaccacggctgccatggcagccggtctctgcgtcacccggtccacaaactctgcgaccgccaggtggtgcctgtcacccgtgtagccgagaaagtcgagggcgcaaagcccgtccactagcgtggcgtcgcgcatcagagccagggagggtgcaaagaccttgtcgcagtgggtgtcggcaacaaagcggaggctggactgcgagagtgggaccgggatcatggcgtcagagtggaacccaaagtccaccagagcggcaaaggcgctggggtcgtcgatttcaatgggcgccgagcccgtcgtgccagcaatgaacattggtagaggggggaaagtagcctgttttgtagagggtaaaaagaaaaataaaaaataaaaaaattaaatgtacacgctcgtatgatagggtaggaacggcatgatttcattcagggcatcgccagtgggggtggtggacggcaggcgcatttcaacgatagtctctgggagaatgtacgtcattgggctgcgccgatagccgagggcgatcacgtggatgtgggtcggggatacggtcccgtcgcgcggtgtaaagacaacgtggccgatgccataggggagtgtatcgctctgcgtgacgtgttcatttagggtgaagccgtgcctggtggtcagagatgcatatagggatttctcaatgtacatgtgtttgtccttgtacaggaggtcgaaatgggactgggcggagtaggtggcgggcttgctcctcaagaagcggactagtgtgtgcacagtgtcgatctgcagggcaatgtactgcgaggagcgacccagtgcgaggccggcggacagcatggggagccggaactgggcgacggtagggagctgatgggagacaaatcccgcccgggagacgcgggcttccgggtagcggagggcgagacgggccatggcggcatcgccggtgacgaggaaggtgagcctggggctcgagcttagcgccgcgatatcgaagccccttgcacctaggtgtgcattctgcatccaggagccgttgtcggtgggcggcggtgggccttcgttgtctctgggtgggagaaactctagtggcagcatgtcggcgttccaaaccacaaggggcagatgtgtctgggagggcgtgggtgttgccacgtaatcgcggaggacaagtgtgttgacgttggtgtctaaattgaccacttcccggtcctctatgtggggaaacacaaccagggcatttgttatgtgcaagccccgggagagaatgtcgatgcgtgcgggcagcgacgggcagtgtataattgagatatccgagccctccctaaagagtggaggggcggtctgtatgtctgcaggattgacgacggggtcggggcttccacccgcacccaaaggtgtcctatccgcacccaaggatggtgaccttaatggagtatcaggtgccgcgtttaacggtggcaagctgtatggggtttctctgggtgtcctatccgcccccaaaggtgaaaacctgttgtcaggggagggtgcgcccaagtatgggggccttggagtatcaggtgccgcgtttaacggtggtaagctgtatggggtttctctgggtgtcctatccacccccaaaggtgaaaacctgttgtcaggggagggtgcgcccaagtatgggggccttggagtatcaggtgccgcgtttaacggtggtaagctgtatggggtttctctgggtgtcctatccaccccaaaggtgaaaacctgttgtcaggggagggtgcgcccaagtatggggggccttgagtatcaggtgccgcgtttaacggtggtaagctgtatggggtttctctgggtgtcctatccacccccaaaaggtgaaaacctgttgtcaggggaggtgcgcccccaagtatggggccttgagagtatcaggtgccgcgtttaacggtggtaagttgtatggggtttctctgggtgtcctatccaccccaaaggtgaaaacctgttgtcaggggaggtgcgcccaagtatgggggccttgagtatcaggtgccgcgtttaacggtggtaagctgtatggggtttctctgggtgtcctatccgcccccaaaggtgaaaaccctctgttgtacagaggatagaacggggcttctccaaatggtgtatgttcatttgtgcccccaaatggcggcagaacaaaatcttcgtgtgcatcagcattcgtttgattcagaaccccgttcaaaaacgcatcttctccttcatctgcgtccgtgggtgttccactcgggtcaaagccgttgaatattgggccggttgcccttggttggggcgggttggcccgctgtgtgtggattctgggtaggataccctccccccaattgtacggggtgtccctagcgggtgcaagggcattcgatgtatttagtgtgtgcaaggacgcctctgactctgtggtggtgtctgacgatgcttcacgactaaaatccgggagcgcgtttgcaaggccattccctctacttgtcatgtcttgcgatgccccactactgatccctgaatcggggggcgcatttgcaaggtcattctcgatagcagtcccgtcttgcgatgccccgatccccggatcgaggtgcgcatttgtaggatttggcgtgtgcagggacgactctgaactcattcttttcattaatgttgtttttttatattttttttttttagttaaggtcgataaacaagtacccaaaaacgactcgtacccaggatgaatattgactttaccgcgtccacgaaccccgtcggtgaggtcgttgccaaccagctgctggccaacagcgccgatgcacatgtctcccaggacggaacgctggagattgccctacagcccaactccaaccgcaaccggggcttcgaccggtctctcgcaaccggcaacgtggtcgagttcgagagcgccgaggtcagcgcacagactacaacggcctcgtcaatggtgtacacgcagaactcgcccttctcgctgaacgtcagcctcaagctgggcgtcaacgtgtccaacgcgaccgcgggtcgctacgagctcatccgcctggtccccaatggccttggcaaggaggtcggcgacctgcccctcgccgcgctcaacgtcaagtcgcacctagtgacctttaccagtcccgcgaacctgttccccgaaatgctggttggggccctcgacatattcaaggccaacatgcacgtcgtgcgcatcacgggcaaccccagtaccagtggtgtcttgactctgacaatctttgataccagcaacaacattgtgtttgccaagaccgtgtccaacgtcgcgctctggaagaacaactacaccgccatctaccccaagattggcattcaccgagagaaatcatccaagtacacggtggtgcaccaggtgtcgctggcgaccctgtcgtcgtcgtcgacttccatttccgatccccagagtatcctgctacacaccaaactcataggcaaggagccgcctcccccacagtccgttcccgataccaccatcacctacaaccccgaggtcaccacgacgaccacgacgaccacgacgaccacgaccaacggcaagggaaaagaacccgccacgccagacaagggtgaaaatgtaaagggcaagaacgccgccggccagaccgtcatcgtgcaggtgtaccacacccccatgccccagacacagggcgatggcgcgcagcctcagatagtctatgtgggtgtgcccgtccccgccgacagctccctggggacatcggtgaacaacacatacatttcgtccaccaccgacaactcgactgtagactacacatcgaccgactacaccaatatcgacggtagtagcaccaacaccaataccaataccaataccaataccaacaccaatacgaataccaacacaaacaccgacaccaataccgatacgaacgcaagcactggcggggacgcggctgatgacatagatagcagcgaggacgaggacgatgacgacgacgatgacgaagatgaggccgaggacaagaagaagaaaaaggaggagaccacaaccgccgccgtgccgcccgccgagtccggtgggggtaacagcacgctgttgtatgtggggattggtgtagtggccctgctggtagtgggtgtgttggtgtacatgtacatgaaaaagagc

SEQ ID NO: 97 - DNA, 20918 bp, unidentified
  misc_feature 1..20918: note = Fanzor polypeptide
  source 1..20918: mol_type = other DNA
ggtgccgttctcgcgcaccacatagcaggcctgggtgtccgtgagcacacagaacgagttgaggttggcaatgatggcgcgcggcatctcgccaaagtccacccggatacccggctccacgatgacgtacttgccgtcaatgtacgccagttttttgcgcgactgcgcaaaccggtacgccaccggcaccgacagattgtccaagatccgccgggggatgcgcgccgagtgcaccagtgacacgggcttggccatgccgcggacattgtcacagagcacattgtcaatgttgatacacttgggctgcgtatccatgtttggttgcttgctgtgtgttgatttttcactatataaatccacttaaaggtggttttgcgtctcacttttcacttttcacgagactttttacccccatcccccacttgttctagtagtatacacataatgcaggcttctacagagaaatccgtcatgatggcgctcacctcacgcgatacccccgaggcgatccgccggctcgatgcactgggggttcgggtccgcccgtccgagctgccgaccctggcccaggtgcggaagcacggcttctacgactttttcgccgccgccctggcccgcggctactacgcatccgcctcccgctactacatgcagctcaccctaaaggctatcgataccgagtgcaccctgcggccgttcatctacaaccccaccatggccgacctcatagtggtgccaaagctcacgcgggacattatcaacataaaatcgccctccgactttgaggcttgtgcgatagaagcgtccatgtctacggaggagtgggccatctttgtccggcactggagcaggtactttgccagccccgactgcgacgcactggtgctgccggccctcgacattatgtgcacctggaacgccttcaacatctttggccccatagcccgctccagtggggtcctcacaatgctcaagcagatcctgcgcacctgcgtggcacagcaggaccccaagtacctctacgcgttctgcttcgaccacacgtacctggcgcagggtatattttccactattctggccgccgcagcgccaatggtggacgacctggctccgctggtgttcctgggcagctacactaatacgcgcgtgaagccacgtgatctctgggtccaccgcctgggcatagtcgacccgcaccggccggtcggctccttctatatgctgctgctccccgaccacagcagtctggtgtgggacggcgtcgtcatggacctgctggcgggtgtctccaagtacagttttgccttctcaaagacccggctgacgatacagactctgagcctggcggacatgcagaggtactttgtgctgccgacggcccccgcggacattgagctcgtcaagaccgtgtacggcacggcgctgcccgagtgtgaattgtttggaaatgaaacttaataaatttttataatttttatttattattgtaaaactcaatctctagtccctaaacgctagacgctcacagtgaccggtgtggctcggagcccacaggcccccatgacgctctcggcgttccgcggcagccggaacagcccgcccgagccccaggaggaaccccacgagttctggacaaggaagctcgtctcatcgtagccgaccgccaccacggcatggttgaggggcgtcgtcaggtcgcagcccgtaaagacaccgctgcggtagaaacgcagggctgtgttggcggctatggcgatgctcacgggccccgtctgcagtgccctcactaggttgtcctcgtccgcgagcgcgtccacggtgtggaaggccgtgatgtacgttctctccgcctggtagcacgcgccgccccggtggcagtacgcctccgggatctcgtacgcgtacttgtcggccgggcacacgccgtagtgcttcacgtaggcaagcacggcaatcgggtacccgccgtcgcagcggaagttgccaaactctcccgagcagtcaatgatctcgccaatggagaggcgcaggtgctcaccgtgcttgatgtgccagtgcgcctgcaccgtctcgagggccgagaacgcgtagcacgagccacaggccccctggttctggatcccggacatgctgccagaccagtcgatggacgccttgacctcgccggacaggtccagggggtgggccagcatgtcgtacccgttggggcggcccatgacgaacgggtgtgcctgtgcggcaaactcggcgtccgtgaggtcggcgtactcgttcaggcccagctcgtaggactcgttggcgctgtagatctcctccaggttctggcagaacacgcgcttgcgcatgctggcctccgcgggactcgcatacaccttgccgtagtcggccacgaagcgctcaaaggccacgtcgcacacgctggtgtagccaaatatgatgctggataggaagcgtagagccattgtgattttttttattttttttctggtgtgtcctataattgtgttctatacataaaagtgagattcgctttttttttttggtttagattgaaagcaccagggtgctaatggccggaacgtgaatcatgccaatgtcaaactgcacaatgggctcgtagccatactcgtccagcaggtcccgcaacgacgcccgggtcacgtgcacctgggcgtccaccacgtgcagggaacgagacaccgtgtccagggccgggtcgtggtgtgtctccagatggtccgacacccggtggtaaaacgtctccaggagctggatggcccgctcaatgaactcgcgcttcatgtcgagctgcaccagcttggtgcggtaccgggccgccgccgccgcatccctcgctgacccgaggtaccagcgccgggcgagacggagggcccgcggtggcgcctcccgggccgccgccaggtaggtgagcgacaggtcgatgaggaactcggccacccgacgcgagcggctcgcgttgacggggctgatgatgttttcgatcgcctcggtgatctccaggcccctgcggcccccgctgccgtccatcttgaggcgcttgccgccgccgtcgaggtactccgagtagtgggggttgtgcacgaacccacccacgatcggcttgccggtcgagtacgagaacatgcatgccttgcagctcgtgcagaacatctggtcgcacccctcgatcttgtagacgtgggacttgcagttggggcaggggacgctgttcgagcgcacggtcgccaccgacgccacggtgtcgtcgtcgcactcgtggccctcgtccagcacgcgctccgtgcaccgcacacaggtggacgcctcgcaggtcacgcagtcgaccaccgtgcagttgggcgcggggtccaggcgcgcgccgcagaccgcgttcgcgcagacgatgctggcgatagtcgggttgtggtggaactcgaggacgtgggctcgtcggtagagctcgtcgacgcggctccggggcataaactctgtgcccaggcgcgtatggatggcgagcacctcgtccatggtgctgtggtgcaccgagtcgcggaggaagaggagctcgccccgggcggccttgatcttggcaaactgcggcttggataccgccgcctggatgtcctggtacgtcacggcctccaggcagaacatgcaggcccagtccttgccgtccgtggcctgcaccttgtagtgggtgaaccagcacgtgtaacaggcgctggtgtggcagctcgggcagcccgcgccgtcgcggtagtggggctggacgatggcgcccatgtgggagcgcttcgtgccggtgcgcagggttgcgtcgacgcagatggggcaggtcgtggcggtggtggcagtggcagacatggttttgttgttgtcgtttctggcgcggaagtccgaaagtgaatggttttctggaaatgttgtgcaatatataaaagcgatttttctttttttattttgttccctctctctctctctctctctctctctctctctctctctctgggttttagggtttagggtttaatgggttttaggcggcgcatcagactacaagcatgactatcccgaaaatcattcacttgtcctacaagagcaggtccagtttacctgaaaagtggcgacgtgtgattcgcgcttggcaccaaacacatcccgactggcacattgtgttctggagcgatctggacaatgagctcctggtccagcaagactttccctggtttttccagacgtacaatgcgttccgctaccccatccaacgcgcagacgccgtgaggccctgctacctctacaagttcgggggcgtgtacatagacatggactatctgccgcgaaagtgcatctctggtctgtttgcgggttccgacaacgaggtatacctgaccacgtcccccaacgtcgggtcgtcgttcaccaactcgttcatggcgtccaagccgcgggccaagttctggatcacgtacctcgaatcgatgatggacgtcaaggtaaaaatatactggacaaagcactttgaggtgatgaacaccacggggccgggctcatcaacgcggcgctcattcacccgtgtagtatatgtacgtcggaccagtgttcgtccgaataccttacgtccctggaaggcaaaagctggaacgggctcgacaccaagctcatcaacctgctattctgccaaccctggatgctgattgtccttgcgcttgtgtttgtgtttgcgcttgcgctgctggtgcactgggtgtaccctcacaactcgacaaagcccttgtagtcgttgtcttcaaacgtgcactgcacgtgcacgttggcattcttgagctcgtacacctcctgcttgtccccccagtcgtagaacgcgtggttgatccactccgtctgagaggtatccgccagcccccactgggccgctcgtgcaaaccaggtcttgtacaggtcgggtgcggccggtgatatgagcttggactgcaatgatcccccgaggcatacggcgccggcgaggtggccctcgggcgtcttctcgtagtttgatgtttgtgtcacctggccgcggttgccgtcgtcttctgctgggccgtttacctctacaaagtctgtcgataacgaacagcctgtgttgttgatcagagcgttaagcgctttcattcgcacacgcgcctgctgaccaggtagcggatctgaaatcgtcaccatatttgcaccacagatgttggtgtaaaagtcctgtgcaccgcgcccacacgtgcaccgcatgtgcataaagtccgggtgccgtgcaacaacactgtgtatcatttgcatgtacgcaatctgtgtcgccgaatcggctgtggggcagcagcccatggcgtcggccttgatgcccatgaccccccagctcttgagccgctggacaagggtgtcaagccagtcgatggcggcgtccgacggcttgatgtaatggtcgtcgcccgcctcatcgccaatcgggtcatagccccgacccaaggtgccaaactcctctgcggcatagacatcgtcccaggtcatccccagtgtccaccaaatcatggcctcctgcccgttggctttgagatcggcgaccagtaccttgaactcgtcgaggctgcccagcgtgtcgccgttgacgccctggaagtcctcacccgtcgaatagcccccgccgccgccgccgccgctgctgctgttcgcgctgctgtttaggttcgcgctgctgtttaggttcgcgacgctatcacccacggtcccactgtcgaaaaggtagtatcccgtctgtaggtcgcgcatgacggtgaagcagttgcgcacgtccgcctcggtgaagctctcctcgaggtggtacgtggtcagagcaggcaaaagcgcccatttcggtgcaggctttgacgacaggccgtgtttgcaattcatcacttgtgcgtatttccgcaagcagttccaaaagtcagaaccaggtgcgaaagtgtacacgcacgtcttgggcgagttgatgagcgagaggactacactacctccgctaaatgtggccttgccggtaatggccggtgtgcggtgcggtgacgtgtttgcaatcatcgtagccccggactcgtcgtacactataaagacgcaatggtgtcaacttaagcgattttctttttttttttgggttatagaactattgttttcaaattgtcaatatggacaaattaaaatcattttgcaacctccaagaccacaaatggattcttcgaaaacggtctataactacattcgacgtcgtcctccactacatcctcactgctgtgttgaacatcggtgttcgcacagcagttgccatgtccggttgtacgtgttcccccacggcaatggcaaaggccatgaatagaattccctgctacgtactcgaatcgatattgcgagagtacacgccacaacaaccatatccgttacggatgcaaacaattgcggttgacggctcgtttatccgccttcggcctagactaagggcggattttaaagtgtcgaggaatagccgtaaatatccccatgcgctaattagcacaatgtacgactgtcatacacatcgcgtcgtcgattcacaagtttttgtatcacacaacgaacgcgacgcatttcttgctagatttgtatctcgcggtgatatgtatgtatttgataggggctatttcagccggacgttggcggacaaaatacacaccaaaggatcgtactttgtctttcgcgttaaacataatcagagatcattcccctcttacacacggcgacactcttacatacacgacggtaagacgtaccatgtcttaaccaatctgttctgtactaagtcctgggcagattgcccaggcgtatggacatcgctggaaggtagaaacttactttcgccatatgaaacagacacttggcaaccgggtctttcagaagcaatcgattagtggtatgcagaaagaattacttgtcaggcagattgtggacctcatctctcgccaatccgattcggtgatgtggagtaggtctgatgttatgactcaacttgcaacattactccgagatcatactgcaccacgtcgatcaaaagcacctcatgtgattgaaatgtatccaattatatctcttacacctatatcgcgtggaatagttcttaccagatcaccaccagcgattgatggcgttgcgactgtattcaattggtctagatgtaaatcgggaatagggtaatccccctgtgtccaagaaacatggctgatccatggaagacatcctactcttaaggtttatgaatcggttttgaatgatgatacgtaaaactcggaattagtatataagggcattcaaactgtcaaatacaattcacaattacactgtgtatgttttatacagatagatttgcaacacaatgcccctaatcagcaagcgatcgctctacatcgatcttgcaacctgtgcgaatcagacccccggacttaatgttagtatgatcgacaagacatccgctgagatgatcgaggtcttagcgggatacaatcacgctgtcgtaggtggatttcagcgtctggtctttgttctacccctctaccaagttgactcaatgaaatctatgcacaagttggtgcacgacgcaagatacaagattaaccatcggcgtactccacctatcgtctggccccatgtgctgatagatgcagcccgggttggcattcgtcgcaaccatgtggacattgtttctagtgtcgatcctgctcgatggattgcaacaaattcgtccaccgaggatgttgtgctgactagagataaggtagtactatgggcaagaggtagacacaccaccaacctcaagtacttgtactcggcagttgactccgacatgattgagacattagacgactatagtaatacacccacacccaattcgatcattgactggtgcgtgtacgaagtaggaacactacggcgagcgtttgccatgtcaagaatgacagtggtaaatgccacccacgccgatcgctgggaccccaatctatttcagtctcggcgcgccgaggatcatgtagatcagatgatgcgctatatcagggccgagtatgaagaaatttcggttaagcgcgagaataccacgggtcgagctgagtcgaaattggacaagcggttggctgttttggatgcaatagatcgcatcgatattagctggttcggacacctactatgtcgcatgacatcagatagcccagtcgctacgcgtgggacgcctatgcgtgcatttgaacaatttgacttgtttcacaacggggagctgtctttgtcacagtgtttgggggaggagaagcatcaactgcttcagaaggtcgcaagaagtgcccctaaacgaaaattagcatctcgcctttggaccaggcagaaacagaccaaagagaattcatccacccaacgtccaaagaatgggagagtatctatacctagaacacacaagttcacctgggaagttggacgcgaagaagcactgctctactggggtgtgaagaatgaaagacccaaccgctttgtcgggttgttagagatggcggacactggagcattcaagaagctgggaaacgatgaaactatagactatgatccgacgtcgaacaccaggaggcctaaaggagatttgctgatatgtgaaacgtgtggagagcgcgttcaagacctgatgaaacacaccaaggcggaacattggttggaatgtccagtgtgcaacaagtcattcgagactctcaaggaccacatatgcgtcaagtgccccaagtgctgcaagacaatgtcaagtctaaaaaaaagcacaagtgccagatgtgtgggaagtgtgggtcattctatgcaacgcgacactattgtggtgagtgtagcgggtgcgatgccaagtttaaatctaagaacgctgaagatgcacataagtgtcccgggaagacgaaggaaaggtctgtggacaacacatccaaacgacgcctgacgaaggcgtctgaacgagactctataggggtgttgaagaaacagaagttggacatcgactctgttgcaaaaaattatacccgtgaagagacggaagcgcagcggggattctaatgttgtgcgcgataaactggctcttacaaaggggagtaagcgtcaaaatctggatggatgtagaaatagaacaaggtataccaccattgggcgacttccacatgcaaaatacaccatccatagatacatccagcgatgtaatcgggagtggtacaacaggttgtcgttgtttattgatggagcgtcagatagaactctcgaggacttcttggtgtgtttctgggattagaagccggtgtagcttcggttgacgtgggtgagagagtgtagaagatgtggtgggcccacttgatgatgacatagctgccggtgacgagctgaactctgacgtagactcggtggatgtgaccaaattggctagtcgtctcaccgccacggtaaaggatctggtatacaatatccgacgaaaggattggcgacatcgtttattgaggtgacaaagctattttgtcaaaattggatagagacattgcagaggcgatatgctgaactccagttgcttgtggacacaccggggacgtttcaggtcatctattcgaccgtgagaagtcatgatgatattgttttggacaagctaacaccagttggtcgaaagctgccacttgcaatccgaattgatccttctgcattactcgggatggcaaaatcgtgttggtccacaaccgagggtcgaggtcggaagataccaacagtcgacgaatcgcagtacagtcaatttgatgtagttcccaacacagaccaattgacgggtatgcatgtgcttatcggcaaggatcttaccctggaggttgtgaagcggatgaacaaggcgaacaaactggtaagaccatcgttgatgatctcgaaaggtgttgtgcgactacttgagcgagttcccgactacaacaagacgatgaagatggggtgatggggtcaaccttgagactattctcggatcggagtataaggctggtggattgtttggttcagcaaaggtgggtaaacagattaatcgaacatatctggcaacactgaaagatctgtatgcacagtatggtgacagtgcaagagcaaagtttgtcaaccgcccgattgtgaccgtggacccgaatatgcatgaggttgtgtttggagtattctatccatccagactgagggtgaaatatgttgacaacgatatgtccgaacacacaaagtacaaggtgtcagtgacgtacaggacatttagtgtgagtgcagctacactgaggaactcgtcgaagctatggcgggtgtacttggcaaaacacccgatcgcgagggaagggtcatttgcaaaagtcgcaaaatctgtatttaaatccgaagctgtaggtgcacgtggactgggtgagcggctgaaggtccagtttatacagcacgtgatgcggatgttgtcaaggtactgcagtgaagggcgagctggctacaaaacactagatcctattgtgttgtatggagatggacaatttacgagcaacgcgaaggggcttgttggcttcggacagacattggttcgagagttgagcaaacactgttttgtgatgttttcagaagagttcagaacatcacaggtgtgttctgtgtgtcatacgaacgagccgatgactcctgtagctgttgggcgtcacgcaccgtttaagcacatgcgctgcatgcattgtgtgacaggtgaaggtgtgacaaggagaaatctattgtttcagcgagacgtgaatgcgatattgaacatgtttcgcaatgcactggagactacggtacttggggatgtcgggaaggtcttcagacgaacgaggaatacacgacgagccatagggtagatatatagatatatagatatatagatatatagatatatagatagaaaaatcatgggatttgccatccaaggcatacccttttaaattcagaacgtgccgttataggaacgcaacatatagacaattgtatgctaagttaacattaatgataaagacggggattgtacccaggttgttcttgtcatcgccggcgacgccatcgccactactcagcacactgagctggtcgtcgccccatttgcctgggaagccatgccagcacatcaccttgctgcccttgggtgtaaacgcggcgctcttgtcaccagcccggaaggcgtgctcgcggacaagtcgatcagtcagtgtggccccgcccctgtagcccgacgagcccccggcggcctgcgtggggctccgcgtgggtgcccgtgagctgcgggccagcaagttctgctttgcgttcttccgtcgatcaaacaccgatacatagggggcaccctgtgcggggggcgcggttcgagaacgcatcccccacaccaccagggttactagtagtattacaagcgtgactgctaggacaattagtttcatattttatttatcatgttccaaaccctaaaccctacactagccacggccacacagtaggccacccgtcaagcacgtccacgatgcgtgtctctacatcaagaaacactcgctcgcggtcaacccagcgcccgccgctgccctcgatggctcgctggagctcacgtcgccgctccctggcgtagttggtgtagttgaacaaaaagtgcatctgcgccatccgcgtggccacgtgctccacacacagcggctgctcacccgccacatacgcctcgcacaggctgctgtcgggccttctggacagccccagtctgccgagtgcgatctccagcgagatggcccgctccgccctctcgtagcccgcggccatcgccaggaaacagtctacactcgcgtgggtactctctgcatcggccgccgggtgcagcagcgtgtccgcgctctgctgcagatacgcaagctgccgacctagcgtcagtcgggccagcacggtggcaacgcactcttggaccttaaaagccctaaccccagacacgggtcgccagaccctcctgtcgagcagcacggtgcgccagacaggcggcacgagctgcaggaccgtgttcatcgagcgcagcgccccgagcatcgagtccaggtcaatgccctgctcgttccgggccacccccagcagcagtcctggatcggccggggccccgaacacggcctcggtgaggtagtcaagctcgcacgcagcatcgattctctcgtacacgttgccacagagagcccacgtgcggctgtagaacaggtagcccagccagtccaggcccttgcagtacgcgcgcagccgcaactcctctatctctgactcgatggagaaatggcgcttgaagagcttgccataacgcacgaatttcttcagggttcgctcgtgcagaggcgcaccgggccacagtgtcaggacccgtttgatgcgctgcacaggtgtgtccaggacacccttctcctcggtagtgtggaacgcgtctgcgatacgcttctggaacaagatgttggtcgtaacggccctcgcgtccctagcagacacgcccttgccctcgtggaaggccaggaacctgccaaggacctcccggcactcgtcggcgctcccgaggtctacgcccatgggcggctcccccgtgtacatacacaacaccaggtcgatcatctgcaggctgtaggtgttgaccaagcgcttgccgtaggggccagggcgagtcgcctgtgtgtagggcacaagggtcgagggccagccggccatgcgatgggggaggtcctccgcggtgacgggtgtgtcggggccctgccgcacacgcatacccaccaccagagcgcacatgcgctcccagtgccgcttgggcatatcggcggcgacgtgcctggggcagatgcccagccccgggatgtccgtctcggggctgagccagtacgcgggcacacgtcggcggtgactggccatgcacaggaagcagatggacgccagcttggcgcagaccaggtcccgccatgtctcggagggaccgatttgtttgcgcttgacgcgaaacgcgggggccacaagtcccagagcggcctcctggaacggcaaacccggaagaacataggtgtagattctcgctgcggcaaggagcggtttgacctgctcaaacgagagcgtctccagaccgggtggccagcgatcgtgggttgccacgtaatcgaggacggtgtcgatggccgctggagagagatcgccggtaccggaagcctggtcctggccgggtgcgtacgagttaatgtctacgagcattgttcaaacctgaatgtttcaaaaggtgtgagtaatgaagatatggcaaaagggaatgttgcttatatacggaaatcaacagagtttattcacttctctagccacggccaggcagcgggccagccccccttctcgttgacaatacgtctttccactccggcgtatacggcagtgcggtccacccaatcgccgtggcacctctgtcgccttgccgcctggaaggcctcctgtcggtccctcgcgtagctagtgtatgaaaaaagatagtgcatctgcgccatgcgcgtggcaacgcattccacatcgagtccaccggcggcaatgtactgctcacagagacgactgtcggcacggcgctgtagcccaactgcgtcaagcgcattatgtagtgccacaacgcgcccaatgtacccagtgtcgtcgatgcccctggtgtcctgcatcaccctgtcctgcagatcgggctccacagtgcccagaatcattctcacgcaaacatagtggttcacgttgacggtggtactctcaaagtccgcgttgccccccaaggtggacgacatatactgctttataaacaacaactgatccgcctccgcaagcctggtggtaacaacacccacgcaagcgcgtagccgggactcatcaagccccagagggacccaccgtttctggtgcagcatgtcgagcaacaaagcgtgccaggtctctggtaccacacgcagcacaagggttgcacaccgcagcacgagaatggtgtgctgtacatcccgggtggcggacttaaaaataaagtccaccaaatcttgcggctcaggggccatgtcgagggccgatcccgtctcgtggcactcggccgcggcatcaatgcgttcaaacaggccttccaccagacaatccccggccttcttgaagtgggcctcggtgagccacgcaaggcccgccgagtaggcgcggaccttcagctcgagcagcgcattgtccagcgaggcatgtctcacgagcagcttgccggacttgacgaagcgcttgaggtacgctgtgccctggatatccacgcccggccacatcgccaaaacggtgctcgccctctgctcgggtgtctcagcctgggtgtctagcacggagtctctcgcccggaagcgttttgtcacatactcgtcccagaggtcggcggtggccagcccccgcttctgcgtgaggggattcgcctccacaaactcgtctagttgcagtcgagacgtcgcgagatcggcgatcgcgcgagaggggtccagatccggtttccccgtgtacaggcagcgcacgagggtgacgtcctcctccgcatagatgttgctcacgtacattccaaagcgcccgcgcatagtctcctgtgaatacgggataaggtgcgtcggccacttgcccagtacggccttcatgcacgcggtgcctaaggctcgcgtatgctcgtacgcgaacggcaaatcccgcacggccatgtacatgcggcgccagtggctcgcgggcatgtcactgagaacatgcttggcacacatgcccagcttgaggtcgtcacacgcctcgctcagccagtacgcgtccacacggagtcgcggcttggctagacacaggaagcagtttgtggccagctgcgcccgtacaatcgagcaccagctctcgtccttcctgagccgcttgcgcttcacgtggaacgccggggccatgaggcccagcacggtttcctggtggggcataaacggcaacaggtaagtgtacgggggagcagccgagagcagcggctggagctgcaggaacgtcagctcctcgagcccctcgggccaccggtcctgggtcgcaacgtggtccaggatgcgctcatggatggccgcgatggccgatgtggcgcctagaaactctgctgccccaagcgacgacatttcggggaagctggccacaagcacgtctcggatgacgggggtggcaaaggctagtggccacggaacgtctgcatcgaacacgggggcgtctttgagaagcgcacaagacgagcgctccacggtgctgatttcaccgtcaacagtggactgaacaagcatgatgaaataatggaggatatggaggatagtggtggcagagtggcccttttgtacaattttgtagtagtgtacagtcccgaagactcattttgcctgtaggccacgagacagcctcgattggtggtcaattcaacccctgctcggcctgggcaatgtggctggatgtgtcgcgtagtataagtccctaaatcggtctatccacagcctgggagtgtgatcgttctctggatcgctacaatacatgagatgcaaggcgacggcatacactggcagatcattgtaatttcttcccggacctattatttcaatgatgcccctgagtgcggcgtcgtgctcctcggttttaaattgagtctgtctcagttttgcaacgaacggccgcagcctgtactgagatttattcagtttgtttatcaccgtgctcatccggatgacacagtattttgtggccaaattgtggtgagcaatggcctgttcgtcgacgcatttaaactctgataaacattgcctttttcgtgtagctggcctatcaagtgcctcattgtcccgtggacgaggtgctgggtgtgtctggggtgtggatggcccaccctcattgtcccgtggacgaggtgctgggtatgtctggggtgtggatggcccaccctcattgtcccgtggacgaggtgctgggtatgtctggggtgtggatggcccaccctcattgtcccgtggacgaggtgctgggtatgtctggggtgtggatggcccaccctcattgtcccgtggacgaggtgctgggtatgtctggggtgtggttatagtgtgcggtggaaattgaccacggatcaatgcacggttgtcaccccgcgtgtactcgggggctccatcggcttgcgctctgtaccccggtggtgtggtccccgttagtgtttttaacaggttttcaagtactattgatcgcttgtactgtttctcgagcttggatacaacattatacattgatctcagatccgccattgagtccaggttgatcactgcaagaatgccgatctgctcatctatacatgtttgtgtgtgctgtagtttttttatagccttctccttaacgagattcgtcatgttgttttgttatgtaacgataaaaaaatgtttagctagtctacacgcggacgcttcctccaggaccctctttcagactccccctcagtgtaactgactggactgttgagtacagagtgtccatcagagttccgatcagcgtcgtctgcctgagttaaacgttcgatcgttatattcagatgttcgatggccgcatacaattcaaattgacgattatacacggatgtggattcaaggcataattccaggccccggcttgaatttcttgaaccaacgtcgactaattcgtcgattaaatgaaatatgtattcattattcctgtgaaattcgtccagcaattttaaaacggcggtccgtttttgctcgaggagctccccgatttcacctcggatcgtgttgtgcatatttcattaatgtgcatatttagttaccgaaaataaatttcatttgtacaattttgtagtggtgtacagtctcgaggactcacctaggagcagtttattttcaatgaatacctagccacggccacacggatggccacccgtcgagctcgctgacgatctgcgactccactgtcgcaaacacagcctcgcggtctacccacacgtcgcgcccactgtccgctatggcctggcggaatgcatgctccctcgccgtcgcgtagttggtgtaattgaacaaaaagtgcatctgagccatgcgcgtggccacggccccaatgtccagcaggctgcccatgacgtaggcctggcagaggctactgtcgccccgtacaggaacgcccaccctggccagcgcgcagtgcagagccaccacccgttcaatctgggtcgtgtcgcgcaggccggcaatctccatgtacaccgccggctggaggtgcggcggcatgttctccagggcaagtgccatggtcaggaaccggtcgacgctgtaggccgtaccctccgggctcgcctgcacgcccagcagcaagttggcgttctggtggacgtacatgagctgctgcctgggagtcaggcgggcgagcacgacaccaacgcaggcctcgacagttttagggtccagtcccgagtgaggctcccagatcgtgccgtcttgcagcataccccgccaggccatggggacgaggccgaggacaacgtgcatggagcgcagcctgcccagcgtcgcctcaaggaccggctgcttggtctcgaccagccccatgagctcctcggcatccacgctcgtgccccacacggccatcatcaggtagtcgtactcgcaggcggcatcaattcgctcatacaccccctcgtccgagacgagggtacgcgggttgagccagtcaatctcactacagtatgtcctgagccgcatctctgcaatctgcgactcaatggacttgtggcgggcctgcagctcaccggatcgcacatatcgcttcagcattgttctcttcaccggagccccgggccagagggtgaggacccgctcggctctttgcaccttggtctctgcactctcggcctttgcgtcccggcagatggtctctgcaacacgcttctggaagagtgcgctggcttccatgaccctctggtccctggacgtgaccgggctgctctcgtgcagggccaagaatcggtccatagcagcccgcgactccacaccaccgagcctagctccaggcggcgggctgcctgtgaatagagcaatcacaatgtccaccatttgtcggctgtagcggttgatggtatagtttccatacttgccctcaagcgtctgctggctgaccggaacaagaaacttgggccagccggccagatccaccagcagggctttgacggtggtgatggcttcgcggccctcgcgcaccaggggcatggtggatacagccgcacacatccgctccgagtgcctcggcggcatgtcccggcccacgtgcttggcgcagatgcccttcaggcccgggatctggtccttgagccagtagggggcgaccagcttctgcggcttgagcatgcacagaaagcaaatgtccgagagctgcgcgcacacaagctcgtgccacgtctctggatgctggaggcgccggcgcttgaccctaaatattgccgctgtccgctgaagaacgagctcctggaagggcatacccgggagcacgtacgtgtacgccggggcagctgcgaggaggggcttggcctgctggaacgagagggcgtccagtcccggtggccagcagtcgtgggtggcgacgtgatccaggatggcctcgatcgactggtcaagcggccaggcggcggcaccagcatccggctcaacgcagtggttggggtggtcggctacgggaagatggatatcaagcatgatgagaagaagaatgaaaaaaatgagacaaggtgcacgacttatatacagattttcagaagcgagggaaacacagaggggcacggggcagccccgattggtggacctttttagaattgaaatatcgaaacatgttttttttgttcttgtatataaagcgcctgaatacacaaaccaaatcacacttttacaacaaccaacaccaacaaccacaagccaaacatgatttactttaccgcactctgggctctggtcttctcggccacagccaccaccaccaccaccaccaccgcggcccacgatgccaccccgtccatggtggaaccgtcccatgctgcacccacggcggtgtactcgccggtttacctccccgacattcacggcgtcatgttccccatcaccgtcactgtgaactcgaccgactctgctgtcctggacgactacatcaacagcgtcaccgagtccatcaaggtcctggcaccccaggcagtcgtcaatctcgtccccactgccagcgcccgtgtactggatccctctgcgggcaatggcaccagcagcaccgcctcgggcactgtggaggtccgtatcccctcacacaagtacaatgcagtcgtcaacaacatcaacaacgtcgtcatctctggtgataccggaggctccatcacaataggcaatgatgccaacatcaaccaggaggagaatgttgtcgtcagcgtacccggcaccacgagccccaaggccagccccagcccgggcgccccgggctcaggagacgaggagtgcagccccgggtgccccgcgagctatcccggcgacgactactgcgacctcgaatgctatgtgcccgagtgcaactacgacgatggcgactgcgagctcgagtacccccctgtccagttcaccaaggagtgtcgcatcacacaccccgatcccgagctcaaccagtacctggacattgtctatggcgttgcagtcatggtctcgtccccgccaccgcgctggaccctcgagtacgtctccgacacccagttcatgatgcggcgggacgacgagtacctggtggcggctctcgagaccgaacccggctccaacggggacaatatccttctggagaccagcaccagcgcagaggccccgaacaacctgtgggtgttgaaggagaatggctttatcgagaacgacatgaactggtacatcatagtcaactactcgagcagctgcatcgtcaagctcatggtcacgggcaagtaccaagtgtacgctgaccagatctgggagtttgtggactgcatctaggggggttttttttttttagttaagcgcagactacacaatgaataaaaacacttgaacaaaaaaactctagtctttaaactttttcgccaggcaagatggagaactggcccgtgatttacatctcgcaatcggcgtttgcgctatgcaacttttacggtgtgggctcgggtatgaaccagactgcattgttttttattaccgccgcctacttgctggggctgtcgtttataatgcgactactgtttggtctaccacaagtggcctcgcttgctatagccatcctgtggttcctcttttcaatgtatcgggtatactcgacatcaaaagaaaagaaaaagtacgcctatgccgtgggtgcccttgtgtcgttcttggtgacgatatactttggccagagaggcggtggtgggtttgggcgtggtgggcgtggtggatactaggtgaattttattaaaaaaaaaactttatttttatagtcgcacgagtgtctcggcactacagtcgcctacgaaatttcgattacataaacatatatacatacatgacccttggcctctccgccattcgggtcttgtctgtgggaggtgtaaggcttacaaatgtttatcaaacactcttgatgtatgcaacttaagcccccaaaacacccaaagaccccaccacccaggcccttggcatctcaccattcgggtcttgtccgtgggggtgtaaggcttacaaatgtttaccaaacactcttgatgtatgcaacttaagcccccaaaacacccaaagacccaccacccaggcccttggcat

SEQ ID NO: 98 - DNA, 14899 bp, unidentified
  variation 7389: note = n is any nucleotide
  variation 12484: note = n is any nucleotide
  variation 6997: note = n is any nucleotide
  source 1..14899: mol_type = other DNA
  variation 13196: note = n is any nucleotide
  variation 13448: note = n is any nucleotide
  variation 1926: note = n is any nucleotide
  variation 2596..2768: note = n is any nucleotide
  variation 14588: note = n is any nucleotide
  misc_feature 1..14899: note = Fanzor polypeptide
ggcggcagcgtggcgcggcgccagtgcgcggccaggcgcacgcgcgcctgcagcttgagctcgtgccagcgccgctgcagcaccaccagcgacgcacagcgaccgctgcagacacacatcgcttgacttcgggaattcggcaatcatcgactgacttcgttgattcggaaatacgaacgatgatctagtatagaactgttacaactaagaaacactagccttttagttctatcatgaataaataaggtgaactgagtaggcgtgaatggctaaattcaaaactatgatgactggcggaaaatatagaagtccggaactccgaattctgacaaaaactaaaactgcgtcataaaaaagacaaaattcagtcaaggtttagtaagcgttgtttaaaaatgagccatttcttttagtctgccttgttatgtcatcacatattagaattcatccttattagcattacttcgaatggtgtaaaacattgtgtgctttttcaatcaacggttcgtcgaagcttgtctctgttggcgctaaccagtggcgtagtccctatatcaaacatttttgggggccccctttttaagtgtattgtttttaaaataggccttaataactcagaactgtcttggcaggccacgaaggagagagcgcgactaaatgtatagctttgcgtccacacgtcgccgcgtcgccgcgtcggggcccttgtaactcggggccccatatctttgatacggctgaaacggcggtagctacgcccctggcgctaacgacgtggaacaacgttcgcaatcattcggaaatacgtataccgtgttttctgatataactgtgtgtgagtaacatacggtgatggttatagtgtcggtgtgtgcgcacggtacctgtcgaggtagtcgcggtgcgctcgcgtccagcgccgcgcgcgctccgtcgagctgatcgccgcggtgtcctccaggcggtggcgctgtaccaactgccacagcgtgtgcagcgcggctgactcctcgtaaagggtgacgctctcctgacaacacatcacactcatcgtaaaacgaaatcaacaaaaataaactcatttttacagttactacaaaaaccggccaaatgcgagtcggactcgcgcacgaagagttccgtacctaaatcaaagaaggcagaaaaatcacgtttgttgtatgggagcccccttatatatttattttattctgttttttagtatttatttcatctgtgaaaatttcaactgtctaactatcacggttcatgagatacagcctggtgacagagggacagcgaagtcttagtaatagagtaccgtaccgtagttattttaatggattattattgatgaactatttaaaccacgcttatgataacataatctggtaacctttgtgaacataccacacttcggccgcaactttgtctgcgcacatttagcgcaaacaatttttctcttttcaccccccctcaaagtttgaattttaaaaatcccttagtcagtcgtcatttgaaaacgatttgtgttgccggttttcagcaaggtgttttaaggtaacgctcactcaaatgctcagtcacttcaacgcgagtaacatcttacacgataagcagtatggttttatagaggtatgcggagcagggtgtaaagtcccgccagcctccatagaaaagggaggacactccgaccagacggttgttatgtttgatggataactatctgatagttgatattcggactgttgtatgtgttcaaatcgcacggaaaactctgatatcgcgatgcaggatttcttcgaatttctgtaaatagctttatgtttttgactgaacgaccttgacaattcaaaagtgcctgttatttgagttcgttgctggcggtatagatgtcgctgcgttactttttgttgaagtattgangttatttgagttcgttgctggcggtatagatgtcgctgcgttactttttgttgaagtattgattttgctactttagttttttgcggaggtgtcgacgccgctacactttcaccaagagacgttgtgcaactgacgccggtgaaactttatttaaacacatctttaatgcgtcttcaaaggcatatcgtacaaaaagcatcttctgacaccttacgaaggcgtttgattgtgtaagccataaagcattactccgagcattaaagattaggcaaaacagcattgaacttagtaaaatcgtttttcaatggtaaaacgcagctagttcaacataaatggcaacaattcacgggagtgaagacgaaaatgggtgtatcttagggctcaatttcaggtcctttcttattatttttttttataactgatctgtggcatgtgcggctgttaacatttaaccacgagcttttcataattttgaaaacaaaaaataaataaagaagctgcactcacgtcagttacgaggcggtgcatatcaacgtcggaatgcagcagcacgaggtcggcgaccttagccgcgtgaggggggggcgccggcgctgcatcccccgcgcgccccgccacactcacctgctccagcgacacgcgctgcaccgacaccctgcgggggacagtnnnnnnnnnnnnnnnnnnnnnnnnnnnnnnnnnnnnnnnnnnnnnnnnnnnnnnnnnnnnnnnnnnnnnnnnnnnnnnnnnnnnnnnnnnnnnnnnnnnnnnnnnnnnnnnnnnnnnnnnnnnnnnnnnnnnnnnnnnnnnnnnnnnnnnnnnnnnnnnnnnnnnnnnnnnnnggggggggggggggggggcaccggcgcctggtcccccgcacgccccgtatctcatgaactcgagtgcttggtaaccccaagacggcacttttgactaggtgagcgaccagatctagatcacccttcatattcatggaccagtagctattgcaggtctgctgatcacatcggcagtacgtaaggttgactgaccgaatgaggaattgttcgaaagagtaaccgcgttgttggaacacaaaggaaagaacacgtgtgggttttagtcagtaagagtctgaaattcccttccgctccgcccagagcgggaggagtctgatgtgttcctatctaaaaaataaaacaaaaaatgaccttcaatcacatcaaacgtattgagggttgactcaccagacggcgtgcaggtcgttgatgccggcggagatgcgcagcacgcgacgcacttcgttgtacagcgccgtggagcagagtgtcccccgcgcgcgcgccgccgccactagcgccgtcaccacgccgctaggagataccgcgccgcggcgctgcgaggtaccacaccacaatataacactcattcagaaggctagtggccaattctcgtattttaagtgttttaaatcaaatcgcaatatcatctgagcgacatcagctgaaagacgtccattgctggacaaagcctatgcgaggcctatatacaacttttaatatacaactcgaagagtgacattcttgtatttgaagcacctaagcagtagtcgcgcagtgttcctcccataagcctcaacggcgtagcactaaaaattgtcgatagttttaggtaccttggcgacattgtcacgagagacctaagagatgacatagatgtagagagggagcgcagagcattgtctgtgtcgtcgcgttgtgacgacaaagtaaccctttttaaggtcaatccttttacacaagtggcctaaaacgacctgcgtgtacaatttaataatgcttttaagatgctgatgggactgccatggcgttgttgcgcaggaatgttcgcggaggctcgcacagatggtttccatgccaccgtgcgaaagaaagcggcctccttgctacagcgcttgcatagtagcgacagcatcctgaaaatgttagctgccagaccggactgaccctttcaggaacactggctggggacagtcatagtttaacataactaaataatttgtggaaactaacatcactaacctacttattcaagcaccattgttactaacacctaatataaaaatactaacaaaataaggacctatatcctgaaataaagttttattgaagttaatttaataggccgtctcgtatccagcatattctcgcggccttgaccaagtcatcggtccattttgtgggaggtcgcgccaacactacatcttaattttagcggcaatcacaaaagggaattggagttctctttgaccgatccaaagcttttgattgcgtacaacatgtaacgctcttgagtaaactacgataatggtctccaaaacagacctgttaacgttattgatcctcccagcgcatctccgccctaccagatcaggaaactgctcagatcatgttctgttaaaaaccaaaaatacagcatgtgttttggtggttcagactcacatcaccgaccacctgccaattatcctgtctctccgaatcaagggttctattaccaaaaacagtccaactacatctctccgttacaatttcctagcaattcaacaagacttgaaaagtactgatttcagtccggtgttgaatgagatgaatcccaacttcgccgcagaattgtttgtaagaatacttcaagaggtcattgctactcataccctatgtatacgcatccaaaataagattcgtattctgaagccatggatgactcagggtttggttagatgtatacgcaaccgtgtcaggatgcattatagattaaaaaaagatcctaaaaatacggtccttcaaaaaacttacaaaaggtatcgcaattaccttaacaccttattaaaaaaaccaaagcgagcacatgataagaacgaatttcataaggccaaaaataaccctaaagccacttggagggcaattaaaactattaccaactctacttctcaaccgcaatctcccaaagagcttcttcaactgactgatgatcctcaaacttcagcaaaccgtgtaaatggcttcttcactgatattggtcataaactagcctctcaagtaactcctcttcctagatttaaccacgatgttagaacccctccactacctccaccttgccaatctctcgtcatactaccagtggatgaaacacaagtcgaaaggctgattagctccctgcgctctgactgtgccactggctacgacaatatatcagctaaagtgctgaaacaatcgagttcgatcctatcatcacctatcactcatattttcaatcgtgctattgataatggagtctttcccaatgttctcaaaaaagcggtcgtgcaccccatctttaaaagtggagacagggccaatgaaacaaactaccgcccaatctccgtactaagctctttatccaagatcttcgaaaagatacttaacaattgcctcgttgcatatctttctaaacataaaatcattgccaacaatcagtacggttttaggtcaggtatctcaacggaggatgctgtagctgaccttaccaatacagtagtaaacaacctagacaaaggcatgaaatgctatggtatcttccttgacttatccaaggcttttgacacggtttctgtccccactttgatttcgaaaatggaaagcgctgggattcgtggtctcgcattggacatatttaaagattatctctcaaatcgtactcaacgggttaaaatagactccacaataagtgatgatagacttatcagcttcggtgtaccgcagggtagcatccttgggccccctctctttttgctctacatcaatgacctgtgtctcgcacacattcctaattgtgacatattcacgtacgccgatgacacagcgttgattgtttacgatactgattgggttagggcaagtgaaagggcggaacagtcgcttcgctttgtgatggaatggctctcagaaaatttacttaccctaaacgtagcaaagacaaaggtccttagattttcactacctaacactatagctcctccaccggaatcagatcaaattaaagctcacatttgctcaggtgaggcacccaactgcagctgcccatatctatccgttgttccagacataaaatatttaggagtccacatagatcataaacttagctggcaacctcatatcgaacctatgtacaagaatcagaaaattaatttatatatttaaggaactaaggcactctgctgatcctgaactagctttaatagtttactagagcctctgccagtcgattattttatattgtatcccggtttggggcggaacttacaaaaccttacttaaagttgaaagagctcaaagggcgatcttgaaagtcatgcactttaagcgcagggacttttctaccaatcaactctactcagaagccaaagtattgactgtgagacagctttttgtgctccgcgctgtgctgcggaatcactctacgctacatcttgatcaggccaagctgaaaagacgcaaaggcacacccgtgtgcgatatagtccaatgccgttccaagtttgccagccgacaatatgcggcaactagatttcgattgtataatagaatacataaactaacgcccatttaccccctgactaaaaaagaagttaagatcaagcttacagattggttgtagaagttaacgtatgacgaaacagagaatcttgttactattgtatcttaataaaactaatactatgttagaattaaagcatgtttgctcattttatatttttgtaactataagtacttgcacgacagttactaccagtagtatgtcattccacctagaggaccattggctcctaaaacacaggcttgtggcctagtttaggaggcatcagttcgccctttaatgtgtctctattgtacagtattttaccttaccttacctacccctaccttacctttgtgtacttatctgtctctgtgtacaaataaacatttttattatttttccgtttatttcattttcttaacatataaatttacatttttattattattattattgattcatatttacacaatgnacaaataaacatttttattatttttccgtttatttcattttcttaacatataaatttacatttttcattcatggtttcaatatgtagatgtcaatgatgtgaaatcctccgtgctaacagttcatttaggtgtgcctctaggatttatactaggaccattcttatttctagtgtattgtggttgcggtgtagtgtttgcagatggtctcttatttttaaagtaagtatatagaaatagacaagaatttgataacgtaaacagcgctctatccatgggtacggattggtttgcgaaaaaattaacttagttttcaattaaaacgaaatgtatgacgtctgtcttaccgaattcatttattttatttatttacactttacgcacacaaatgtanacatccttagtttacaaaaaaaaaggaaaggtcaagagtcactgttgcgaagttatattttcaacaattgattttgctgcgtcagatgttggttctgctaatatgcgtaggaatgcgccttgatcgtttatattacatttttgcatcaaggcctccctcccattccggtacttatcacaatctacaagaatgtgttgtacatcatctaatttatcacacaaatcacaatttggggaatcaacctttttcattaaaaaaaacaaacttctttgaaggataatgaccagagcataatctatctaatggaatttgttcgaaagagtcaccgcggccctggaacgcaaagggctttagaaggaacaacggatgtgttttagtcagtaagagtctgacacgcccttccactccacccagagtggaagaagccatttgattatttcccatccctaaaaaacataacaaaatttttgacgttctaaaagtgctagcattcagcctaatttgcataaatgcaaatgcaaatttgcataaatgcaaatgcaaatttgcaaatgcaaattttgattttgagtcaatgtcaaaaagtgatatttacaacctggggacttaaagtcttaattctaggaaagcgtgctccatcgtcgaacacatcatcccaccaatactaaaaaagtgatgtctggttgggaagtgacataagtgtatgtatacatacctgcatggggttcacgtggaggcgcttggccgccgcgaccagccactgcggcgtgccggccgccggcttcttcttgtccggtgagttcgccatctgtccacgacaatactatgtcatacaccgctgagacaagatggctcgtctaacttgacgaggactataatgtggccaggctttcctgactcgtcggtccatctatactttcaaaatcactttcgacccagtgtctaagtaataagatcatcttttggtagaagtactttcagaaacgtctgcacagcgcgcgccgtagtcacatgtatttattactagcggatgccacgcggtttcacccgcgtagttcccgttcccgtgggagtacggggataaaataaagcctatgttacttgctgataatgtagctatccatcgctgaaagaatttttcaaatcggtccagtagtttttaagtttgttcgttacatacaaaaatataaatatttcctctttataatattagtagtataatattagtagtattttttattttaatacactttattgtactcctcacaacaagcacaggaaaaacgtttataatatatacaaaatacaagtgtactatgctatctcttacagacaacctttgaatggactgaacgatatagcagggtaatattgttatatccatgttaataaggctaccctcacactacacagaagggccgggttaggctcgaactactctcggaagcgtctccaaagcgtgcgattttagtagtagtattacagggttaccttattctcgaagtattctcggaagcgcctttcccaagcacgcgcggtcaccacgggtatgccgagcgaggccgctagcttcacatacgcacatttgcgcttgtcctgtacaagataaattaatttaattcattgcaggtacaccataagatactaggccactttgaactatcatgcataacttcgaaaggagttgtaattttatgaaataaccatcattcatatatccttcttctttcatttgtttctatgggttttgttttgttttttgtaataaataacatcaacaaaacaaaaaaataactgatttcgaaaaataaataatagattgaattaaaaattccaattccaaccgaagttgttcgaagtggcccgacaacaacggcaacccgcaccatttacaaaaatggttattattccattttgtatattgtgcgatttaccgtttgtgtgaagtgaacatagaatcgaaatgacacgtactcacgtatgtatattttttatatgattatttatatattgtcgaagtgtttgcgcttcagggacatcgggagatagcccttcattagcgtcttcatggaccagtagctttttcaggcgttgtcgatgcgatgatcgatttcccttacctgcctgttttcgaaagaaactaactggcccaagtagtattctgcccgtcctaacctacggtgctcagacctggtcactcaccgagtcgcaaaagttccgccttggggtatgtcaaagggcaatggagcgcagtattttaggtttaaaaagaattgatagagtacggaacaccacgctgcgctccaaaacaggtatcattgacgtgggcaaaaaagctgccaggctgaaatgggactgggcgggtcacaccagccgcacagtgaccgctgggcaaaagtctccacgcaatgggtgccagaggatggacgccgtcgccaaggccggcccagaaagcggtggcgagatgatttggatgcacaccgcgaagggtggttaaagaatatctggaaggatatgggaggcctttgcccagcagtgggacacaataggctaaggaaaaaacaaatatattacgctccaagaccttaaacgctaattgagcgaaaaaacagctcaaaacgcgtagtgacttttctaaacttccacatcgcgaatgtagcgtcgtggcacttaagaaaacgaccacaacgcgttgtggcaatgatcaaatgccatgacgcgttctgagccctaacttatgcaagcgcatcgcgaaagaaggtaagggagggaacggagagaacccgacacggataggttaggcccgaatgggatgacgggagctcccgtcatactgttcatgttaggtttctttaaaccctgcagacagaaatagaagccccggctccatcgtcgtcgtagttaggtttgagttggccgtggccttgtctatataacaacatgttgcacacacgcagcagcagaggagcactcacagtgtacacgttggacttggtgggcttctccagcaagtcatcgtgcttgatgtactccaacgcgaacttcttcacggacaccgcgcgcgacctacacacacacacactcatgagctcagcaactgtaaaatcttccaaccctccacaaaaaagagatttactaactagtttatgtaatagctcgaagctgtctacagacacaacaatatctatacatgctgccctttcgtttgatatatcacatatcacacggtatagtttaattatttttttgaacattctattttgttccctaaaagtgaccccattactcaaaatgtatttatcgcgtccgtgtttgggtcacagttcatatgtgtataaaatgccaatgaactttctcccggattcggaggaaattgtctgtgacagacacacgagtgattctataacggttccattttttatggacgttcggaaccctaacaaaatagcaaggtacatctttagtaaccacttacttgatttctgtattcttcacactgccaaagacggagggtgcgtagtccacatcctgcgaacagttgctgggctgccctttcacgaagtgcgcgccgcagaccacgctgtgcgcgccgggcagccaccatgggccgctgggggaggtacagtagtgtcgtagcattgcggataataggcaaaaaaaaacgactgccgtacatatgtacgcataactcgacatgtactaaacagctgtttttttttttggaatttcgggtttggtcccatagtaaaaaagtcgttcataataatgagttatatagtaactccttttgtagtattctgttacaggttgtatagacacgttattcgccagtaaaattattaatatcacgagtctaaaaaaagcgcaaacaatttcggtagtaatcgctaccaagatgctacgtacgtagtacgcgcggggtacgcgcggggtacaggaccgcggcagttgcctcctgggacgttgctactactgagtgatggtaacgcatctatctatactaatcgacacttatattactgcgaaagttcggatgtttgttgctcaatcacgtcagaacggctgaacgaatcttgacgaaatttggcacaaaggtagattacagtctggaataacacaggatactttttataccggggttgtgttgccttgcgataattttcgacattcacgcaagcggagccgcaggcgcaagtttatatatatgtatatcactgaccagcacttcgcccgcgacttcgtccgcgcggatttagtaggtacggcacaaacttcaacgcccgctctacccccattagtgcaaaatgattttcattcattaccgccatttttgctgctgattctgtggtctctggatcagcgcaactatccaccccgttcacctcgtcaggggttgatattgcaaaaattgttagatctgtttcaattatctcaattttagttttttcataccaattcctacataaattgaagtaagtacctacttaagcaataattttcacccctaaaaacttcatcaccccttttcgccccttaagggtttattttcgaaaaaatccaaatacatatttgttattcttatttttttttatccaaatgcggtgtttcaccttcagcggattgttcttacttgagcatatttatacccgtcgtaactttgaaacgaaaggtccaatttgaataatttaaagtgttaccttaattatcaaaccatttaaatggattaggatcttgatatcaaaatcatcacattttctttccaaccgggctttgattgaataattttaacaaaaagcggtcattgtgacttaaccataacagttagacatatagcctcgcggacttttttctaggtgataatgagtactttaactatgtagtacattatttttatgaatcatcaatagttttcgcagcgcatgcaatttatgacaatttttttttcaccttgggttacataattcaagttttagtagggatccctaattctttctcgaattaaatatagcctatgttacttggtgaagatgtagctttctaacggtgaaagaatttttgaaaccggttcggtagtttttgagcaaaatcgtaacantctttctcgaattaaatatagcctatgttacttggtgaagatgtagctttctaacggtgaaagaaattttgaaaccggttcggtagtttttgagcaaaatcgtaacaaacaaacaaacaaatctttcctctttataatattagttaagacagtttagatgataatataccaccgtatttttctgataactgctccgtttgatctcttgctgccaaagatttatttttcacttatcctagtgttcatgaacaggatagaccctaatattgttagaacctagccttgtatacactaacaagtaatttaataataacttaaacaattaaattgtcttgactaagaacgcgtcctatagcacttttctcattgcatgtattaaggtgtataccttcgttcttgtgtatttggtaactgttgagctacattacactattcactatcactgtgattgttgataatatatatctttaatattgaaatatctttctgaaacgtcactgttgatctcgcttctggcgagcccaaatttgaattccaggtcaggcaaaaatgctagcgaagggggaggcgagccgcgcgagggaaaggcaaggccttcgccccaaccgccgctacaggagaagacgccggtcccatctatctctgtatctaaatgggttctgccatttagatgtgaaagcttttgtatttttttttaaaaggtttttttatntaaggtgtataccttcgttcttgtgtatttggtaactgttgagctacattacactattcactatcactgtgattgttgataatatatatctttaatattgaaatatctttctgaaacgtcactgttgatctcgcttctggcgagcccaaatttgaattccaggtcaggcaaaaatgctagcgaagggggaggcgagccgcgcgagggaaaggccactccgagaaagtactcctccaaaaactacccaaatangcgtaccagcgtgatgttatgttatgaactggtgtaaacaatagacagacatgagatttcagcaaaaccagtccatttgctatcatttattgaggagtccaaattgaaatgggaccactccgagaaagtactcctccaaaaactacccaaatcgcttcaagtgtgcttataaaatttgaagagttctcactatttctccaggatcccatcatgcgatcctgacttgatgatcatgggaccacctggaaagtattcaacgtattcatttcaaacaaaaaaaaatccaaatcaaataaaaagaaaaaaaaaaatgaaaaggaaatggtccgacgaattgagaacctcctcctttttttgaagtcggttaaaaaatacaaattcacacttagtacaaaaattacagcccggtgatgctgaaagacgacttattttctgccatgaaatcgagagatcactattttctaaataatattatctggtcagacgagacaaacttcagcaataatggtatgtacaaacgtcacaataatcgcatttggccgagggagaatcccttttgctatccgcgagactaataatcaagtgcgtttttcgttcaactgttggtgtgggattgtaaaaaaccaggtcctcttggtacatttttgcgaagggcatttgaatacggaaaggtattcagaaagacttgagattttgagaaatgagataaataatcttccggttgcagaacgacaaaaccttacttttcagcaagatggggctccggctcataacagccacagaacaagggacactcatctcaatgaacactttcatccctggatcgggacaaatggacaaataagatggccgccaagatccccagatctaacccccttagatttttttatggggttatgtaaaaaatttagtttacaagaaccagtattaaagtgtccacgagctacaagcagaacttggacatattattctaaatacccaccacagcaagatcaaaaaatcgacagggagcaaaattatcaaaacagtgcgactctgtattcaacaggaaaggatatggaggtatgcggtacagagagtaaagtcccgcacaccgccactgaaaaatgggaggatcctccgaaccagacggttgttgtnttgtgtctggtgggcaactgcccgatagttgatattcggactgttgtatatgttcaaatcgcacggagaactttgcttgcgcgatgcaggatttcgatgttagttcgtcgtagatggcgctgcggttctttttgttgtcgtacaaatttcgtttctttgtttttcatgtggcggcattgatgccagtacagggattcattttgagcatttgataaattggataattttgtattaaaaatgtcaaaatgaaaggagtaaagaaaagggtttttggtttaaaactacacaatgtcagcctcctcgagtacctt

SEQ ID NO: 99 - DNA, 14397 bp, unidentified
  source 1..14397: mol_type = other DNA
  misc_feature 1..14397: note = Fanzor polypeptide
tgtatgtctagcacagatttggtcccaatataaaaatgcaaagactgtaaaatatttgattggctgtatccctaatggctttgtatcctttatctcaatggattatggaggcaggatatcagacaatgctttagtagaaaagagtaatttaattgaatgtttaccagacaatgccgttaaaatggctgacaggggctttaaagaaataaaacctcttctagcagtaaaaggcactaagcttctgcgtcctccaagtgtgtatgactcgaacaagccaacaaaagaagaagttatgcaaataaaaattgtggcaagtttaagggtgcacatagaaagagttattagaagggttcgagagtttatatttcttagacatcattctgtagtcagccacaaacatgttggttatctcgatcatatgatgatgattgcgtgtggtttaattaatttacaaaatgaaattataaaatgtgattaaaattgatcgttttatattatatcctagcactaataataatcttgctgttaaaatatgttttccaaaatattaaagctttatttaataaatctgttgtgtattgtgggtcataatttatccaatacaaggtaatctttttattttcttcaaaattttggatcagcaacacagagtactgctttttttttacttgccacatgcatttgggtttgcatttgagcaacatatttattttgaatgatgccatcattaacataactttttaatgtttttgttgaagacgagcatttaatttcaatgataaaattatttgaaactccatctggtgaagcatctactactccattgatgagaatgaaatctgattaatgtatttttatatttaattgcttttctacctcttcaataacatactactctaaacatttacctcttttaataaactctgtttctggcactttatatcccctcaaaatttgttgcactaatgtaccatctgttttgcattttagggtctcatatattcttgattctgaaacatttctccgacattcgtttcgccgttgaacggttcaccgaacagaacgattcactatacaatttttcaccgatagaatgtttcaatgacgaacgtttcgccgacacaacaattcacttttcattatttcaccgatagaacgtttcaatggcgaacgattagccgacagaacgattcacttttgaatatttcatcgatagaacctttcaccggcgaacgattcgccgacacgattgttcatctgccgaaggattttataattttcggctagcttatcattagctgcgtataattcgaaattaaatgaacaatgcatgttagtattatttaggtaatgatagacatacatacttgatattaaagcacgttcgcttatttctaaacgataacaattaaatatgaaaatgtggttagtcctcaggtttttacctgtcgacgtccctcattacgttgttatgtctgcccggaatcaattaccaacgtgttaataaaaaggtttagattttgttgttaaaaaatgagtgattgtgtaatgttaacgtgaaaacgcggtaaaaatatattgattcacgaaggatattcctaccatctaaacagaatacgaaatacgaggttctactggcggtgtgcaaaaaaagattctacccggtgcaatgttgctatcacttcaacagagtcaacgaataattctcatattattatttcgaaaatttttgaacatgttcatttaccggatcccgataagcagatagaattaactgtaaaagctaacatcaaacaaaaagcccataattcaatgaatgcaccctcacaaattgttcaatggtgtattcaagatgtaccaagtacttattagtgctccttacatgccgactaaggatgacatggtaatgatggttcatcgggtaagaaataagaatttaccaagtattcccaaagatatacatgctgttgtgattcccgatgaattaaccaaaattagcgatgatgtgaatttccttatcggtcactacattcataatgaagaatccataatcgtatttggcactaatgagaattgcagactcttaagtgtagcaaattattggctaatggatggaacatttaactgttgccctcccccggttcgacaaatatactacatgcaatagtcggaactccggacggtacgcataaagtacttcctttaatttattgtttactttcacataaaactgtaaaatgttatgaaatatttttagaaatattaaaacgacacactaaatgcccttgattatctattttgaacgcgcagcaatgaaagctataaaaatggttttcccaaactgcttaataaactttgtttttttttcatttgaaccaaagtatatggcgtcacattcaatcggctggtctcgcgaaacaatacaacagcgatccagtatttgcccacaaaatgagacgtattgctgcactggcatttttagagccaatagaaattcccgatgtgcttgatataattaaaaacgaaatagtacctgatgaagctaagagagtgatgcgatggtttgaaaattgttatgtcagtggatcagcgataattacaaaatccattagctccaaaatgacagtaaagcgaagtccgccaatatttcctccaagaatgtggtcagtacacgacagtcaactttaacatataccattatcacaaaatgcgttggagtcgtggaataccttattaggccgtcagaaaaggatgatatggacataaaaaactacttaagtggctgggctcatatttctcatttatttactacaaaataagggtcctatgaacttagaattgttttttttattcatagttgatttgttgtttttgttttggtattaatcatgttggttaggtaattgttaatttccttagcctattgtgtcccactgctgagcaaaggcctcccccatatccttccagacattcttttcttgcgccacctcgaaccagccttcgcggtgtgcatccaagtcatctcgccaccgctttctgggccggcctcggcgacgccgtccatcctcaggcacccattgcgtggagacttttgcccagcagtcattatgcatgaggctggtatgatccgcccagtcccattttagcctggcagcttttttgcctacgtcaatgataccggttttggagcgcagcgtggtgttccgtactctatcaattctttttaaacctaaaatactgcgctccattgccctttgacataccccaaggcggaacttttgcgactcggtgagtgaccaggtctgagcaccgtaggttaggacgggcagaatacacatgtcgatgagtttgcgcttcagggacatcgggagatcgcccttcattagcgtcttcatggaccagtagcttttccaggcgttgtcgatgcgacgatcgatttccctttcttgcctgttttcgaaagaaactaactggcccaagtagatatactcatcgacatagagtatatcctgcccatctacttcgaccctacgtttgctgctgtttgtcattgttttagtttttgaccgattcatcgcgagtcccaccttgaggctagccgtgctcagatcttggagcatggtctgcagttccagagctgttggggcataaaggactatgtcgtcggcaaagtggaggttcgttagtcttctattgccgacttcgatgcccttggtcttccatgatgctgccagcgactgaaatatctcctcgagagtgctggtaaataatttaggagagagcgggtcaccctgtttaacacccctttgtatattgaaagaaggtcctgcaatattaagtttgatgttagcggtactattgtggtatatgattctaaggagatctatatattgtgtttcaagttcctggtttttcaaagatctgaatatttcaggatgtttaaggctatcgaaggccttggaaggccttggttggtatagtctacgaaggccaaatgcagtggtttgttaaactcagagtatttttccaatatctgattaagtgtctgaaggtggtcagttgtagagaaactaggtcgaaatccggcttgttctggtggttgatgttcatccagttttcgttctatacgattatgtatgaccttaataaatgccttgcacatatgagatgtaagactaattggccgatagttctcgatttcacttttgtctacctttttatgcagaagaattatatttgaatggcacatcgtttttggaacctttcctgatcgcaaaatagtgttaaataagtttgtaaggtgaggcagcaaggtggtagacccaattttaagcgctttagtagtgatgccatcctccccgggacttctatcataacgcatggttgtgagcgctttatgtacttcataaccggttattggagggacggaatctgagacacgatatgctgtgttacgaatgggtattgagtgatctgaatatagcgttttatagaacttagttgctatgtccaagattttatccctgctatggtgtttaattccgtcattatcaacaagactattgatccaagctctgccttttgtaactccatgttttaacagtacccttaaagattagtgtttttcttgagcaatttttactaaatgcgtattaagatttctgagatcttttctgatgcttcttttgacctctttgtcaattactctatattctgctgtgccaatttctttagttgtgcgtttgtctatcagtttaatactatgagctgttaatttactcctatttctgcgtgtattcttaatgtttttaccactattgctcatcccggtaactatctttttatattggtcttctgggtctgtttcatcaactttcaccttcaacattctagattaaaatattttaagttattataaacgtttctcttgacagtctctttatttgttttgtaaacaatttggctctatgaaattgaaatcgaatcgaattattgtgcgaattggcctgtggtcggagctgtatttgaatctgttgataacactaaaattcctaattatatgtgtatctgatgttaaaatgtagtcaatttcgtttcgcgtgagaccattgggtgcaacccaagtccatcgtcgttgaggtttctttaagaataggctattcgctatgtgcatgctctgaccaaaggcgaactgcattagacgaacacctcgttcattacggtcctctaggccaaagtggccaagagtatcttcgctgtcctgttcttgcctctgtcctaccttagcgttaaagtcgccaatgacgatgttccaggtgcccctattttcatcacacgcccggttgacaagatcgtagaagtcctctacttcgtcatcggtatgtgcagttgtagatgcatagacttgtacaagagttaggattttgttagatttcagttggaatttgagtaccgcgacacgttcagaatatcctacgaattcgataatgttatccttccacttctttgccaccatgaacccctccgtgttgcccttaggtttcaccgaagtggaagaatacagcatagagacgatgcttctgtgtgttcgccctctcttcgaacttctgagaggcccacaatgtcccatttgatgtattttatagcattttcaagctcaattaatcgttcgtccttcatcagcgttcgaacattgtaggtgagaatgttgagggaatcggagtcctttttacaattagccttggtcatttgacggttattcaatctcgcccggagattcttagctccccggaccccagggttgcgccaacgcccgtccacgccagcacaaccactggagtcgccgggcacttggggcctatctcttattgttgtatccatttggaggggggtttggaccataatctgccacgatggtccagtgcgtgttggcaggtcgccataacctcgtttgtttgtcggcagggtgcaccacgtgcaggtgaggttggcttgagtcccgaaagattatagttgggaccccttacaccccaccaccccaattgttaataataaaaaatattttcatttgcaaatatacatatttcatttaacctttcaaaacgtatgtataaccaaaacatgtatgatacatgtattgacgttgaatcaaatacgtttttgtcacttatttggttagttttgctcaagttttgcataaaactttaagtttcgtcttcacaatgattcagatgtaaacaataaatggaaaaaggtctacatgtcgaatacctatgttttataccccaggggcagatgaacagttgtcggtcagctgtcctttcattggcgaatcgttcgccggtgaaaggttctatcgattaaataatgaaaagtgaatcgttctgtcggtgaaccgttcaacggcgaaccgaatgtcgtagaaatgtttcagaatcgaaagttactacagggtatacagggtactttatgacgccttttagaggtcaagtaaaatttgaagaactaaaaatagaaaaatagggctaacaaatctaaaatctcgaaatggttttggaatcgacatgagttaacttttactttacataattcggttgtatttttttatgtttgtttccacataagcatttgaattaatcaaattgtacaagaataattatcatgaataaacaatagtggtttaacaaagtaaattgttttaaatccgaataacatgccatcatttgtattgaagaagacaaacagttactagtgggtgcgccaaagttcacctaaattttcaactccgatagttggaaatccgaaaatgttcttcctaacaatcacaattcctaactactctgtcttttgttttcctatattttctcaacataaccagcttttacactattattcaaagtcatgatttttttgtttagattttttttattcataatcaattaaagcgtcttctttaattttatttatagcggtgtgtacctgcaaagatatccataggttaggttccgacttcataaaaaaaaaaagttagaactgtgaccaactaggcgcgagccgagcgagcgaagcgagcggtgccgcggcagcggccggcgagcgctacctcgaaattggtcgcgaaaattttctaagtatttttttcatagtctgtgtgttttaaaatctaaaagtgatgtaaactctgcgtctactattgtgaaatacatatcgagaagtgcgtggaatttcatacttaaacctgtgtaaaacaattatcatcaaacagtttagttctcctatattatgaaaattaagaacgagatatgtacaaaaaaaacatttataaaatgtgggtgtaaatgtttcgatatctgctactgtgactttgattggtcagtaaggtcacatacataatttgcaacgagacgagccatctatagaaacattatttcaccctaacaagggtcagggaaattgtcttgaacgaaaagactcggacttctgattccgaggtatagagttcgaatctgaccgcggaggatctctatttgctacatcttgattttatctttttggtttttgtttatacaaattaaagcttttttgcctttctgggagctgagtgtaacaggagataactagatctgatattttacactatttgccgattgattacaaagcaatgagtacccaacgtaccccacctaaatcgacgaacactccgcttcgacaggggcaatcgatatccgagcccgatttatcatctaccccaggaaccgtgaacgtgttggaacaaaatataaccgttagaagcaagcgcccgcgtactgcggactctcctaacactgaaacaaatcaatttacctgcacatttaactaatttaaaaatgaaatcatgaatatgcttgccttatggaaatcagacaacgacgcccgactctcttcctggaatgaagagcacgatgcggttttaaaaggcctggtcagagatatgagtgaggtgaaaattcagtgtgcagaaatacaaaaatcacacgcggaactggaaaaaagcataacattttcggataaatgctatgaagagatgaaaataggattggctgttctagagaagcaaagaaaagaaaatatcgatcgtattgaccaacttgagaaacacatccaagatctgcaactccagtcacgttcatcaacactagagttcagaagcattccacagaaagcgaaggaaaatccagaggatcttctatctgttgtatccgcggtgggtaaagcaattaacgtggaagtccgaaaagattgcttgcgtgacctgtaccgcctcccagggacttcgggaacacccagacctatcgtagccgagttcaactcggttccgaaaaggaatgagttcctggcaaatgtacgtagcttcaataaggagcgccctgtagtcgacaagctgaacacgcacactattgggttggtaggtgagaagatgccaatctacgttgatgaacaccttttgccatcaaataaaaagctgttctatgatacacgggtatttgcaaaagctaataagttctcttgctggaattcgaatgggagaattttcctaagaaaagatcccaatgatccaaatgagaaaccaacgcaaataaggtccgaaaactgtttgcttgctctagttaaaaagcaatgactatacagcacatcatttcttcttcttttgttttttaagttttgctacttttctacttattatttgcatgctctctgttccaatatgtttagggctaagaccccaattttgtatctgaaattatgtgaaaattgttttactactttacgcgatcatatagtatacatacataccacatgtttttaatattagtaataagattaactactgcaacttaaatttaaacactttaaactacgtaatgactagtaatttattctcaaaaaatatggctagacttctccaattgtcatttttttctcaggaggtttttatattttatgcatttctcttgtcatgtgccactgcttttacggcattctcaatttccaatggccaacattaattctatatccgaggaactcgacaatatttctatggcttcatcgtatgaatgctctgctgaaagatgctcgaagtttattacacatcccaacgaaagcttgaagataatacatattagtacaattcaccgctatgttgtctatcactaacattgttttcgatgtcattatgctcacggaatgctggcttcaagtatcgggacctaatccttttatgcagggatatacctgccatgccactgtaaataatggatcacaaaacgacggagttgtagtattcaccaggacgaccctacgatgcactgtgcacgaacccatttttcatggagctaactgccttgtttgctcctcagataataccgttatcatctgttcgtatcgctccccctcatattctaatttggatctcttttataattgcctaaacagtttagcgtgcactatgaaccgtttccacaatgtggttcttattggagatacgtggatattaaaccttataaccatgaccgaaactcagatcactatcttacagctactgcgactcttgggttgctcccagcgcatctccaccctaccagatcaggaaactacttagatcatgttctgttaaaaaccaaaaatacagcatgtgttttggtggttcagactcacatcaccgaccacctgccagttatcctgtctctccgaatcaagggttctattaccaaaaacagtccaactacatctctccgttacaatttcctagcaattcaacaagacttgaaaagtactgatttcagtccggtgttgaatgagatgaatcccaacttcgccgcagaattgtttgtaagaatacttcaagaggtcattgctactcataccctatgtatacgcatccaaaataagattcgtgttctgaagccatggatgactcagggtttggttagatgtatacacaaccgtgacaggatgcattaaagattaaaaaaagatcctgaaaatacggtccttcaaataacttacaaaaggtatcgcaattaccttaacaccttattaaaaaaactaaagcgagcacatgataagaacgaattgaataaggccaaaaataaccctaaagccacttggagggcaattaaaactattaccaactctacttctcaaccgcaatctcccaaagagcttcttcaactgactgatgatcctcaaacttcagcaaaccgtgtaaatggcttcttcactgatattggtcataaactagcctctcaagtaactcctcttcctagatttaaccacaatgttagaacccctccactacctccaccttgccaatctctcgtcatactaccagtggatgaaacacaagtcgaaaggctgattggctccctgcgctctgactgtgccactagctacgacaatatatcagctaaagtgctgaaacaatcgagttcgatcctatcatcacctatcactcatattttcaatcgtgctattgataatggagtctttcccaatgttctcaaaaaagcggtcgtgcaccccatctttaaaagtggagacagggccaatgaaacaaactaccgcccaatctccgtactaagctctttatccaagatcttcgaaaagatacttaacaattgcctcgttgcatatctttctaaacataaaatcattgccaacaatcagtacggttttaggtcaggtatctcaacggaggatgctgtagctgaccttaccaatacagtagtaaacaacctagacaaaggcatgaaatgctatggtatcttccttgacttattcaaggcttttgacacggtttctgtccccactttgatttcgaaaatgaaaagcgctgggattcgtggtctcgcattggacatatttaaagattatctctcaaatcgtactcaacgggttaaaatagactccacaataagtgatgatagacttatcagcttcggtgtaccgcagggtagcatccttgggccccctctctttttgctctaggtacatcaatgacctgtgtctcgcacacattcctaattgtgacatattcacgtccgtcgatgacacagcgttgattgtttacgatactgactgggttagggcaagtgaaagggcggaacagtcgcttcgctttgtgatggaatggctctcagaaaatttacttaccctaaacgtagcaaagacaaaggtccttagattttcactacctaacactatagctcctccaccggaatcaggtcaaattaaagctcacatttgctcaggtgaggcacccaactgcagctgcccatctctatccgttgttccagacataaaatatttaggagtccacatagatcataaacttagctggcaacctcatatcgaagctctatgtacaagaatcagaaaattaatttatatatttaaggaactaaggcactctgctgatcctaacctagctttaatagtttaccagagcctctgccagtcgattattttatattgtatcccggttcggggcggaacttacaaaacctccttacttaaagttgaaagagctcaaagggcgatcttgaaagtcatgcactttaagcgaagggacttttctaccaatcaactctactcagaagccaaagtattgactgtgagacagctttttgtgctccgcgctgtgctgcggaatcactctacgctatatcttgatcaggccaagctgaaaagacgcaaaggcacacccgtgtgcgatatagtccaatgccgttccaagtttgccagccgacaatatgtggcaactagctctcgattgtataatagaatacataaactaacgcccatttaccccctgactaaaaaagaagctaagatcaagcttacaaattggttgcagaagttaacgtatgacgaaacagagaatcttgtttccattgtatcttaataaaactaatactatgttagaattaaggcatgtttgctcagtttatatttttgtaactataagtacttgcacgacagttactaccagtagtatgtcattccacctagaggaccattggctcctaaaacacaggcttgtggcctagtttaggaggcatcagttcgccctttaatgtgtctctattgtacagtatttccctaacctttgtgtacttatgtctgtctctgtgtacaaataaacattttatttttattattatttttattattattattagtgcccccaagacgacactctgacctgaatttcattcatttaagacaaaaatcagtgaaacgacctttaatcattgagtatgagtgaaaatattatggtaattatgtttagggataaaagcgttatgataaaaaacagtaggagtttaaatatatttacattaatgatattatttattataattttcggaaatatgagtgttatgaacgtcgccggtagcactacaaatagttttaggaaggtgatcattcggattacaaatcattaggaagaacaatttcgggtaaagaactttaggtgagccaatatggacccgttactagtaaatattgaaataaattgccaaaaattaattcgtgtgtacaccgagcacttaatgaatgatgttttgatttatgagacaataattgatggtaaaaatcacctaaattaacaataagacaaacaaaacaattcctttttgaaaaatataacaaattttgtcaactacccgcaattattgtagttgccaagtagatagtagataaccaagtaaatattcttattatagagaccacaagtccatttgatcgaaaatgtgtttttttttccagtaacatcgcttggagtagacttcacagactcgaatctcaatagcgagtacatggatgcagcggaacagatggtcaatactatagtggagaggttcacgaaattctagtggcacagtatttacacattcgcatggagaaagcttaagaagaagcaggattcttatctcaagatcctgcacaatatgtcgaacacggtaaggagatagcgccttgaggttaatccacatattattgtatcagggccatgcgtgggacgtggacgtcaggaactcaaaaaatatcggtgcttaaattttatatgaactcgttcacacacgacagtgtacgggccaaaccctggacgtctaggatcacggcccggacatttctcgggcacagctctgatctgtgtggattaacgttactcttgcttcaaaagaagggaaaagaccctcttccgatcgaatctccaaatgatcttcacgatttgtctttattttatctgtcattccgtcttttatagtgtccaatgatcgctatattaacaaaccacatagaacttaactacaaaatatttattcaacagaatctaacctcaggttaaggatgcttttcattgcgatgcgatggttaagttatcaaattaaaaaaaaatggtttcaatccttcaaaaaagaaaaaacgagtttattggaaatatgtgcggtgaaaggagtataatagaaggtagagattataacacgtaagggaatgacatcaaagagatttttaccaaagtaaaagtcatattactttattaacacacagtgaataactattttatgtcaaacacaatttgaataaaattgcaccttctgaaataaaatttcccctcgatgtttcattacgtttaggaccctatattattctcctcatcgctgccactgtagtgaagttttccatccgtggtagttttaaagtcgccccaatatcggagaaactgaccgagagtcgtctgagatggtatggtcacgtgatgccaagagacgagaaattgtagtcaaaaaagcgttacaacttcctgaatacaaataaacttttatttatttatttattataaggcttctcaacaatgagtatgaccgcagccatattgttaagcagccgcaagctgacagcctctagttaactctagtggaacgtgtactggacgcatcatccactctatgcgtcatctctcgtgctacgtttggctttcgtggcacttgcaacgtatgtggcagaactgggcatcgtgcggctgattgccgtgaaagaaacaaacaacataatcgccctatagtcgcggataaacgtgtcaaccagaagccacaagtcacgtgctacgtctgcgaggagccaggccacgtcgtctccaccagcccagtgtggattgacaacacaaagaaggaacaagtcgctactggaagcaaagaagtcaacaaaaattttcctacaaccagaattaaaacaggactgttaaaaatacacttctggacacatctattggcccaccttgtatttcagtttatttatttatttagggacaacaaacagcagtgtaataatatgtaaacataggttggaact

SEQ ID NO: 100 - DNA, 22193 bp, Tetraselmis sp.
  source 1..22193: mol_type = other DNA
gctcggaacgcgtcgcgatgggcgcggcgaaggagctgctgggcgacgtgctggtttccctttgtgtcggcggccacgtccgtatgctctcaaaacgtctcgcgcaggtaccgttggtcgccccgcgcccagatccagatcagcaggcgagtaacatggtccttctcgatatgccgttctgtccgcccgacaacgtgatctacgacatgtgctaccaagccatcgagaacggacgcctggaggtgcttcaggtaatcgacgagtacctcttatccccccaagggcgtgttcttgcggacctgcgtgtgacgagggttgaggaaaggctggaatcgctgatgctagaagccggtagatacgggagactggacatcatgaagtggctgcattgcaagggggtcggaacccgagaggacgccgtcacgaccgcagcgaccctcggtcacgttaacgttctcaagtggcttcgatctatcgggtgcgagttccccccaaacctggccgaacagtaatttaacctattttgcgccgtggaattcactttgcaccgtagggtttgtgtataccctagttcccgggtttactatcagtacttaagactcactggtgatgtagcttgggtttgtagaccttgggtgcagtgcagcattcattagcatgaaggccagccgcgacgcatatccaatgttggttttggagcattttgtccaaaatgggacaagatgaggcaatgaaatcaatatttattatgattattacatccagcggctagctagccacaagacgttgctaatagtttattcgttgagcatccccaatgaactcaagcaagtccttcttcgtggctgcgttaaacttgacgactccgccgggtttgcgttgcgctggggtggttgacataacgtggacgcagttgtttcgtggctggctgatttgccacccagtttgcgcatatgtcttcacgacttggacgctttcaccgtaccacttctttctgaccatggtgccgttctcgttgaacacctctcgacttcccgacgcgtcgtggatggccttcgcgtacgatagggggacggcttcaacaagcttcaaaggaagcgtcaggcacttctcccagcttgtgtcaactggcttcttccctccttttgtctgcgcgtacaaccataggggcatgaggggtttgccctttgcatcggcatggaagggctcgtatacggccacggtcaacgtgtcttcggtagtctcgcgcgacttcacaagcccgatgacgaatctcgactcccaatcaccaagagtttcgggacacttgtcttcctcatgcacctgacgatggccaagaccgcgagctatgttagtcccgagcgagacaccacgccatttttgtcccagttgggacaaaataacaagcaaggtagatgaaccaaattgttttgtcccgtaaaggacaaaaatgacaaacaatgggactcacatcggagacgtcgatgacaacgaggttcgagccctttgcatcgctgggcgatgtgttgtcatgaagcctctccgccagagccgcgagggactcccgcgttcccctggacgcgttgatatggttgcaccaggaggggtttgctctggaccactcggtgttcgtggagtctgtccggcgcggcaatctgcccgccatcaagtggtgttacgagaaggggattctccccccggagtctgtgttcgcggagatgacgtatgtcgccgccagcacgggtgatgtggagatcatggagtgcctcaaggacaaagggttcccgttgcacccggacgtcgatctggtggctgtgtcgtccgactggtacggaagcagcgtggccatgtgcgaatggctccgccagaatggtgtctttctgacccgcgcccgcaaccagctcatcgaggagtgctggggcgcgagcgagaccaggcgcgcgaagcacaagttgaggttgatccggtggatcaatgccaccgagatgccggaggaacgcgaggttgtagatctggtttccgaatgaatgtgttttcgtgtaagaaaaaacatctttacccttgtcaatgtcaaacagattccaggcactagccaccggaattatgcaggacgatgcagcaaacatcacccttcttaggtttgcagaggcatgttacgagtacgatgaccttaagccgaaaacgtgtgatgatgatgaccagatctttttcaaactgcacgaacatgtgcagcaatactcccccgaaacttggaaacgattgcaacaacgatcgcccacacggagctctgagcttattgtgggaatttgttcgcaatgcgactggtgtagttgagttatttcaagtgcggtgggtcaaggctcgtgggtgaaggtatgacctacgatcagtttgaagaagctgcgagatcgggtgatcaccaagaggattccgctttcatgagtgtctgaggttcattggaaggttcgggctgcgaacctaaaccctacattgtaaactaaactacattccagagattgtgggacgccataggtccgctaagttcgtccctcaaaacgcgccgtctggcacgttacacgctccggcactccgccttgtgaaagagggtccagtcctccctctggcactcgcggtcggagtagtagacgtccttgcaccgggcgcacttggagcgcgggtccgccttcccacaccgttggcacgaggcgacgagcacctgggtgaaccgccggaccgcgtcggcgtccgggatacccagcccccggagcttgtggcggatggaggagcgggtcccggagtgaacgatgacctaaagctcgccgccgcgcgactggtgggagtacatggggcgcgcgaacacgctctggtgcgtgagcatctcccccacgaggaacgcgaggtacttgtcgtcgtccgtgatgttccgcagggcccaggtgacgttgttctgcatgggcgtgcagtgtgacaggacggtgcgaacggttgaacggtcgcggaattggaagaggatggcgtccaggaacgaggtggcgcggtcggggtgccggtggaccaccgtggcgtccgggacgttgcaccccatctggttctgcagggcggcgaaaagctggtcttgcgcggcgtccaggggctccagagcgagcgtcccgtccgggaggagggagagtttgacgcccgtgaacgcgtcggcgacggggttgtggcacggactcacgacgtgttgaaacatgtcgaggtgcggctccatgtacagcacctcgtccacacggccccgcgccaggaccgacaggaagacctgttcccagcacactatcgccccgccttggtcgcgatcatacgagaagatggcgtgcagggtgtgccagagggcgtgtcgctcgacgtccgcgaggacgcggccgcgtacggtctccagtatgtgcgcgtccgggggcgggcgcgcggggaacaaccgggcgaccatggcggcgagtacggcggagcggaacgaggggtccgcctccgctcggcgcaggagggcgccccccgcttcggactccagctcgtccaggaagcgatccagcgcgtcaggtggggccgccatggtttggtatggccgtggggcgtggtgtggaagcgcgtgtggggcgtgcgtgagtggttagggttagcggggtggtgtaagtatatgggcgcgggcgtgtgcggcgggccgcggagtttgttggttgggcgctcacgcagcacaagttggttaggtgtgtagggaaaccctaggtgtgtaggaaaaccctacaaccggggtaccaaatacctgcgcaaaaaccctacaccctaaacccttcggacaacaattatggacaacctcgcgttcatccatggaattccccgcgagggagttgctttggcggttccgttcgaggacggaacgttatccattagcgtcgggttcaccatccagcgtgatgttgacatcatcgtttggaagtgtgcaagagtgggggaagacggaacgctattcggaaagaagtatgggtaccggaagataggcggtgccgcggccatcggaccaatcttcccgaactagtccacatccttctggggcatcagagaagcgcgtagatccgtcagaatggtttcaagcttttcgttacgcacggagtcgaagcaatggaccccgaaccgcaggctctcgatgtgttcgtagtattcgtaatcgtttggtaatccgtggtttcgtaactctgtcgctgtctttttgtcggcggcgacgcctacacctctggcgtgacactccctcagaatttgttgaagctcacagcattgccgcagcgtaatgcattccgagaaaatgagggacagagcatccagtactaatgccaacgtgttccgggaatttcaaacccatttgaacgaattaattaactataatttggattataatcctgtcggttcgtgatgatataccagtggacctgattcgggcccactcgctcgcagacgagccgctgcccctcctgtaatgccggcatgtacacgctcgggaagtaaggaagatacccgggcgtggcagggtatgggttgggtgtcacccggatatcttccggcattgtttgacgaacaaaaagaaaaaaaacaacgcatcctgcgttcgcgtttaatttacagtctttcccaaaatttatgcaacacctagagcatcgcactttgggtaaccgtatgaaccaaggaggttcgtctagcaaaacaacaactaagtatgccagctagaatcttgtgcatggtggtacttgtttgatcttctctccgtctcgattccacacctcgggcgccgagtcacattccctcgcacggtctcgttccattctaccgccggcattgatggactcgtcgaagggcttggcgggaaagatcctcggtcgctcggctgcatcgccgcctatatagaactttggagcaacaaagctatagacgaacgttgtgccttgtgtatgcggtcggttgaagaagaagctcttgcgtctggagtgacgccaggtggtcgggcagtcgaggtcgtcaagtcttccatagcttgagtcttgttgacggagaacctcgaaatgtgacaaacagcgacaggtcccttccttttatacccgttttcctcaaggggaggacgcgtaacgatactgggacaggcgcgcacttttcagacgcgtcttcaaattatacggtccagctgtatcgacgagacgatgtggtgacacctatttttgtacgtttacgaggtcgaaacacgcgactattcacgaaacgtcgcgaccgttttttggaagaagattccagaaaatacggctaagttggaagggtgtggtacttgcaacatgctgatacgtgtggtgttgcattattttttgagaaatgctgtaatttgttcatgacgaaagtgggtataatcttcgacagctgtgtgcctttccatgagagtggctcgaatcgtggcggatgtggcagatgcaaaattacggccatcgcccgtgagccacgacacatacgtaaaagatgctgttacagctatggccagattcacagacgctttgcaaaccgcaatcatcgtgcacacatgacatttgccatacttattttgaaaggcttgcgcgcaatcacgtgcgtcacgaggagggtcttccaatactaaccgagctagccttgcgacgcacttgagctctccctttttgagcgtggtgggattgcattggagtgcccactcaacaaagcgcttgcccctctcagtcttattccaatacacggtcgcagacttcacgtccaggttctgcttgatcccagctacaacaaggaacgtatccccacttggcggggaaacacttaacagggcaccaatgtttccgccccaaaaaactgccgggttttccgtaagatgttgtttttccttttcccattcatggcgatggaagggcagaggtctcttcacattggatgctgcccggaagtcaaagtgtatgcaaagaaccttggcgccctcgacggaatcgcatgcggcattggcaatactggtccccgtccactgccgtttcccgagattagacgcctttttttcgtgtcccgtcgctgttcgtaacagtctcgccacatattcagaagtcgtcttgacagtgcgagaagtttcccggacctgatccgttaagcgcttcaggtccgcctctcgcaggaggtggtgctcctgcatccaacaaatgtcgaaggacatggcctcgttagactacatttcagaaattcagggacaccatatgtacgctaagtccgtccctttaaacgcaacgtagtttatggtcctcgagcttgcaaggtgacccagctctcaaaaaatagacggccggcgagctaaacgcgttaacctgcatgcacaggcttttacctgtagtttttactttagtccagcggggcgaggagggggtgtgtatttttccaagaacaaacacaatttcaaccatggctctctctccagtttgaacatcgtaaaaatgtggcaaagtgctcgcaattactgaagggggcgttgtaaggaaactggtatccctcgacagaccgcgcaagtcgcatagtatcttcgagcggtaggacaccgtccactcctgtgtagtgtatccaagcaaaatcggtcttcttagcaacaaatgcgacccactcgcgctcgcgtatgttggcttgttcattgttcaatccccacacgtcgatgactttcaagtctccaacatatatgccgtggtgccaaccatcgccacccccaccgcgaacagcgatatggtctccgggcttgatttggacgatcagactgtgagagtcttggaatgtacttgccacagactcgtcgaaagtgagtgaaacatgcggcaaatatttttttgcgcgcatatcatcgagatgcttctcgaatacagtgatgagattggcgccctcgccttcggtatgggcttgaggttggtggtctgacattgcttgttccacgggaaggagagaaaaacgtcgtgaacaaacgcaagacatatggtgtcacgccggccatggaatgggggtcactggagtctcgttttgcatggcccaatactgagccttctgatgtgctgccgttcagccgggaatgcttcgtaccttgccagatttttcctcttttcaggagtcttgcgtcaattgtaaggcggtggcaaggccatgtttcagagtcaattattttttattgtgtgaagccaaaatggccgaccccaacgcaccgcctcgagatacgtcggcaaacgtcggacaccaaggagggggtcctgtaccacagccagacttcggatacccagtgttctttgctgtgttcccgcgggagttttaccgctcacccagagcccctgaaatcttggcagaacttctgcagttgcagcttcgacacgtgcaaccccgcaggtgagctatgacacaccaattgtgaaaataccagtgagcgaacgcaccgtgacaccggctacgccatccagtaaggtcgatattgaggtcgaacaacgtcaagtcctaggtgcgcacacagctcgtcctgtgcgcgatacacgttgacgagcaggagtggatctcccacctcccagcactccatggccagactgatcatatacgcgattggcgtcatgctgagaactgcgcaaaacggcgggtcagctgccttcaggtgaagagagtataaccaaaaaaacaatcgtgtattggggtcatctgtgaggtcgcgaagtgccatcagggccataaccgaagcatgagttttcggatcggaaggcaggtcctcccaatcgtcgtggttgtacatcgcagtgattgcatccccaatgaagacggatgtagatgtacaagggagaaactgttcatgtaagaatgcatagtccttctcaaaatcctccacaggtcggtcctttgtattgaacagggtccagcgaagtccatggttaactggtccgatttccgtaggcaaccaaaggtctccatcttgaatcagtgccatgccttcgggaagctggatggaagcggggcaagtgctgcaataaaagggggggatactatgaccttgtgggtgtgaatttgtgggtgtgaagaatgacacgccacgaatattttccttcgttaaacctggtccgcatgaaaggacatggagtgtattttcgccgtctcgacttggcaggttttttacgtgtccatctggaccctttgccttaattctgtcacttttccatctcaaaggggcgtccacgcggtggagaacgctgttatcgctcatacccgacgacgacataaaaacaagattatgacgacgaggtagggttttcacaaaatggcgcccctggctaccgaacagctaaagcatgtacgatgtcggagggtacttctgtgcattgactagaacaatcataagtgtcccagaaaaaatggaaaacagggtacaacatctatatcctgcgtgactagcatcacgtatcctagttctgagcgggtggtctgcaggaaaaaacgactgaaactctagttcagtgcggcaacgacgcatcattgctagcaaaatttcacaacttttctccagtgtaaagctagagtttgcgtcttgaagtctcgtcgcccaattcgtcacatggcttgccgtaattgtgaaggaagcgtacgatggagttttacctagttttccctggctagtcatttcctgcatcagatctaggatgagaataccatctaccggttcatatgaaataacctcgttaatgaaagcagtgaaattcgattgagtggacgcgaaaacgttcaagactctgaggacatcccactgtaagtcctggctatgcatcaccagttttgcaacaaacccaacccatttagggcaatccggaagcgagatgttataaccgcaaagatcgttgatgacttgcagcgcgacgtcattgtccaaaagtgatgccaaactggtagagaattcttgaagtatatcgatagccatgttgtcctttgtgatacagctgtgttaggttagaatggaacaccccctaaaaaatataagcccacttcagatgaatggcgtatggacaagagctacgagaatgtgcattgcgggcatattttaccttctaccgataagaagcaagacatattgggctcactaagtaaaaataatacaatatgcgtggatgaaacaacatttcaggtaaacatgagcccaagaaccggttacgtcaagaggggctcgagactgtatagacagcacattatccatcgcgtaaacaaaaaggtttgtttgtgtgcaatatctccagtgtcaggagtgttctcaaagctttacgacacaaacatcaacggcgaactgttctctaaatttctagacgagcttccttttgaaacaggaacaactataattttggacaacgcctcgatacacaaaacacagactgttgcatctgttgcaacacgaaaaggctttaatctgaaatttatcccaccttattcacctgattataaccctattgagaatgtgttcggtatagtaaagaattcattcagaaagtggaatgtgactaaagggcgaacgttacaagaattcgaagagggaatattacattcgtttgcccaaaatgtagatacggcgacggttcgcaagtgttactcccatgcaaggaagttcatatccaatacgttagtatgcatggaaatggcatcaagtgtccgagcgcatgttaaggacacggagtccctttctatgcgtggagtttcccagcgcccggatcgcaacgcgtgagacctccggtacagatgaaaggactcgcccgtggaagggatccttttttgttctcctcgccgagaaaaggcttaagcgttcatcagaactcaccacagcataccctctctcgctctcgctccaacctccctggaaagggcctaagcgttcgccagaacacgccgcagcataccctctctcgctctcgctccaacctccctggaaagggcttaagcgttcgccagaacacacaaaacaaaacccatctttactgacaataacatgactaccgagccgtcaaagaaaaaacggaagaaggatgatgaggagaataaagtcggaggaagaggagggcgtttgtcgaaagaagctctggacaaagtactacaaggatttgacaacgtgcccgacttctggaacgacaagctcgtcttcgctttacgacacaacaagatcaccgaaacgcagcttcaatgctcggccgcaaccagagagcaagtcgtgaagaggtacctgtccagcttgaccagcaacgctgtcgttatggagaggatccgatcctattcagtcctgtgcaccaaactccaccggcgcgcatccgctctactgaatatggcagtgtgtgagaacatcaacaacgatgacaacctcctcaagatttgcgacatcctttcatcccctctgaagatcaagccaatcgttctgtgtctgcgcgaccctctccccgacctgttcgagaaatgcttgagaaagcacaagtgcatcgactccctgggaccttcgctcaacgaactttctttggtgtctcactggtcaaacgtcaagacctacatcgccaacaagatccacgcaaacataaaaactcagatcaagacccactttctgaacaggttaaagacctacgtgaggtcccatgtgaagggacctcctgatgctgccgtcaagtacttgttcggcgagtctccttgcgagaacgtcgaagacaagactcttatcgaaagcatcgtggacagactcggtaagggaggcctcctcaaggacggactaccggagatcccggcggagggcttgccttcctcgctgatcaagtttcatttcgacctctgcaaagcttcggaaaaggggttccgaccattaccatttcccagtattggtgccaggcaccatgctagaatcgacccaggagtattctcaactctgatgagggaccttcccgatgctgagagagatcttcatcgtgagctcaagttgacacgagagctgtggaaccgcaaggcaaatcgcgtcattgggtacaagaagagacagagggagaagaaggtcaagaggaggggggagaacaagaggacgaagaagttcaggcgttacaaccgactcaaggtcagaaagttgaaggacactcagtgggtatcttcaattgaaacggacggtgtggcggtctccatcgtcgtcaagactttacacagacctgcccgagaggagaaggatgtcgatcaacattacgaagaggagctcagaaagatacgagaggtgtacaacaactgttcgccaagcatcaccgcattttatcctggccacgtattccttctgacaggagctaccatccccaaatctgacctcaacatggaggcccacaagggagaaatggtttcttctgcgaagcattcggccttctcacgagcgcagtgggcgaagatatgtcgtcaaggagaacaacgaacgtgggaagaagaacggaggtccacggtggaggtgaaagaggctcttgacaagcttactgaaagcggaggcgggagaagctccgacatcgatacatgggcaaaattcgtgaaggcggcggctgatgggatcgatactctcgacaaggagtttcttctgaacgatgagagatgcaagcgtcgcttcacctgcttcaggaggaaacagtctgccctgatgaaggtagcctcagggttcgccatccggaaggaagagaagactccgatcctcatcggtatgggacacgcaaacgtcagtgctacgatgaaaggatgtcctatttcagtttctaccaaggcaatccagaagtccatcaagcgagctttcagacaacacgacaagaaggggtacatcatgaaggtgtgggagcacaggacgacaaagacgtgctacaagtgcttcaacgagatggagatcatgtacaaggagaaggacggtaaacaagctccggaaagagagtcccgccgatgcaatcgctgcaaacatgggccggacgaacatggccctgagaggcccaaggaacgtaaccgtgacttcaacgccgccaagaacatcctacttgccttcatcgctatccttcaggacaagccccgtcctcaacatctgtgcgtggtcaagcgcaccgatgactccgtgatcaaggccagaaggaaaagaaagaaggcatcatagttgactcaacacgcttacaaattacgccgatttggtgctgtcatggagactagcaaaactagctgttccatttctagctaacacaggtgtacgtctgaacaaatcacggatcgtgccgactgccgcgctgtgtccaagaacaccaggaagtgacaacaacttgatgcagaatgtctggaggttgtgatgtcggagttggtcaaggcctagcgttccaaccacacccaggatgacaataggaactgtgtcggagtcaccgggaagggtatatagggcaaaaaatctgacacaggttgtcattaaaccatgaacatcttgccccaacaggtcgtgtgacatcattgtttgccccacggcgcggaccaattgccgtcgcgccggagttcgagaaaccctttcaaaaatgcgcaaaatggtgcaataccactgcgggtcaggatatttgccttttgcgtatagagggtgcccgcttgctgcaagtaagcggttgcacaaagtggggcgtataagccctcctggaaagataccgaggcagcgtgttgggatccagtccatttgattcgtaataaaagattcgtaataaaaacacccatttgggcgcgtcgcttcagcgacgacggggagatcccgtcgtgattgtcacagaaggagttcaacctgctcaaggacgactactttcgtgcagttttcaaggttaagagccccgattcctggactctgggaaacgagttgaagacagacggcacgtcgctgaggataaacgtcttgcgaaaactcgtcacttcagtggccgaaatcaaaaacacgtgggtaaaacggtaataccatcacacttactgtactgcggcgacctcgccaacgacccaccttgtttttttgtgcagggaattagtgcgtgctggtggggaaccacacgcggatgcgaacatcgggcctgtcctcccaggggatggggcccgaaaactcgtccaggtacacggcgtagtgggagttgtccgggcacgacggggcgccgaggacgtcatggccgacgaggccactgttgttcttgcaccagttaacgcacgtgggcagaagattcaccgttgccctgaaactgtgcttgtgcgggtaatcgcaccggcactcgaggcgcttcatgatatcgagagtgctcccgatggcccggttcacggcgtctgactgcgcggtgcacgcgatgagacagttctccttgccgccgttggagcaggacccgaacccgacacggtcctttccgtgcagaccgaccagaccattcaaaccgaactcgggtaccacatccgcgtcagtcacgacgcacacgtaacgggcgtctgcctcggacgacatgcgccgcaagaactcgagcttggcaatgtcgaagttgtaccacatgtccttaaccccggagatccagatctcgcggacctccacctccgcgcccatttcgcgccatttgtgtgcggcggactcggcgcggtccttaatgtcggcgaaggcggcgctgcggttgaagatcgggatcagcacccggatgcggggggcgtcgtcggtgatcattgggacgggggatgtttcgcagatcattgtgatgagggaagtttggtcctgtagggctgtgactgtgtcctgatccggttcggttcggtgcgttgttctcggagtttttcgggtctgggtaactgaaattgtcgtgcgcgattaattttttcgggaacccgaaaaactgaatcgttccgacccgatgttattcacaacgccaacgccaaaatgtcgacccgtgaggtgttgcattattttctgagaactgcaacgacgacggtgtttggacatacccctggatggagaaagatgcttttcaccgtgtgttcgaagagccatctgcgcgcgcgaaacgcgagatgttcagttttagttttctggtagtgagtcctacaggtagatcggggattaccaaccagtctccctcgatgggcgttgtctcccacctgttatatctgcagtagaaaacgaagccgtcgcacacatggttttccgtctggaaatacgtgtattcttgtttttcgaaacactcctcggccttgaccgcaatggcacacttcttctcgggggtgtcgccccggtaaacaacatgttttatgtagtcgcccagctggggatctctacctccgacaaagtcccaaacgggacttctcgtaacattagtaccaggttccatgtgaaacacatcgcctttgccgtctgttatgccgtggtggtggacactgccacaccagtagaaaacgtgttctccagcagcaatgctggacaaagtagatatgtgcactgtgtagacttcaggatcaaaggacggggaaggagcttcagtggacatcgtctgcgcagacatacttgtttcgaagtatgcaaaacaatttattccattttgccgcgtgcgaagtgtaaacttttttctgtgctatcaccgaaatatccagcccagcgccagttccagaggcggagggaccttctcgtacgactggtcgcgcggcggaatttgtggaaatacagcgggcgggcggtccccaaacggcgaacaaaggattatatagtgatttttgctcatctgttcgccttcatgcctgtgcatgggtttcatagcaagagtttaggacgatgttggataagaattggacgttgaaacagactacaagcatcgaaaacgggttggtagtacctcccgactttgcagagacaggcaatcatctcgcaattgttctcgaagaggtcgtaaggtaggtcatccttatattgtaggagaatgtcggcaaggtgaagcgtggtctcgatagggaaacaccctcccttcggatactcaacgaaatagatgttcttgtcaggagccatgaaggtgctaactgggaccaactcaaggcctgaatccttggaattgtgcaataccctcccggaggaccagtcgtggttctggaagttcttgccaacaaaaacgccgtgatgccaaaacgcatattcttcttcaccttgaaaaaccgtagagggaactaccacgtgagttcctggggcaagagcccatgcttcagagatgtcaacgctgtccgcgcgtggtgacttcaggaactccagagtgaattcttgagccgctttgatgaaggtctgggttacggcagtacggggctccatggatcgtgcttatccaagtgaaaataaatcgccccgcgacgtccacagttttacggtttccgcttcgaagtttcttgatttgttcagccatggcctgaatggcaatttgacctccgcgtttcacccaggcatccagttgattcttgggaagcgtcttcaaagacatgcagttgagattcggtgggcgtccgttcattctcgcgaatccgcttaagttgattctcgttttccgcagaacacatctgagtgcggccgcgcgctctcggttttttctgcccgggagtgaactgacagtcgccattatggataacgctttccgttttatggatgtccgcctcgtcacagtcccacagagctttgaactggtcggcccttgcgtgaacttggggggtccgcaacgcccggagaccaccttgctgtcaagtggagagacgctgagactgaagaccttgcgtggcaccacggaatttatctcggccttaaccgagtcgccgacatgaacacggaatgtggtttgagaaacgtttctatttctgaatttttgagcagaaacggccagagctttgacgccggcaacgtggcggctattggaattttgcgatacaatgttgacacagcggagcggagaaaattggtggtccttagagctctgcgccttttgagtcctgtgtatgacattcttgcatcaaaatgcgagtgcttcgcgacatggtctccccagcccagccttgcgccaactgcgccgccgcgtgcgaagtgtaaacttttttctgtcctatcacagaaatgtctagcccggcaccagtttcagaggcggaggaaccttctcttttggacaagctgcgacaagacttatccaagagcacaagcaatacaacgttacggtgcctaaacagtatttcgataagctgctcgaggagaagcatgaactgtaccttcgcagaaaattgtgcgagttccgcacatatcaactgaacatttcacggtcatgcaagcgtgaatactttagtcaccgtgcaccatactgtgtcagacgcgcaggacacttgtcgatgcatcgaagaaggagccgatagcagatcgatagccgatagcagatcgtgcattgatcgggtttggtcagacctcgccttcggtcaacctgctggccttccaattcgatatttgaaaacacccttttcaccaacacacaccggaattggacagtaatttgacaggtttacagtctttcccaaaatttatgcaacacctagagcatcgcactttgggtaaccgtatgaaccaaggaggttcgtctagcaaaataacaactaagtatgccagctagaatcttgtgcatggtggtagttgtttgatcttctctccgtctcgattccacacctcgggcgccgagtcacattccctcgcacggtctcgttccattctaccgtcggcattgatggactcgtcgaagggcttggcgggaaagatcctcggtcgctcggctgcatcgccgcctatatagaactttggagcaacaaagctatagacgaacgttgtgccttgtgtatgcggtcggttgaagaagaagctcttgcgtctggagtgacaccaggtggtcgggcagtcgaggtcgtcaagtcttccatagcttgagtcttgttgacggagaacctcgaaatgtgacaaacagcgacaggtcccttccttttatacccgttttcctcaaggggaggacgcgtaacgatactgggacaggcgcgcacttttcagacgcgtcttcaaattatacggtccagctgtatcgacgagacgatgtggtgacacctatttttgtacgtttacgaggtcgaaacacgcgactattcacgaaacgtcgcgaccgttttttggaagaagattccagaaaatacggctgagttggaagggtgtggtgcttgcaacatgctgatacgtgtggtgttgcattattttttgagaaatactataaaattgtctcagtgaaaactatgggaacaattgagtcgttcatgccttcacccgcagagcaggcacaggaacaccatttttggggcgttttgaaccggtatgcctccggctttgaggacattttggttgatgaactgggttgcatcggaggcggagatacaccagaggagattattgacgatgtgaagttcaagctatgggacgaaatcaacaggctacacagtatgggcgagcccgtgcccgtgtacaccaaagaggaggcagaaaactttgcagagaggttgtgcgaggaactgcgaggcgatgatgaatccagagtcgaaagttggagacttgtgcgcatcacggtggacatgaataccccaccacctggcctgccccaagaggagcttgatgccatagaggcccttatgtgggaatcgtgggcaaaatgtttagcggaggcggaaaaaacccagccgaaatgttctgtcacgtagtcggtaccgcgcgactatgttctgtggaaatgccaatgtaccttaggctacaagacaaagaaagcctaagaacttgctccttagcccttcatatgacaaaataaaacacggatcgggcggcgaatccaagtggatctcccacatccgcgacgtgcgggcacaggccaacaaacaagcaagtaaggcccacaagagcaagggcatgacgtggaaggaagccatgcaggccgcgaaaaagacctacaaaaagtgatcccgcggagtgcagagtgcaattgcgaccacctcattatgtacggcgcggaaacggaacggacagggtttacgcgggattgggcttaaggtggcgggtctgtgtgaatttgaggagactggccgacgacactgtacgccagaaaaggtttacatgcacctcaaaggttgttgtcgtcctcggtctcagagaggcgttgaagcaacgctagcattgcttcacacagaacgtttttgtcgttggttgaaagacttttgacatgttctttgaacccttgtgcattcagcccaatcagcgtgatcataagggttatgtccacaactgccctgtgtctacaagcacaagcaaactttgccaaacaacctatgacaatcaaagtacccgacacacgaaaccattgaatcccgtttttgtgttggttaactatgctttcgcatactgcgcgaaacaggagttcgtcggggtttgtgagctccacattctcgtcgggtacatttgacttgtcatactgggatcgggcgtcctcatcacatagcacttcgcgtgcacgcgaaagagccctaaacctttcggcatattgttgcatcatttgagggttggttttctctgggcacttgtctgggtgccatttcagagcttccttattgaaggccttctttatgtcttcaatagttgcagtggaagcaacccccaaaatggtgtagaggttctgttgcaccgtgtttgatgtcagagaaacacacaatgtcgctccatgaacatacacttcatactgagatggtgttgaccacaggtgatgattttccatttaaattacaaaaaaatacaaaaagtgtaccaacgacacgcacgggacatagatgtttctccgctctgcaagcgtgctgacacacacacacacacacacacacacacacacacacacacacacacacacacacacacacacacacacacacacagagaaaagttagtacacgctccttcaggagcgcgatcgagggtgaagagatcgctgtcctgtggtgcgcgcggtgatacgggcgcgaccacgtcacggctaccacatgaagggcggcaagtcaacaatacacgcctgcctacaggtggtacccttggcagaccaacacatgaattggtgaacataccagtgagcgtacctgtacatcgcaagcttctcctccgcgtcctctcgcaacttcttctcttttagatgcaaattcttctggtttagatacatctgcttcaactgctctgcggtgaggctgtccaggtcttcgggagcatcggggcggtcgtccatgggcgctagatgtttgtttttgccgagaaaagaaccacgcccagtgactgcgtgcctggagggaggccgagaaaagaaccacacccagtgactgcgcgcctggagggaggccgagaaaagaaccacacccagtgactgcgcgcctggagggagagatgggtgttgtaagggggtccggcgttgcgactatttctgtagatagttttgcgttgtgccacgcccagaaacacctccgccggaagcagcccgcgcgccgagagacggcgcgccgagatacggagcggtgcagcagtgtcccccgatatccctatcaaaaggaatactgacagttgttacacagttacacatcaggaaacttcatggttgacggaccatctaggtctcccaatttcttcaaaatataaactattttacggtacacaggagccgccattccacgaagcaatttgcggtttgaactgtcgaatatatcgtgaaaaccttctggatcgcaggcggggatcccccaccaaggtactttgtgcttgcaagcattagctagctcgcagaaactattgtcatcatatctcaaggcttcgatctcctttctggcgatctggatgaactcgagttggagctgtcgaaaaggatacctatcttgcccggttcctagaaaatagcagaactgggcgtacccgtcatccgcgcgaaactcctgacaatacgatgcaatgcagtctagaacattgagcatccccgccatggccgacgccagcttcccgttcaccacgaaatggtcggcgtctccagcaagttcatttctagcttcgaccaaacacatcccattgactgagtgctggttcgctatggtggcgagatacccttgttgggtcaaccctatcgagcccgagcatgcgcctctagtcacctgtgtatcggcaagtgcacaagattcaaacactttacacaagtatgaatccgggacaaacatttgtttctgaagtatacaaagatgtcacacctgctgacgcattttcaatgtcttctccatctgtgcaattctctgcttgagtgccctgaactcttcattggtgacagactcttcggccatgtcgaagagtcgcccccggctttgtaagatgcgaaattgccgttttgagaggtaaatggagaccctctgcctgagcggtggtcgtggtagaagcagagccggtatctgagccggtatcatttaagtctccgaaaccctaaaaccctaaaaccacccaccccaataaaacgccggccagctgccgcgatggcagcgacgcgcagcactaggaaaggcgagcatatctgtcacgcgactacctacctttagcgactacttcgtggcgattagcgactagcgaggtgcaccagacaggacccatacatacatacacgctgcgacgctgctacgacttaaggatccgcccgtgtgtcgtaccagctggcgagtgctgctgagtctgtctctcaggggggtggtgtattatgcatgctgaacggtatgggaaaccacccacacctgcgttctgggtgtgtaagcagcacacctggagacggtgacgaggcgcagcaccagaagaagtggtattgacagatccgacgggtcgctgcagcgccgccgcgagtgggtgctgggtttctccgggggttactattatggtaggtgaacggtaagataggtatcaaaaagagtgacccccggaagcgcctccgactatcagctgccgcacaggcgatcacggtgctcccgcaccagtgggtgcctgcggatctcttggcgagtagtccaccccgtccgtgggcaagtgggcggccacgcgacgactacctcgtacagatacccggtagcgactacgggagccatccataacccagcgcacacgtagcgactaaccgcagcacaacgagcgactaacccgtacgaatggtcgtgcgccgtgaatttgcgaggcgcagcaccatattgccacgactggaatcctgtagttctgttacgacgtggcgatgcgttgtggccctgagtttgggatgaacgagtccgataatgaggaaaaacctacagttttacaaatttgtgtctagtcacagggatgctgtgttgtctgcctagctcacataccatttcgacaatcaaatcgtaaactggacatatcacattgtgcttgagtccattttctgggttccgcgcatcgtagatgtccaggcgtctcggttcgcgatcgcgccatgttacttttccaatccaggggaattcatgcttgaccaaattcgcaaagttgaagaagttcgtgatttccgtttctgtctcaacattgaaggttattctttccagttttaccttgtaatcttgcacccagtcatcttgagaatttgtgaaaccatacgaattgaattgaagcattcccgggcgcccgtcacttggagtttcatgcaagtcatagcagaggtttgcaaatgagtcaagagctgacaggagggaaaccactcccatgcacatcatgctatttacttctgctggattagcattatcaatgtctccaacttctcttggaaataaatcaaaagcttttcgaagcaaagcccccgtttgaatgagaagatttgaaatcacgtggagtcgcccctctgtagagaatccaagggtagtcttcattccctgtatatcacaacgagcaaaccaagggtttttgtccatactgatatggtttatgttgtgaacaaaaaatcgtaatagataacgcagatatcgcagctttactttgtactccagcttcttcaggcgattctcaatggcgtcaacgcgtt

SEQ ID NO: 101 - DNA, 22190 bp, Tetraselmis sp.
  source 1..22190: mol_type = other DNA
caccaaagggtatgtgccgtactcgtaccgatacgcggcgacacgcggagtcccggcggcacggatagctcgattaaccgtggtcatcccgaccttctcaccctgttcgcggaccttcttgagaagagcccctactatgaggaaaggattctgttgctgatgctccgctattttcggtcttagtctcgccacggcgctttgtcacgcgcggagcgcgctacagacgacttcccgtatgcgggtccgcggcggtgtccagtgaaacaccttcatacctcacgggacggttcatactataggcacaatccttgcgggctgaggtttgtgcgacagtgtcttattgacccaggtgggtgggggtaacaaaaaatctcgacaagtgtccgcccttcccgtcttgcagtatgtggcaaagtgctcgcagttgaaggtctcctcgttgtactggatcccctcactctgtttcgcacgggcgcgctctatgcagtctgtttcatcgcccgggtatttcaccacacggagggccctcgggtttgccgcggcaaattggtagaggtcgacctcaacggtgttctcccccggaaccatgtggatgaccttctcctcgccgtttatttcgccaagatatatgccgtggtgccagaagcattcctccccgttgccgcccctgaaggggacgatcacatgggtgccgggggtgtgattcttcacaagaccaaaggtgcccacacggtgacaaagttcggtctccgtttctgccatctccccccagtttccagaccccatgatttgaatttttgggaaaaactgtagagaatcgttttgacctaacgaccccataaattgtaacacttcagtcatcgactccatcgttgttgcatgcagacccctctcgttcacaagcttcacacactcccgtgtacagactacattatcaaccaatgcccataactccggattcatgtcttgcttggggtcatcaacaataagtgtgacagtagtgttcaaaaagcgggtgttgtgtagtactgcccgctccattttgtttatagattttgcattgaataccacctttgtgtttcgcggaattttggatgggtcaatctcatcaatatctacttttgctccaactccaaaaccgacaacagcagtagtattcatgttgtaaactatttcccagaaaaaaatgacacagttgaaccgcgtctattcatggtccatcctgtattcaacgcaacccctttccacagtctccacgatctcatgatccgttaaatttacagagacatactcggggctgcgggtctgtgggaactcgtctcaggggcacccgtgatcgcgcgcccacgccaggacgtccaggtggccttcctcgtcggcggcctcgcgcgtcgatctgttccagggacagccgttctcgcgtgcccatatgagaatctccaggtggccgcctcgtgcggccgcctcgcacgtttcttcgtcccaggggcagttctcctcttgcatccaccggaggacttcctaatgcccgcccttggcggcggacgcgaacgtccatctgtcccagggacagccgtgctcgtgcgcccaccggaggacgtcgagatggcctccgtgcgcggcagacgcgcacgtcgagctgttccagggacagtcgtgttcgtgtagccagcggaggacgtccaggtggccgccgcgtgcagcggcctcgcacgtgtgctcgtcccagggggaaccgttctcgcgtgcccatatgaggacgtccaggtgcccgccgagcgccgcggcaaagcaagtgttgacgtgccagtcgcacccgttatcgcgcgcccatttgagaacatccaggtgggcgccgagcgctgcgtggtagcacgtccattcgtcccaggggcagccgttttcgcgaagccaccgcaggagtttgagatggccgccctgggcggcgacccagcacgtccactcgttccaggggcatcctttcgcgcgcgcccaccgggcgtactcgaggcgcccctcgcgcgcggcggtgttcatgatcacgcaggacccgaataggaagtgacggaatcggggcttccagctggcggcgtcgcaggccttgcgccactgcgcggacacgaaggccgccgcccagaggtccgcgggccggaggttgtctgcgaacatgcccgccaagtcgtcgggcacgttgttccagtctctgtcgctctcggtggcggcgggatcggggatcatggcgacgtcgccgggcatccgtttcctgtgcagactgtctcgctctgcttaagttataggttagccgtgttttcttctgtaggggtcaacaaacgtgtttgacctctcgtgcgaacgttgtccttgtgggccataccgacgcgtttggggggaacggtatttttcgtgtgaagcgtacgcaagcgatctcggatcggggtgttttttcgggcccgcgaaaaagtgaagagtgtaaaactgtcccctgctcaagacaaccagcgctcctattaccaatgccaacagcaccaacaccaaccgctcttaccacgcacacgcaccatggatccccagaacaacaacaatggcatttcgtctcttcaagagttcagagattgcatgtttgctctgcagtatggtatccacaccgccgttcagtctattcgcaggaaagatgaactcgacttcgacgaagttcgaagcgccacctggcacctgttcgggattattgtcgagtatgcggacaagtatgacgggcatttcaagcagtatgtgctgaaatgcaaggagaaggccatgcgtatttttggcgccatggttctcatggctagattcctcgatggcagcgattgagctctgcgcctagtgtaaggacacccggtttcgatacctgacatttctcaacggtaacttgtttttaccacggtccgtccgtggcgacgggtcgcatatcgaaaaactgaatttcttatgcgttttagcatttaaagtcctagaccgtatccggacagtcatcatggcaaccgacagccgcagcgacaacgtgaccattcccgccgatgtgtgggagaataaccaggatctcaatgaggctttgatcggtttgcttgagagattttcgtggggggatcccagttcagacgacctacaaactttggttgagttagcaaagctcatcgggttaccgttaagcgtcgaccatttcttgtggactcgaaaataccgcccaagtccccgacatcttgttgaattggccaccacgataggtcaggagcataagataaccgaagctcatctgcttaagtgttccaacaacgtcgatgagttaatcgaagtggcgaagaagctgaacaaaaccagataactgaatataaatacgccgcgcctccggacccggacaggacagttgtctttttccttccataggatccttcctgctacctgccctcctgcccacctgcactgcgccccgctcccccgcccgctcccccgccccccgcgcccgacctttcccgccgtcggagacacacaatggttatctcgcagaaggaggctgtttcccgagaggtaaggaccctagcgtgtcgcgtttccgtgcgggacgtgcacgccagggaggtggaggctctccgcttggtgacggacgacctggccgcggccgagaaagcgaaggggagtctccgggctaacattctcggtgcggaactcaacgtagacgacgcgggggggttgacgcctgtccaaacccaaacccaaacccaaacaactccagaagcgccaataacgccagaacgggtacaacaaaacccgacgccaaaatgaacccagtcccaaacccaagcccaaacgccgactccgacgctccccgacgacgtgcttgggtcgatattggagttggtagccctaacagcgacccgacaggagatcccgaatgtccgcctggtgaacaagcacatggccgaggcggtgacccgcctttccccgcgctggcccgtccagccgcgggtcctggttcgaccgagcgccgtccacggtcttggcgtgttttccacgcgcgcgttcggcatcaacgacgttataggccgccacagagggactgctctcgtggggcaaagcttcccgtccgagctggtcacgaagcctctgacgtttcagttgaagggccagatcgacgtcggtggcgagaaggtgtggcgcgtgatggtcccgcccgcggataacccccccgcgctgctccagccgttccactacgtgaaccacgcgtgttgtgaacactccaactgtatcttcatggaggtaacctcgacgcacgctcttcacacgagggtgagcgtgaccggcgaagctctggcgtcggcgccggaggctacgagactggaggttctacgttcggtcggcaagatctccgtgtacgttttctgtgcttctcccatagccgagggcgaggagctcctgacaaactacgcctggtacaggttcgggtggatggggccggggcagaacattcactgtaggcaccccaagtgcgcgcgcaagaggaaacgggatcgcggcgacaagacggttccttacacggtttaaaaagcttgttttatgtaacaacaacaatgttctgcgtcgcgaactgatccttctccagcaaagcggcctcgcctttagctatgagatcagggagtctcggtgcgcgcacggtgtccgtgcccccggtcacatagagagccgcgctctgtatgagatgtacatagcactcgcgggcgcggtcggcgctcgcaaagtggtagacgatgtcgctgatcaggaggaacgcctcctcgccgtggggcgtcaccctggcggccagatccgtgcgcagacagtactgttttttggtgttggtggagtggggggtgttgatcttggtgcacgacagaagcgcggcgttggccttgaggatcacgcgtttgagtgggggagggctgtccatgttctttgggatttgggtgtgtgcggggtgctggcccttgggtgtggtgcgctggtctctcgctcacgaacgggaggtttaggggttgagggagggtgagtcaaaatgaaatgaggtggtccagggtggtctcgtctgatgacaaccaaatatacgccatgtgatcaacaaaacatgtggggggaatgtttggccacgctggcacccgcgtacagggaaaacgtttttcgacacgctggcacccgcgtacagggaaaccgtttttcgccacgctggcacccgcgtacagggaaaccgtttttcgacacgctggcgcgcgcgtacgagggaaaatgtttttcgacacgctggcgcgcggcacgggtaggcgggcgggcgccgataccgataaaaacctgggcacacattgcatatccaccacactgaccacttcttcggccaggtggccgcccaaccccacctgcaactaccttcacttcacttcacttcacttcacttcacttcacttcacttcacttcacttcgtttcgcttctccgacgatggagcgtccggtatccgtggtggtaggcttcccggcggttttgcctgtggagctgtggacggaggtgttcgggttcttgcccgaggccctggaccgcgcggcggcggcggcggcgtgtcggctcttccgcgcggcgctcggcgatcctgaccgcccgcaagaccgccatcaggaactccgccaagaccccccaccagaaccccaacaaagtcccggcgccgacgacggagatgcgctgtcaatcacgctcgattccctgccgacccccgccccggcgcgcaccctggcggtgaccgcggcggtttcggggtctcgggcgcgtctcaggtggtgcgtggaggagatggcactggtgcgacaggcgcttcgcgtgagcggcggtttgcgcgccctcttccgcgccctgggagcgcgcggcgacccggagtttctgagctttgcggtggactccatgttggtgggcgactctcgcgtcccggtggacatgcacgccgtatgcgatggagcggcgcgcggaggctacactggcgtgctccggtgggtggcgcttcgggagtttggtgcgacggagaccgggaccgatggtggggacgggggcgacgatgcgtccccgccctcgatcctgcgcgaacacctgaaccccgcctcgcctcgcggcttcatggccgcgcaggccgccgcagccagcggcaatcttgtcgttctgcagtggcttcgggatccgccgttgcaggagcgcatgtcggcgcgcgcaagggcggtcctgaagtggtcctggtgcagcgtcgaggcgaggatcttcgaggaagctgcaggtaacgggcacgttcacatcctggactggataaaccgccggcgcccaaccttcgaccacgtcgacgcgcgggaattgcgtcactacagggagctcgggcggtgggcggagaactccgcgtgcccgtacccgatggattgggcgcttatgatggccttgtgcggtggacacatggacgcggtgcggtggttcgcaatacgcgacgtcgaggtggacatgccgcgcgcgtacgagatggcggctcgtcatgggcgcgtggaggtactagactggctggcgacgctgtcgcctcccgaactgcatatggaaaaagtgttctacgtccacgccgccgtggaggggcacgttgagtcgctgaagtggatggacaggatgcacgctccgtggagcgcggatgacttcatgcactggggggaggacgtcctcttcaagcgccatcgtgactcgccggagctgatgcggtggctcggggagcggggcgtgaagtgggacctggaggccgtgtgcacccgcgcagtttctcccgcgaccgcgcgctggatcttggaccttgtgacctcgcccgaggtgcagtccaatctcgccaacgtggtacagcccgggcaggtggagacggttgtgcgcaagatcagacgaggaaagattgtgttttccatggatgtcgccatcatgtcgttacggtcggacgagggctttgccgcgtacaaggagctccgcgccttgttaccgatggttcttccggcggctgtcatcaacccccggcgcgcgctacgcgtgtattcggggtcccgcgtgtgcgtggagatactggagatgatcgcgtcgacggcgaacctgccggttactgacccggagtggtccattgcgatcagcaactgcatattccaccgcgagatcgaaggcgccctgtgcctcctccgccacgtgggggccgactcgatctcttcgtcggcggcaacggcggcggcggcttcctgcaactttgaggttctccggtgggtgtgcgcgcgctcccaagaggcggggaacgacgaagtgcggcggtacatacgcgatcgttgtccgtactttgcggccgagatcggggacctggccatggtgcggtggacgcgcaaggagtgtgggacccgcgtgcacaggaggagctatcggagacatgtttgctgcttggcgtaccagggggacctcatccgtcgggaacatgtgcatatcccacaggatctcttggagacgggggggcgctgggacgtgtgcgacaaatgcaagcggtggtgccaggatgtcgaggactcgtttgttgatacctgaaaaaatagagtgtaacaaattttgaatcgatctacacctacctgtagatataagtgtcccagaaaaaaacggaaaacagtgtacagcatttctcaaaaaataatgcaacaccacacgtatccgcatgtcggagggtacttctgtgcattgactagaacaattataagtgtcccagaaaaaaatggaaaacagtttacaaattacgccgatttcgtgctgtcatggagactagcaaaactagctgttccatttctagctaacacatgtttattgagccgtcatcacacaaagaatttagacgttggcggagggctttcagtgatatcaacacacgttaaattgtctaagatgtttgcacacggagcggatgcggtggatcttgacattccagctcaacagaagactgcaaacgatccacagtcgtgtctgaacaattcatacaaccgcttgggattcgttggattcgctgcctcggacacagcggttctcacggtagcttctctgcattcttcattgtcattcttataattgattactctcaatgcatcatcgtttcctttgcaaaactctgtcaatcctatcgcttcaatggctggtccaccgcccaaaagtggcaagccgagaaacttgggagaattcatgtgtataactctatattttcctttaatgaaacctacatatatgccatgatgccatattatgttttttgaccccaagcttctctttctcggtacagcaatatgttgtccgcgtgagaaactatttcgtagcatgtctgctccaacctcatcgctgttcttgggttggagctgcacaatcatccgctcgttttgactgtccatccctttaaactctgaaaaagaaaatttatggaacacccctgccgaatgcccaacaccattctaaccccaccccaccccacctccattctaacctaacacagctgtatccaatgggtgttaaactacattccagaaattgtgggacaccataggtccgctaagttcgtccctcaaaacgcaaggtagtttatggtcccctcgcggggacctgctagcaaggtcaccctaggggttacccttgcagcgcgactgtgccgccatcgacgcgcacgacacagccgtgggggttagattttccctatcagaccaagggatgatgctgcggtccctgtcgcatggctctaagcgcagcttcgtatccttgcttggtgtagggcgctctattcccgcgaggaaaatctcaaggatgctgatggcggcgtctttgtccctcgacttgtaaggagatgcgcgacatgcgttggatgaacaacgccgcacctcccggacatcgaccatccgctggattcggcccccttcggtagtcttcttccacctcagcattctgataggacatgtgttaggttagaatggaacaccccctaaaaaatataagcccacttcagatgaatggcgtatggacaagagctacgagaatgtgcattgcgggcatattttaccttctaccgataagaaacaagacatattgggctcactaagtaaaaataatacaatatgcgtggatgaaacaacatttcaggtaaacatgagcccaagaaccggttacgtcaagaggggctcgagactgtatagacagcacattatccatcgcgtaaacaaaaagatttgtttgtgtgcaatatctccagtgtcaggagtgttctcaaagctttacgacacaaacatcaacggcgaactgttctctaaatttctagacgagcttccttttgaaacaggaacaactataattttggacaacgcctcgatacacaaaacacagactgttgcctctgttgcaacacgaaaaggctttaatctgaaatttatcccaccttattcacctgattataaccctattgagaatgtgttcggtatagtaaagaattcattcagaaagtggaatgttactaaagggcgaacgttacaagaattcgaagagggaatattacattcgtttgcccaaaatgtagacacggcgacggttcgcaagtgttactcccattcaaggaagttcatatccaatacgttagaatgcctggaaatggcataaagtgtccgagcgcatgttaaggacacggagtccctttctatgcgtggagtttcccagcgcccggatcgcaacgcgtgagacctccggtacagatgcaaggactcgcccgtggagagatccttttttgttctcctcgccgagaaaaggcttaagcgtgcatcagaactcaccacagcataccttctctcgctctcgcttcaacctccctgggaagggcctaagcgttcgccagaacacgccacagcataccctctctcgcttcaacctccttggaaagggcctaagcgttcgccagaacacagaaaacaaaacccacctttactgacaataacatgactaccgagccgtcaaagaaaaaacggaagaaggatgatgaggagaataaagtcggaggaagaggagggcgtttgtcgaaagaagctctggacgaattactacaaggatttgacaacgtgcccgacttctggaacgacaagctcgtcttcgctttacgacacaacaagatcaccgaaacgcagcttcaatgctcggccgcaaccagagagcaagtcgtgaagaggtacctgtccagcttgaccagcaacgctgtcgttatggagaggatccgatcctattcagtcctgtgcacaaaactccaccggcgcgcatccgctctactgaatatgacagtgtgtgagaacatcaacaacgaggacaacctcctcaagatttgcgacatcctttcatcccctctgaagatcaagccaatcgttgtgtgtctgcgcgaccctctctccgacctgttcgagaaatgcttgagaaagcacaagtacatcgactccctgggaccttcgctcaacgaactctctttggtgtctcactggtcaaacgtcaagacctacgtcgccaacaagatccacgcaaacataaaaactcagatcaagagccactttctgaaaaggttaaagacctacgtgaggtcccatgtgaagggacctcctgatgctgccgtcaagtacttgttcggcgagtctccttgcgagaacgtcgaagacaggactcttatcgaaagcatcgtggacagactcggtaagggaggcctcctcaaggacggactaccggagatcccggcggagggcttgccttcctcgctgatcaagtttcatttcgacctctgcaaagcttcggaaaaggggttccgaccattaccatttcccagtattggtgccaggcaccatgctagaatcgacccaggagtattctcaactctgatgagggaccttcccgatgctgagagagatcttcatcgtgagctcaagttgacacgagagctgtggaaccgcaaggcaaatcgcgtcattgggtacaagaagagacagagggagaagaaggtcaacaggaggggggagaacaagaggacgaagaagttcaggcgttacaaccgactcaaggtcagaaagttgaaggacactcagtgggtatcttcaattgaaacgggcggtgtggcggtctccatcgtcgtcaagactttacacagacctgcccgagagaagaaggatgtcgatcaacattacgaagaggagctcagaaagatacgagaggtgtacaacaactgttcgccaagcatcaccgcattcgatcctggccacgtattccttctgacaggagctaccatccccaaatctgacctcaacatggaggcccacaagggagaaatggtttcttctgcgaagcattcggccttctcacgagcgccgtgggcgaagatatgtcgtcaaggagaacaacgaacgtgggaagaagaacggaggtccacggcggaggtgaaagaggctcttgacaagcttactgaaagcggaggcgggagaagctccgacatcgatatatgggcaaaattcgtgaaggcggcggctgataggatcgatactctcgacaaggagtttcttctgaacgatgagagatgcaagcgtcgcttcacctgcttcaagagaaaacagtctgccctgatgaaggtagcagggttcgccatccggaaggaagagaagactccgatcctcatcggtgtgggacacgcaaatgtcagtgctacgatgaaaggatgtcctatttcagttcctaccaaggcaatccagaagtccatcaagcgagctttctcccaacacgacaagaaggggtacatcatgaaggtgtgggagcacaggacgacaaagacgtgctacaagtgcttcaacgagatggagatcatgtacaaggagaaggacggtaaacaagttccggacagagagtcccgccgatgcaatcactgcaaacatgggccggacgaacatggccctgagaggcccaaggaacgtaactgtgacttcaacgccgccaagaacatcctacttgccttcatcgctatccttcaggacaagccccgtcctcaacatctgtgcgtggtcaagcgcacagatgactccgtgatcaaggccagaaggaaaagaaagaaggcatcatagttgactcaacacgcttacaaattacgccgatttggtgctgtcatggagactagcaaaactagctgttccatttctagctaacacaggtgtaaactacaatttctggatggtggtttacatcggcacattgacacatgaagtgttgcattattttctgagaactgctgtaaatttttatttctccgagagaattgcgactatggtcttgagcattccgggtagcgcctcggcaaagcctgccgatctctctccctccagaatgcttcgtgcaaccacgaagtcgcgcgtctgctgcatgtactgctcacaggactcgatgatgtccgcacgaccggcggcgaggacgtgttggatgacagcggtggcgatcttggggtccggggccatcgggtcgacggcgcacgtgttcagatcacgagcgcgcgcaaaaaccgcgttaagcagctcgaccttccggttgacggggatgtcgcactcgatgagtccggtggcgacggcgaagggtttttcttgcgcgaacttctccagaaccccggcggtgtgcatggcgagaacgacgtccgcggtgaaccgcgtgttgcggggctggtcgaagctctcggactccgggcgacgcctcgcggggatccacccttgcttgagcgcctcctcgaggacgggggcccctcgatgctcgcgcgcgaggcgcatgatctcctcggttgcgttcttgcccttgcgcaacaggaccgccgctatctcggcctgagtggcggaaacgatcgacatggttgttgttgttgttgttgtgggcggcgtgtgccggcggcggatggctgtcgaggtggcggttatatgtggtgactggctgttgcggtggcggttatttgtggtgactggctgcgctctcaatatgatgtcttgccaacgtcgcgccagggttttgcgcgttatatatttctagaaacacgtgccgtaatattcgtaccggacgcgtatccaaacagatattctatctcatgcacggttgtccaaaaacattttcgtgaacgcgtgcggccgtaatattcgtaccagccgcgtatccaaacagatattccatcccactcacggttgtccaaaaacagtttcgtgaacgcgtgcggccgtaatattcgtaccagccgcgtatccaaacagatattccatcccactcacggttgtccaaaaacagtttcgtgaacgacaggcgttaggaagacgcgcgggcacgtacacagcaccacgcgcgcgcgccgcgcggcgcgcgcgtgcgtggatacaaaagacggcgcggtgtgctgccaaagttcatagtccaaccagctcaccggctctaccgtccatccgcccgcttcttggtatacaccctccgccaagatggccgctggaccgcgtcttctcctgcgcttcggcccggactcccaggcccccgcctccaaggtcataaacttgcctgcgagggacatgtactttgacagatccagctttgagtacccgggccacggcatcgtaggaggcatagagaaccaccacctgcgtttcttccccaccgaagacgggatctcggtcgcgaacgaggcgatggagttcggcgcgcacctgttccgccgcgggaccttctacacctggctggcgcccgatgaatcgtcggcgctgttcgacggcgacgtcctgtgggtgggaactacgcgttccagccgcatccgtgggtgtcgcggcagcaccggcccgtcctcgttggtgagcttggaggtgcgtgacacggggcgaaccaccgggttccatgatcttccgcaggaggcgctggatagggtatgttacttcgtggatgactccttcaccgaactggccgcgaggtgttcatgccggtccctccgcgacgcaatccgggcctccgcgagcaccaggaagcgcaagcgcgtggctgagaccgtgttccgcgggtccgtggcctcgcggtgtcggggcgatctgagggttgtcgtgaaggccctgaggacctcctcctgggactactttgagtgggctgtggcgactcacccgtccgtgcggcttgacaacgccatgagccttctctgcgaagcagggcgagcggacacagaaactctaaggcgcgcgcgccatggggtgtcgctggaccgagaaggcgtgcacgatggcggcggcggatggcgatctggatcgtctcaaatggcttcgcgaaaacggttgcccctgggacatcaacctgatcccctgcgcggcccgcgagaaccacctcgcactcgcccagtgggcccacggcatggggtgccccatgccggacgacattgcgagcgaggccgccttgtacgggcacctggagttcgtgaagtgggccctctatctaactgatccggagtcccggtggtatgagtttcggagctcctgtagagtggcggctattggcggccacgaaccggtcttggattggctgctgtgctcggaacgcgtcgcgatgggcgcggcgaaggagctgctgggcgacgtgctggtttccctttgtgtcggcggccacgtccgtatgctctcaaaacgtctcgcgcaggtaccgttggtcgccccgcgcccagatccagatcagcaggcgagtaacatggtccttctcgatatgccgttctgtccgcccgacaacgtgatctacgacatgtgctaccaagccatcgagaacggacgcctggaggtgcttcaggtaatcgacgagtacctcttatccccccaagggcgtgttcttgcggacctgcgtgtgacgagggttgaggaaaggctggaatcgctgatgctagaagccggtagatacgggagactggacatcatgaagtggctgcattgcaagggggtcggaacccgagaggacgccgtcacgaccgcagcgaccctcggtcacgttaacgttctcaagtggcttcgatctatcgggtgcgagttccccccaaacctggccgaacagtaatttaacctattttgcgccgtggaattcactttgcaccgtagggtttgtgtataccctagttcccgggtttactatcagtacttaagactcactggtgatgtagcttgggtttgtagaccttgggtgcagtgcagcattcattagcatgaaggccagccgcgacgcatatccaatgttggttttggagcattttgtccaaaatgggacaagatgaggcaatgaaatcaatatttattatgattattacatccagcggctagctagccacaagacgttgctaatagtttattcgttgagcatccccaatgaactcaagcaagtccttcttcgtggctgcgttaaacttgacgactccgccgggtttgcgttgcgctggggtggttgacataacgtggacgcagttgtttcgtggctggctgatttgccacccagtttgcgcatatgtcttcacgacttggacgctttcaccgtaccacttctttctgaccatggtgccgttctcgttgaacacctctcgacttcccgacgcgtcgtggatggccttcgcgtacgatagggggacggcttcaacaagcttcaaaggaagcgtcaggcacttctcccagcttgtgtcaactggcttcttccctccttttgtctgcgcgtacaaccataggggcatgaggggtttgccctttgcatcggcatggaagggctcgtatacggccacggtcaacgtgtcttcggtagtctcgcgcgacttcacaagcccgatgacgaatctcgactcccaatcaccaagagtttcgggacacttgtcttcctcatgcacctgacgatggccaagaccgcgagctatgttagtcccgagcgagacaccacgccatttttgtcccagttgggacaaaataacaagcaaggtagatgaaccaaattgttttgtcccgtaaaggacaaaaatgacaaacaatgggactcacatcggagacgtcgatgacaacgaggttcgagccctttgcatcgctgggcgatgtgttgtcatgaagcctctccgccagagccgcgagggactcccgcgttcccctggacgcgttgatatggttgcaccaggaggggtttgctctggaccactcggtgttcgtggagtctgtccggcgcggcaatctgcccgccatcaagtggtgttacgagaaggggattctccccccggagtctgtgttcgcggagatgacgtatgtcgccgccagcacgggtgatgtggagatcatggagtgcctcaaggacaaagggttcccgttgcacccggacgtcgatctggtggctgtgtcgtccgactggtacggaagcagcgtggccatgtgcgaatggctccgccagaatggtgtctttctgacccgcgcccgcaaccagctcatcgaggagtgctggggcgcgagcgagaccaggcgcgcgaagcacaagttgaggttgatccggtggatcaatgccaccgagatgccggaggaacgcgaggttgtagatctggtttccgaatgaatgtgttttcgtgtaagaaaaaacatctttacccttgtcaatgtcaaacagattccaggcactagccaccggaattatgcaggacgatgcagcaaacatcacccttcttaggtttgcagaggcatgttacgagtacgatgaccttaagccgaaaacgtgtgatgatgatgaccagatctttttcaaactgcacgaacatgtgcagcaatactcccccgaaacttggaaacgattgcaacaacgatcgcccacacggagctctgagcttattgtgggaatttgttcgcaatgcgactggtgtagttgagttatttcaagtgcggtgggtcaaggctcgtgggtgaaggtatgacctacgatcagtttgaagaagctgcgagatcgggtgatcaccaagaggattccgctttcatgagtgtctgaggttcattggaaggttcgggctgcgaacctaaaccctacattgtaaactaaactacattccagagattgtgggacgccataggtccgctaagttcgtccctcaaaacgcgccgtctggcacgttacacgctccggcactccgccttgtgaaagagggtccagtcctccctctggcactcgcggtcggagtagtagacgtccttgcaccgggcgcacttggagcgcgggtccgccttcccacaccgttggcacgaggcgacgagcacctgggtgaaccgccggaccgcgtcggcgtccgggatacccagcccccggagcttgtggcggatggaggagcgggtcccggagtgaacgatgacctaaagctcgccgccgcgcgactggtgggagtacatggggcgcgcgaacacgctctggtgcgtgagcatctcccccacgaggaacgcgaggtacttgtcgtcgtccgtgatgttccgcagggcccaggtgacgttgttctgcatgggcgtgcagtgtgacaggacggtgcgaacggttgaacggtcgcggaattggaagaggatggcgtccaggaacgaggtggcgcggtcggggtgccggtggaccaccgtggcgtccgggacgttgcaccccatctggttctgcagggcggcgaaaagctggtcttgcgcggcgtccaggggctccagagcgagcgtcccgtccgggaggagggagagtttgacgcccgtgaacgcgtcggcgacggggttgtggcacggactcacgacgtgttgaaacatgtcgaggtgcggctccatgtacagcacctcgtccacacggccccgcgccaggaccgacaggaagacctgttcccagcacactatcgccccgccttggtcgcgatcatacgagaagatggcgtgcagggtgtgccagagggcgtgtcgctcgacgtccgcgaggacgcggccgcgtacggtctccagtatgtgcgcgtccgggggcgggcgcgcggggaacaaccgggcgaccatggcggcgagtacggcggagcggaacgaggggtccgcctccgctcggcgcaggagggcgccccccgcttcggactccagctcgtccaggaagcgatccagcgcgtcaggtggggccgccatggtttggtatggccgtggggcgtggtgtggaagcgcgtgtggggcgtgcgtgagtggttagggttagcggggtggtgtaagtatatgggcgcgggcgtgtgcggcgggccgcggagtttgttggttgggcgctcacgcagcacaagttggttaggtgtgtagggaaaccctaggtgtgtaggaaaaccctacaaccggggtaccaaatacctgcgcaaaaaccctacaccctaaacccttcggacaacaattatggacaacctcgcgttcatccatggaattccccgcgagggagttgctttggcggttccgttcgaggacggaacgttatccattagcgtcgggttcaccatccagcgtgatgttgacatcatcgtttggaagtgtgcaagagtgggggaagacggaacgctattcggaaagaagtatgggtaccggaagataggcggtgccgcggccatcggaccaatcttcccgaactagtccacatccttctggggcatcagagaagcgcgtagatccgtcagaatggtttcaagcttttcgttacgcacggagtcgaagcaatggaccccgaaccgcaggctctcgatgtgttcgtagtattcgtaatcgtttggtaatccgtggtttcgtaactctgtcgctgtctttttgtcggcggcgacgcctacacctctggcgtgacactccctcagaatttgttgaagctcacagcattgccgcagcgtaatgcattccgagaaaatgagggacagagcatccagtactaatgccaacgtgttccgggaatttcaaacccatttgaacgaattaattaactataatttggattataatcctgtcggttcgtgatgatataccagtggacctgattcgggcccactcgctcgcagacgagccgctgcccctcctgtaatgccggcatgtacacgctcgggaagtaaggaagatacccgggcgtggcagggtatgggttgggtgtcacccggatatcttccggcattgtttgacgaacaaaaagaaaaaaaacaacgcatcctgcgttcgcgtttaatttacagtctttcccaaaatttatgcaacacctagagcatcgcactttgggtaaccgtatgaaccaaggaggttcgtctagcaaaacaacaactaagtatgccagctagaatcttgtgcatggtggtacttgtttgatcttctctccgtctcgattccacacctcgggcgccgagtcacattccctcgcacggtctcgttccattctaccgccggcattgatggactcgtcgaagggcttggcgggaaagatcctcggtcgctcggctgcatcgccgcctatatagaactttggagcaacaaagctatagacgaacgttgtgccttgtgtatgcggtcggttgaagaagaagctcttgcgtctggagtgacgccaggtggtcgggcagtcgaggtcgtcaagtcttccatagcttgagtcttgttgacggagaacctcgaaatgtgacaaacagcgacaggtcccttccttttatacccgttttcctcaaggggaggacgcgtaacgatactgggacaggcgcgcacttttcagacgcgtcttcaaattatacggtccagctgtatcgacgagacgatgtggtgacacctatttttgtacgtttacgaggtcgaaacacgcgactattcacgaaacgtcgcgaccgttttttggaagaagattccagaaaatacggctaagttggaagggtgtggtacttgcaacatgctgatacgtgtggtgttgcattattttttgagaaatgctgtaatttgttcatgacgaaagtgggtataatcttcgacagctgtgtgcctttccatgagagtggctcgaatcgtggcggatgtggcagatgcaaaattacggccatcgcccgtgagccacgacacatacgtaaaagatgctgttacagctatggccagattcacagacgctttgcaaaccgcaatcatcgtgcacacatgacatttgccatacttattttgaaaggcttgcgcgcaatcacgtgcgtcacgaggagggtcttccaatactaaccgagctagccttgcgacgcacttgagctctccctttttgagcgtggtgggattgcattggagtgcccactcaacaaagcgcttgcccctctcagtcttattccaatacacggtcgcagacttcacgtccaggttctgcttgatcccagctacaacaaggaacgtatccccacttggcggggaaacacttaacagggcaccaatgtttccgccccaaaaaactgccgggttttccgtaagatgttgtttttccttttcccattcatggcgatggaagggcagaggtctcttcacattggatgctgcccggaagtcaaagtgtatgcaaagaaccttggcgccctcgacggaatcgcatgcggcattggcaatactggtccccgtccactgccgtttcccgagattagacgcctttttttcgtgtcccgtcgctgttcgtaacagtctcgccacatattcagaagtcgtcttgacagtgcgagaagtttcccggacctgatccgttaagcgcttcaggtccgcctctcgcaggaggtggtgctcctgcatccaacaaatgtcgaaggacatggcctcgttagactacatttcagaaattcagggacaccatatgtacgctaagtccgtccctttaaacgcaacgtagtttatggtcctcgagcttgcaaggtgacccagctctcaaaaaatagacggccggcgagctaaacgcgttaacctgcatgcacaggcttttacctgtagtttttactttagtccagcggggcgaggagggggtgtgtatttttccaagaacaaacacaatttcaaccatggctctctctccagtttgaacatcgtaaaaatgtggcaaagtgctcgcaattactgaagggggcgttgtaaggaaactggtatccctcgacagaccgcgcaagtcgcatagtatcttcgagcggtaggacaccgtccactcctgtgtagtgtatccaagcaaaatcggtcttcttagcaacaaatgcgacccactcgcgctcgcgtatgttggcttgttcattgttcaatccccacacgtcgatgactttcaagtctccaacatatatgccgtggtgccaaccatcgccacccccaccgcgaacagcgatatggtctccgggcttgatttggacgatcagactgtgagagtcttggaatgtacttgccacagactcgtcgaaagtgagtgaaacatgcggcaaatatttttttgcgcgcatatcatcgagatgcttctcgaatacagtgatgagattggcgccctcgccttcggtatgggcttgaggttggtggtctgacattgcttgttccacgggaaggagagaaaaacgtcgtgaacaaacgcaagacatatggtgtcacgccggccatggaatgggggtcactggagtctcgttttgcatggcccaatactgagccttctgatgtgctgccgttcagccgggaatgcttcgtaccttgccagatttttcctcttttcaggagtcttgcgtcaattgtaaggcggtggcaaggccatgtttcagagtcaattattttttattgtgtgaagccaaaatggccgaccccaacgcaccgcctcgagatacgtcggcaaacgtcggacaccaaggagggggtcctgtaccacagccagacttcggatacccagtgttctttgctgtgttcccgcgggagttttaccgctcacccagagcccctgaaatcttggcagaacttctgcagttgcagcttcgacacgtgcaaccccgcaggtgagctatgacacaccaattgtgaaaataccagtgagcgaacgcaccgtgacaccggctacgccatccagtaaggtcgatattgaggtcgaacaacgtcaagtcct

SEQ ID NO: 102 - DNA, 21782 bp, unidentified
  source 1..21782: mol_type = other DNA
  misc_feature 1..21782: note = Fanzor polypeptide
ctagcggtgaagatgcagacactacagtcaagcagtacaatatgctctataaggaggacttgagaaaactgcagagtgcgtacaactcggtactttccagccaggctaccttggaagccaaacagcgcgatatggcaaacgcactcaaagcttttagttgggttgccagcgtgatgggtgtgtttttgggttcttggaacgtagcatcggtcggctttgctttggagtctaaggagtggagggaaaagactggcaggctacaatgggtcgaaattagtgctatggttggcaatgctggggtcctgctcgtcggtattgttggtgttgtgatgttactcagacagtgctgcctaaatcgtaaaacccacggtgcatacaagtcttctgtgtaaaaacgtagctgcgctgtacgaattcattcgcaactgctgtcagatcatcatcaatcagatcagatggattgtttacgaacaatgctcctggatctctagtggctggcgtgcccgcccgggtgcgcgctcagggcggcccgcaaccggtctaggggcgaccccctggcggccgcgcgggctcgcagcactgtctcaaactgcgccagctgcagctgcgtgttcagcgccatgaacttttccacgatgcctttcaggggaggtggcaggatggcttggtgccttacgcgccctccgagtcgcaccctgccgtcctggccctgtgtcaaccagaactggggcttgacatggaacatttccgagctgacaaagtgtagcttgaccttgttggtcactgtccagcgagaggggtctttttgacacaggtgctggtgcgtggtcacggacatgcgggagccggcgaaaaaggcgcgtaccggagacggcgttccggagatgtcaatatcgaacacgaaggcgcgctgccccttggagtcaaactccaacccttttcggcgcccttccggtctcaggctgggtccgtgcactgccagcaaggtgtcggcgccgaacacggtctccagggcggcggccagactcgcacaccccacgtccacgtcggggaccaccacctcgcgcatcctttcgtactcggtgtaaatttccgtggaacagtgaacgacaaccaccaggtttaaagggctgggccatgtgtcggtcataatgacataccaaaggcacagcgaaggagagatgcccgggatgcctggcgtgcactgctggcaagaatttgcccaccgcgttgagtatggtaatgacaacgtgggcttcacagtgtctgagttggacatcccgtgtgatgcgtgcggcagcactgaaggcatggtgctgtggaccgagtatgtttcgtctgactcgaccggggcgggcttgtgcgagcaatgcatcaccgcgctgtttgcacatgcccgggcctgcctcgcaaattaaccttgcccctggtcatgcgggtcatgtgtgttaaaccattgcccaaatcatacgtgttggctgatcgcgacgaagaccttgttgactttgtcaagcgacgcggtgcagccttggcagaggggtcagacattgcggactggatgacggcgaactccaagggtttgcttggctcgatacaggggttgtttgcctacaaaaagattactgttggtgacaaggtcatgatccccactaccaagaagactttagaagatcgtcaaatttggctggcttcggttgtgcaggcagcgaattttgcgtatgccaaccctgcttaaagggcgcgcgaccatataagcaaccatggccaagctgtacgttgtccgccacgagacctacatgatcggcgccttcttcctggaccggacggatgcggaagaacacacgcacgtgctagcagagcagtgggtgcgggagggaattctcaatcgtgaccgtgacagcgggctgtgtgttatggagctggagctgggtcggacgtacggcgacttggaagacacattggacttatgaagtgggttcccgagacgctgcgcaggttttgcacgctttgccatgctttggggcgctttgggcgcttcgaaagaagtggtcaagaccgtgtgtgtcgctgtccgggcaccctttgtttctcatgccgctaaccgagtacctgctgttcatgccacctcgctggtatgactgtgaggggcgggagcagtggtgcccggagccgttgctggttccgcacgcggccatcaccgaagagcaccggcgcctgtacgcacgtgtgctggtggaccattccgaggacgatgagatagcactacgtgaggccctgcactccatcccaggaggcctcaaggcgctgacgcccccgctcggctcttgcatcgtttccgtgtgggccccgtacggggttttttggtgtaactactgacttgtcacgaactgtgtaaagtacactttgattagaattgattagcaaggatagagatcgtgcaattgacaccgggaaccatcgtaagcttcacattcatcgtcagaggtgtggctgtagaaattctccaagtggtacgtggcttgcacctcacaggcaccgctctcgccacgtttccgtttgcccttgacagcgttgacagtcttgatacagaagctcaggtcgccgtgcggcccaggtacgtgaagcagggcgtacttgcgtccatcagcaccagaaaagagatcggcaagtggcctagcctcgagggcggctttcaaggccggtgggaccaccaactttccggggccaatcccaagaccgaggcgctggtcgatggtgaggtttgcatcggcaagcatgcgcactgagagctcgcggggcacgtacaccggtgacagcattgaacggatgattgaatgaaagatcaagtcgagcgcatctaatacacctgccaagtcgcctacgcgttctgccaggtcacggcacgcgttgtgccaagtaggcaaagcgtgcaaagcatgacccttcaaaacccggatcgccgtcgtctgggcatcctttcatttcttcagtccttctctttctacgatgacgcacacactcgtccagcagatcatggccgaggattcggcggtacactccatgctggtcccggatggattgctggactccgtttcaaacctgctcgaggagtttggcggctgccccccttccgactggccccgagcgttggaaaaagcgctattgtcgatcctgaacgccgaagagaaagaagacctgccggcaggcgttattgtcttggacggtgccggtttctgtttgatcccctcgggttgcgtgatttcccgaattttccagatctgtcacgaatgatgtaatcaaagaacaaacaacccgaaattgatttaaatgacgtacgaaccacgcaagaccacgtacgacatgacacggtggaaggcggctgcgtgttatcccgctgacgcgatttggcggtgtgcgagagctagccacgtcaaaactgcttgcgttgtgcgctgcgagaccgagctgcaggacggcacgcggatgaattggtgtagtcgcaagggaggcccttttggaccattcgaaaaatgctttgtcgattctctcaaagtggtggacgacccggacatgctcaagctgtttgaccagccacatcgggtcaaacgggtcacagctatggcggtgtacgacgattatcggttcacaacgtttccaagtgaagtgtccttgatcgcggaggttcgtcgagccatggcagacttcggcccgcgtggcagtgtgcaccgcatcgtgctccacgtttggacccacgggcggaacacgaataccttatgcgtgtggaccgattacagcactggagccgagatggtgggggtcatgactcggggttatttggggactctcgtggatacggctcaacaagccatggatgtgttggtttggatcctaccggacgtgtggatagaagacggtgtatacgaactcaatttacgtggaagccatgggcaagagatcgtggtgtgggactctgaagaggcaactgcagctgcaaggaagtgggcagatttctggcaagaatcacgcaaaacgttcattgaggtgacttgggcacccgcacgacacatggattggtgtctgtcacaagatgaaaagccaacttgattacgtgagcgcgttgacggctttatcacttactctattctaccgtttatggcgccagtacttgcaagaaaatgttggcacgggacatggcacctaaacgcaaggagtcctacgcgtcggccggtgcatccttccgtagtcaggcgcgcgtcagtgatggcggcacggacttgcgataccgagaggccttgactgttggacttaaagcaaggaagacggaacgcaaggaagatggaattggcggcagacatcctgcgtcggcgttgtgcggtccgcagagccgcgataaaagaagaagctgatgcactcaagagagcggaagagtgcccgatgatggatgccgacgaacacgcaaagcttcgacaattcatcgagttgaaacccgaagaacttgcggcaaccataacggcttccgcttcagttcggttctcgtatagttacgaccaagcgcacatcagcattccctggatgcctggaaccgttggacaaccgactaggctggcagtcgaactgatgcagtccgcgtcatggggcgaatgggcatcgttgaatggaagtaatgtcgactttcacgtcaagctcaaccgtgatagcattgagttgacgacgcgacatccaaaatacgatccagtccctacaagacagtgccctgatgaaatacgagacgccatccttgcactagttgacgactcaaaacgtgctgtgggatacgagggcacggggtttgtactccacaccgcgcgacctggcttttatacctggcttttgtacctggcttttgtacctggcctttgtaccttgtcacgccaagtccacgttggcacgccagcactacgcaccgcgacgcgtggctcggggcgtcgaggaaaggacctcagacttgaataccttcagccagttcagatgttgcttccgctgttcatccagaatttgcgattggaactctttgttgttgttggcgtgcatgtctgcaatgtctgtggcgctgattctatcgcccttgcgagttttgtaccggggagatttcagctcgcgtagcagctcagaagcacgctgctggaattctgcgttgtgttccggaacgcagtatgctgcaatgtactctatatggcccaggttttcagcgagccttttggacacaaacttgctcaatggcgtgtagaccgttcctgtttccgtggtctcaatgacgtggcgctttgccaactgcagattttgcagtctgggtgggccgtggataccgtgcatgttccggaagatggagcatgcaccatcttcgggtggacatgccacgacaaggagtgccatccgctcgttgtcgtggtagcagtccatcatcacttcgacttctgcttggcttcctgaagggagaagtttcgtcttcacaggcttggtggcggtggccgactcttcgacggtggcaggtgctgccttggccacagcattcttgacgtcgccgcctccggaaaccagataacagatagacgtgatcccaacatcaccgcatctcttctcttggtgtctctttacgttggatgcgaaggtactcgtgtatgcacagttggcacattggtggatagtcgagcggaactcaaaggccttgtgactcatgaacttgaatggtggaggtgcctttaaacccgggaatgtgccttgacacacgcaagggtgcatcgggcctcggacgtgtttgaatagtcatggctagaagtgcttacgtgacacgcgcaaggggactcagggctccgtgcgtgttagtactccaaagcgctcccgtgcgcgtctacggacctgtaattattcgcaccctagtgttgttcttttagtgttgttcctgaaaaggaaaataattatgaaaatccttgtactgggaacaagttgcgcacaaccccagggacccagatcgcgttcccacaaccacagccataagccgtaattattttccttttcaggaacaacactaaaagaacaacacttgggtgcggataattatggctagaagtgtttacgtgacacacacatgggtgctctgggccctgtacgtgttagtactccaaagcgctctcgtgcgcgtctacggacctgtaattattcgcaccctagtgttgttcttttagtgttgttcctgaaaaggaaaataattatgaaaatccttgtactgggaacaagttgcgcacaaccccagggacccagatcgcgttcccacaaccacagccataagccgtaattattttccttttcaggaacaacactaaaagaacaacacttgggtgcggataattatggctagaagtgtttacgtgacacacacatgggtgctctgggccctgtacgtgttagtactccaaagcgctctcgtgcgcgtctacggacctgtaattattcgcaccctagtgttgttcttttagtgttgttcctgaaaaggaaaataattatgaaaatccttgtactgggaacaagttgcgcacaaccccagggacccagatcgcgttcccacaaccacagccataagccgtaattattttccttttcaggaacaacactaaaagaacaacacttgggtgcggataattatggctagaagtgtttacgtgacacacacatgggtgctctgggccctgtacgtgttagtactccaaagcgctctcgtgcgcgtctacggacctgtaattattcgcaccctagtgttgttcttttagtgttgttcctgaaaaggaaaataattatgaaaatccttgtactgggaacaagttgcgcacaaccccagggacccagatcgcgttcccacaaccacagccataagccgtaattattttccgtttccggaacaacactaaaagaacaacacttgggtgcggataattatggctggaagtgtttacgtgacacacacatgggtgctctgggccctgtacgtgttagtactccaaagcgctctcgtgcgcgtctacggacctgtaattattcgcaccctagtgttgttcttttagtgttgttcctgaaaaggaaaataattatgaaaatccttttgctgggaacaagttgcgcacaaccccagggacccggatcacggtcccacaaccacaaccacaagccgtaattattttccgtttccggaacaacactaaaagaacaacactagggtgcgaataattatggctagaagtgtttacgtgacacgcgcaagggtgatccaggccttcgtccatctcgaggcttgatgtgcgcagacgtcgcgtagtccatggggtttaaaaggttcgcacgtgcgacctgtgttgttcgatgccggtgacatttgacgacttggtcgcgaccgagtacccgtgggccccctccggcctgccctttgccggctggctgccacgggtcgccgacacccacgctctgccggccggcaagctcgttcgcgtggaccgtgcagcgcgtcataccggcccgtacaggatatggcctgggtgcgcccgtgtggagctggagtggggggagcacacgtgtgtcaatttgctggagctgcggttcgccaacccccgggggctgccgctgcatgacatcgtgaatcgcgtcgtcctggagatcggcggcagccgcgtcgatacagtgtaccctggagaccagcttgactggctgctggagcaccacgagcgcggcccagtcacgacgacgtgcgggaccacgcgtgttccgctgcctctcggtggcacccacgcagaggacctcctgccgttggtacggcaccacgaggccaaactgggggtcgacctcggagacgggcacagcctcgagcacgccgacctggaggtatgggcgatgtgctacgccgagccgtctggcatgcccgtgccagcgctgaccggggatcacgggccgccggcgcccattgagaacccgtggcgggcaggcgtgcaccaagcgccggtgacgggagccacgacccgcatctccgagatgggggacaaatggccacgggcagggcggccggtggtgcgcttctgggcgcccgcgtccatgaccatcgaatgcatggccgtgtggccggcggatgacgtcgcgctcctcacggtgttggccggggtttcacaggaggttctggccacgtgggcacccgagccggctgggttcgaggacccccgtgtgcgggcggcggcgggatgcctgagaatgctaccgcccgagctggtgtcgcggatcgtaaggccgctgttcgtgcgccccgaggcccgcgccgtcatctcgttttccacgctcgtcaaccccaacacggcaaacctgctggtggagctgcactcgagaaaaggagttacagcggacacgaacttcggctacgcgactgtcggcctcaacgccatggtgtttggcggggggttgttcggcctgatgtactgcggctgaggcggggaaccacgggctccatgtgcgtgcgtgcgcgtgtgtgttacaggttcaggtgtcatatttgctccaaaaacggccctgctctgcccagatgcagacgacaacactcccggcagggacggcaaacgtcttcaaaccgcccggaagcgaatgcatggccgctcggagctctccggagacttcttcggaatattcggtttccagcgattcccacagcttgcggtgctcgtcggtcacactcgcccacggcaccatcaacggctccggattgaaggccgcgtgcatttcggcggcccagtctcccgtggacacgtagagcaagtactcgcgaacgggctcggcttcggcgatcgcccgtcgttggcgcttggcttcccgagcggcggccctctcgagcgcttgctcggcggcggcagcctggcacacttccgtgagagacaaagacatcgagagacaaaagagtgcccgaaccataagccgtaattattacggtgcgaataattacggcctacgtggctcagcacgcgcagcacgggcctacttgaacagtcggttctcccgttcttacattttgcaatgtcagagttcgcgctgcttgtagagcacagcacggaaaccgtgttttacctgataccacaggcgcagcttacggacccggagaggtcgttgttgggcaggctgcacggcaccgatttggacaatgacgggcaaacggaggataagcaagcatacgagcgtatgatgtggcgattcgtggactgtggtggcgacgtcatctacttgccccgcggtggaaccgtcacgctcgtatgtcagctctttgtaacaacttgacagctctttggaacaacttgacagctctttggaacaacacttagtgatgcgtgtggctcgtctcgctgccggcaagctttgctgtctctgaggtgtctgtcacgtcagtctcgtccgtggtctcacgagtcgattcctgggtctccttggggacctcgtgtgcgccatctttgttctgttcttgccgcagcttgtacttgccagtgtccttgtcaaactcgtacttgccattgtcgtctcccagctcgtgcgtgatggtgcggccgtagtgcaacttgtagagccagcccagcgtggccccgtcagccaggatcgtgaggaacaacccggacagcgctgcgtcgatgggcatggcaccgtaccaagagccatacttcagctgcaagtttttcaatatcacgtacaacacgatgtacaggaacgcccccaccaggaatgtcctcgcgttgcgtttgccgtgcccaggttcctttgacgcaggcaggaacgagtgacacgcataccacagcatgtcttggctgtccgcgtgacaaaacggatccgaatttgacgcgtggtaattacactaagacaacacgtggatgcatgccatgcggcagtgtcaatcggctgggactgtttgccgtcccaaaaaactattggtgtctatggtaattaacgcgttaaatctcgaactttaatatgtctaccctcaccacgacaatacacgccgtgcaatgctcatctcaggcaagaaggcggctgcacagctcggggtctgtctcgacaccctcagacgactcgcagacgacgggcagctcgcaagcatcaggctcccctccggacacaggcgctacgacatctcagacgtacttgccacaagcacacaccccggtgacaatgacagcctcaagcgaaaattctgctactgcagagtctccaggaaacaccaacagcacgacttgcagcgccaggtcgagtacatgcgcgaacgcttcccagaacacgagatcgtcacggacatcgcttcagggatcaacttcaagcgaaagggcctgcagaccattcttcgacacgcgatgctcggaaatgtccaagaggttgtggttgcctacagagaccgccttgcaagaatcgcgagtgacctcgtggaatggatcctcacaaacaacggagccaaactcgtggtgctgcatcaggcagtggacagccccgaaggagaccttgcagaggacctcatgtcaatcgtcaacgtcttttgctgtagggcaaacgggcgcagaaagtactcggaccaaagcaaagaagcctccaaaagaaggaaagaaaccccaagcgacacactcacggaaagttcgcatcttcccttgccgtgaagacggagagaagctgacgcaatggatgggttgccatcgggtcgtatacaacagggctctggcgtttgcaaagaagactggtcaacggaattacgcggagatgggcaaacggttcgtggcgtccagaaacatcgaggagccgtggttgaagcaatgccctcaggtcatccggagttgcgccgtacgtgacctcaaggccgccttcgacagcaactttgccaagcggaagatcaacccagaacacacatttgacgtcaagttcaaggccaagaaagacgacgtgaccgctgtgcgcatcgagcgagtgaacggtgcgttcaaggtgttggacgacggcaagcacgtctccttcttccccaagtcgttgaagcccatgggggtggaccccagagctttgcaaggcatcgtgcttaaccacgacatcacgctaacgaaggaccgtctaggcagatttacgctccatgttccctaccgtcgcgaaaaccaagcgccgaaggaacacgagacatggtgtgccatcgaccccggcgtccgcacgtttgccaccgtattcagtccagcagacgcctgcaagattggcgatggagccgcgacgagactggccaagttgtgcgcacacctcgacaagctgatatcggacacgaccaaagcctcgggcctccaaaggagacggaggatgaagaaggcacaagtgcgtgtgcggaatcgcatcgtacacttggtggacgaactccattggcaggcggcttcgtttctgtgcaagcactacacggacatcctactgccagtgttcgaaagccagaagatggcttgccggctgtcgaggaagatcggttcgaagacggcgcgctccatgctgacgctgagtcactataagttccggatgcgcttgatccacaaagcaagggagcatgggtgccgcgtgcacctttgcacggaagagtacacgtccaagacctgcacccgttgcggcgcgttgaagcacaatctgggaggtgccaaagtgtacaggtgctcttcgtgtatgctacgaatcgaccgcgacattgcaggtgggcgcaacatcttcctaaaaaacgcggtagctcttgattgagctgcctttgcctcgttagagcctcgtccaatgtgacgtgcagaagactccccctcatgagctgtggccatcgagtcctgtggcaacgcaggaagctgtgaaagcagtaatgactgacgggcgagcccagactttatgttgaagtctgtgagttcttgagttttaatctagcggtaacttgcgacatgacaccacgtcgagctgcttgctcaacgttttgcagcggtttggggcggtttacagtgtgcacatggcctttgccccaactcccaacacttatgacggcatgcgacaccaatgggcgatcgtgaaatttgtggatgcctctgccgcccacgatgccagagcatgcctgaacggccaggtgctggacagcttgtgctgcatcccgctcaaggtggccccttatgtaaggaaaacctagcacaacaggcggtacagagcccatcgaagtggccacaaaagcagctcagacatctttttcgcacttattcaatgaaagacgtggctctgatccaaacttttggtggtgaggcgtactgcatcgagtgcagctcccgcatggtgccggtggcggaattgtcagtggaggaaatcgaggcgctgaagaggctccacggaattgacggagcagatggggccgaggacgaccttgacacgtacaaggcgttggaagctcggctcgggaaacctgtcaggctcctggctgacgttgcccgtgacgtgcgcattgttctgatttgccaaatgtactacgtgtaacattcaatgtactatgtgtaacattcacggaccacggaccagtcccttgattttgttggttaagttgctgggcagcctcagcttggtggccagctggcgacgctgaacagcccagagctgctcgcacatgtggaaagccaggcgaccgagcaatttcgccttggagcgttcagcccgccagtcgtctacaagcccgtagtcgtcgttgctgttgctactgttgttgctgtttcggttgcggaagtagttgcggtttgtgttttggggttcaacaatggcgtcgagcacgtcgtcgattgcaccctgggactgcctgtcgacacccgagtacgcgcccctcaagtcttgcaggctcttgcgaatttcgtgtggagactgagggcgcatcatctcgttgattgcgaacaccgcctgcgcgtatgccttgaaaggtcccttgggcttgttcagttcctggcctgcgtaactggcaaacccaccccagaatagtccgccggtgacgtaccccaagagtgtctcgtaccaatgtagatcgccgttcaggtatgccttttccaccgtgagccccagtgccttgagggccgacacgcgcttgcacaagtcttgcaaccataggatgcggtgcacctgcgtgtagttcttggggactttcaacgcggccctggtcactggcttgcctgtcgcgggattgacaaagtactgcgcggcattgaggtggcgtagttgccacgcgttggccttggacggctcacgtttgtgcaggttgccacccggagccacgcgaagccgttggaactcggcctgtgtcaggttcctggaatgagtgaccctcgtgcccttcttggctccggcaacggtccacgtgtaccttactttgccacttgggacgtggttgggggctgtcagcctgggtttcttccgcttggggggcattggcttacgcaaagaatttaagtttgaccgtggtttacaaacacaatgttgtctacaaacacaatgttgtcgtcatgacttcgtgaaagcactcgggcagggccgtgatgatgtagcggcgttcgttgtacggccccggtggtgcacgcgaaatgaacgaagatatgtctatcagcttgtcaagcatgtcaggaacgaggtgatctcgtatcggcacaaaaagatcgtggttggttccccgtgcgtgcaccagcaagtgacccgggctgtgaatgacagcgaacaggcgttccagctcgtccccagcaactttggccgcttccgcatcctccagccgtgctgcccgaaacctggcttcgactgcatccaggttctgcctgtactcttcacacagagcactgtccagttcagtgacgatcgcctcgacgagagctggatgggtcacctctgccgcggctcctggtgttcctggcattgcgagcgcctcgacgaccagagtcgtgcccgttcctgccaatgttgtcgtgaacattgtgtgcaggttgtcagtggcccggccaaggaagttgaactcccccagggcttggcgcatgctgacggtttgcggcggcggcgaggctcgggtttccatcctgcaccggaacgcgcgggcatgtgtctgaacgcgcgaaccagtccagttcggtcacaagtcccgtgcgcaagctcacctgaggtgcgtggaagaccaatggccaactccttttacaacgcggtaaacaaaacgggttgccaattttcgggcacgaaccttgaccctgcagggccccgagtttgaacgggttgctgttctcagcgcgtacttttacttttgtcgtactgccaggtgcgatatcgcggtgaatgtgagcctgccagagacttggcgctgagcttgtacctcctgtggctgcagtttgaagccaagcatagccccaggtgactgcagtgtcccgcgacatgggctgcccgcgagagcggatctcacttgtgtggcatgcacgagctgcatgctggtttgtcgcggcctgggcgctgatctgggcccctttggtgcatctggagcagggtgcatctggagcaggggccttgtctgtgagttttcggacaccgcgagacatacaatcttcacatcggacctctacaagcccgatttggtgcaaccggaggtgtcctggtgagtcatgcaccacaacaattttcactcggtgcagggaacgcctgtgggtctgttcgtgtggtaactgcagggtgagactcgcgcggcaggccgtgccaggtgcccggtgctggtaccctgtttcgactttttggccgttgccgcatcagctttactcacatgggcacatacatgatcctcatcgcaggccatggccccacgttccaaagcagacgttacccccgtgactccaggcaaatcctgttgccagggactcaacgaggatggtagtccatgcccccaaccggccaagtacggcgatcggtgccactcccatcgtcagacacggctgtgtgagtcctacactgcagagggtcgcccttgtcaaaacaagacgagggttggccaacgttgctggcgtcacgtgctgaagttccatcctgctcctgccaaccctgtcgcctcgcctcccgtcatccccgtcaagcccagcccacctcctgccaaacctgccatgcccagcccgcctcccgtcaaccccgtcacgcccagcccgcctccaggcaaacctgccacgcccagcccacctccaggcaaacctgccacgcccagcccacctccaggcaaacctgccacgcccagcccacctcccgtcaaacctgccatgcccagctcacctcccgtcaacccggtcgaccccgccaagcccagcccacctcccgtcaaacctgccatgcccaggctacatccagtcacacctgtcacacccagccagcctccacccaaccccatcctgcccagcccggcgcctatggacagcagcacccggcgattgttcaagtgcgaagcaaccctcgaaggcggtggcccatgcacacatccggccaagtgcacagggttctttggcgatggccgtccatgcacatatgatgccaagtatgggaacaggtgtgggcaccatggcgagccgaagacgccgctgccagtgctccctggatcccccaggcggcgctcctcaccacggcctcgtcgggccccagtgtgcgatgtcacaaagatcgagacgaggaagggagtcagcgactatgcccagctcgacgccattaggcactttgagctcgtcagcgtggaggtggcaggggtcagcgactctacaggtgacaggtacccaaacggctgcggcaagggcttgagagggtggttaaaggcttgggcaaaaacgacagggcgctcttttgacacgactgagtgttgcgccgaagggtgcatgcagctggccgagattggtgcacatgtgtggaaattcgacgaagcaactggcaagtatgagaagaagaggtgctacattgtgcccgtttgtgacacgcataacagcaaaaattatgaatacccccgtcggtactttttcacccgccctaacaccgcgtttatgagcatgcatcctcatgagtgctatggtgactattctattgattactaattaacctgtgcgccccataagtagcacgagcagtagcttggactctgcggcaccagtggcggcaccggtgaagtacacaatgttgtacagcatgtgtgtcgctggcctgcatacttcaacgtatgcgtggaataccactaaagccttctagcgaagtaagcgattttgcgggaccggttcgcgaagtaagcgattttacgggctgtcctcaccgcaagtcgaaccgcaacaatcgcatgatgctgaggcgtgcaagcgcatgtgctatacaagtgccgccgctgctgccgctgctgcctctgccgccgccgcatgtgccgccgcgtctgttcattcacacttgctcacgcccgttgccgccgctggcctgtgtgtgcagatggcggcgttggaggtcagtggtggcagtgtgctcgtttgcaggctgccgcccctgttcatggcacagcggctggtcggtatcaatgacgcagcagccgcttacgccgccacacagtttgccttgttttctcacgcggagctggagccacaccttgaccacaccgtcgtctgtgacccccccgccacctctgtggacgacgtgtgggctcaagtgcggcacgacggcgacctggtgcctttcttgatggtgtgcggcagcagcgacaatatgtatgtgcgtgcagacactcaccacaccctcttgttcgtgacccgggagccgtgactcttgttacacacaccacagcgtcaaatttcaatggccttgaagtaacggcggaggtctttgcaggcgtcccggccatgagatttccagtcagcgtgttggcacttggaagaacagtacaacgcaagataacagccagtgcaggtgtgcaacgtcggttcaccttcggaagggcagcctgtgaagttgcaccgaggttcaacgccgacgtaaagctgccgcgcccggcattccttgtactcagcccgggtgttgaaggcgctggccacaatctggcggacggaccctgtctgcttcgacagcaccaccatgatggcaaagtttgtgccgggccggttgccgttgctgctgttgccgtcgccgttgtcgctgccgctgccgttgtcgcctcgtatgcctccaaagcagaagcgcactttgtgttgcgagggatctgaagcgagatattctgccacttcatcgcacacaacatccacggtcaagagggcttcctgcgcgggtgtgaaagtgcacaattcgactgtgccatgcagcagctcgcgattgacaacatggacaactgatgtctgtgtggaagtcattgcgaaaagtggctcaggcaaacgatgactccccataatatatggtcgtgtacctcttgtactggtacctcttgtactggtacctcttgaactaggtcgaaacaacagggggactcggcgcatcggttgccaccgcaaatctttcgtgccacggtaagcatggatgcatcttgctgaagcggaggcctggctgcattctcgcgcggagcacgcacaccacgcggagaacacacattcagacacacacacgcctggccccgttgtttgctgcaggctattcaaccatggccgccgccaccgccgccgcctttgtcaccctccccgctgaggtgctgttctgtgtcgcacagaagctgccagtcctcgagaggcgtcacctccctgccgtctgccagcgtcttagggccctgtctcggtccgagtgcttctggtctcacggcgatgactcgtcagtgcggctggtgtacagttcgaccgaccgcttgaaggtgctggcgaagttcctcagctccttggagggccccatcacatggcgcagtctggagctgcaaataagatgccgcgtgagtgggttttgggcacctgcgccgctgctgggggcagcctgagccgctgctggggacagcctgcgccgccgctgtgccccttagtctgccgtcgacagcgtcttgccgcccctgcctgcaggtacctgacctggatggctacctcttgagcctgggcgtgtcgctgccctcgctgaccagcttgcaggttgatgatttttgccctggcaatttggcccccggtgtcgccgtctcaccctggctctcgtctttcgtcaagctgactcgcctttctatcacagggcttcctgttctcttccaaggccgcttcccctttgctgcgactgcacgcctgaccgagttgacattacgtcgcaccggcgtgtgccgcacctgtctgttgcaacagctctctgcggtgtgcacgctgactctggactctgtctattgtgaagggcccattgtcccagtgtctatttccagtctcacctctctgcgctccttgacgctggtgaccacgtctgatgagtcggtcattgtgcctttgaggtccaacttgccgtcgtctcttacagctctgttgctgcagaactcctacacacttgccgagtatgggccagccgatgtcgctttcgacaccttgcccctgttgcgtcaccttgagcttaccatgcatgctcatttctcacccgacattgattggtatcagtgcttgcgtcacctgacgtgtcttcggctcgtcgctcacgatggccagccacagccagtcatagccgtgttgtctcgcctcaccgctctgcgctccctgttggtgaggtatccccacagtgtttctttggacctgactttgccgcccaacctggccggcttggccctgtggggtcgccgtgattcccttgttgatgttgagactgagccccaggggatgtgcagcattccagccatccgccgctctgcacctcacctttcccacgtattttttatgtacgtgtatctgcgagtgagtcatgacgacctcaagcacctcatgtcgttagatatcgagattgaaggtcccgtgaaatacttcacgtacatgtaattcagtcgacgctgctggccaggtgtcaatgtggtgccatgtcagcggcggctcatgttgaaagtccaacccaagtccgacgtgaccccatttgttcattcgtttttttatacatggagcccatgagtgcagcacagctccagactctcgtggaccaggccgtccaccaggccgtccaaagcgccatagctccaactatcccaccctcgcctcgtttgccgtcctgccacaggtctgctcacgcggcctaccagcggggtgattgttacaccatcacatcgacgccgccatgcaggaacgtttccatgacgacccctgctgagcggccgagcatctggcgagtgatcacggacattcttcatttcagttactcatgcaaaatcacatgaagtccagggagcgacgagtgtccacacgcacatacatttggccagcaggctcctcaaacggggcgagcaggaacggcacaaggtcaccgccgtgccccaccagctgccacacatcgtccaccgaagagagggagggagaaatgtcgacaatgacgcgcacttcgtgtggcacaagctccgagtacgtgaacacggccatctgcacggcgtcgtatgctgcgtctgcgtctcctacacctagcaacctccccgccatgaacagcggcggcaggcggcagagcaggatctgtttgccgctgactgtgagcggcgccgccatctgcaaacataataacaacaaagtcttgcgctaagcgtgccgtcaagtctcttgttgcgcgagccgtcgccgggcaggcagctgcagcagcaagaggcccacgcactaccctgaaaccgctcacctaagaattagggtcgttcatatcgacatttgtaagcccaagtttgcgctttcgcgatactgtgatttacttttgtaccttatgcgctttactactgtgtactttaatctgaaaggaggtcagcctgttagctattgctcgttgttatctcgcgggacacctgcggagcgcacgcacagaggcctactggtgagttcgcgccctgaaaatctccacgctgctgaagcgagccgaggcacgcggcaacaagtcccgtcgtgttctcgctgtagtatactcggtttgtatccaggagcacgcaggtggacgcggcggttcagagtcggcctgttgtgaggccgtggctggccgcatgctgtttggatgggcccgagcgaccagataacgggattgtctgattgccccgcgttgcttgtcctggcccctcttctggcggcagcgcgtgccatgtactggtacttgcatttcctgtgtgcagagtttacctcaaaactccatctgccgacctcatccagactctggaatgtctggaatatctctgccaaatcaagcctcacgtgagtgccaagtcttgcaatcacgtgggcgtgcagaccagtgagttacagtgtgctacacgctggctggtggaagcttatgctgcccatgtgcctgtcaccgtaccggtcctgacggctgcagatgccaaacgaggacagaaccaaccgatgctgtgcacacgtactgaatgtcctgcagcttgtcgcgtgtgttattggttggcttgcccaggcgatgcactccagccctcaggaatggttaatgttgggctctgttagtttccgtattgcatgtatcattgaactgacaaagagcctattgcaatgatatatgtgtccaatgcaagagtgttagacgtacatacaggtaactactcaaccaattcaatcggcacactgtgcaggtctggggcgtgacttgcaagcagtggtaggtcagacttggtcttgagtttagactcgtcggatcttgctgtgtgccttcacgctttcagccttgccttgccggtatagagaggtctcagtcaatcagttacaatcaccctgctggtaggtctagttggggtgcttgacgtgcttgctttaatgtccgcataaaaaccgtgaggcagtcatgaaggctcagcggtggccacgtcaagcactttagcaatgacagcagcattgtctcgacgtgcaaacacagcggctcaaaccgtgctaatggcagaagcaagcatgctgtggccgctcagacgcacttgggtcacatgtgtcttgccagcgcgctgccaatgagtatcttcgtgatcacgcacacgattcctaggatgagtagcaggctctgcttgctaccactggacactgtcattggtagtggcggcggcggcttccagtccgtgctaagcgtgttgcgactaccaacaccaaagtgcccacgtatcctttttgaccccaagttgacatctgaaaccgtcttggttgtccgtttgggttgcccaccgaggctgaggtgagtgcggagtcccgtgatagctggttggctcaaggcttcacttggcttgcgggtgcgattggtggcacagtggggtcttagggcggcctgccttgctgaaagtgccttgcagataaagtgcatcaaaacgtatctggctaggtctcgcggccagaaacgccccgagccctaaagcaggaatcgcggtgccaatgccggttgtaggacgctcatattttgggttttggggtctgcaagggacttgctgcgcgcgaagtcaagtaggggcatttgccttcgggcttagcagacctctgaatggatctgtttcggtgggttccctccaagtgccgcacttgttcccgccgctcggccgctccgctgctcct

SEQ ID NO: 103 - DNA, 7990 bp, unidentified
  misc_feature 1..7990: note = Fanzor polypeptide
  source 1..7990: mol_type = other DNA
gagttgaacgtgtcgggtcgcgtggacagggagtacgcgaagcacggcgttccggacgattgcagcgacacggacatcacgtgcatcctgggcccttgcattcaattcatcgcagacgcccacgccgcgggaggcatcgtcttggtgcactgcctggaaggggtcagcaggtcggtgtgcgtggtcctggcatacctgtgtgtgtctcgtggcatggcgttccacgatgcccacgcccgtgtgcgtgacgtgcgcccacacgtcgatgtgtttccacagtacgaatccgacacgaggcgctgggtggcttcgaagtgcaatggcgagtagagatctgtgttgctcgttattgttacatcagtccaatggtaatgttttcacaacagttgtcacggcaactagctgttgccctacgtccccaagacggcgcaaatgctcctccaacatgcgcttgaggacgctcaaatcttccatcatgccgctgcggcgcacgtgtgcgtattcatccaggtcttcgtgatatctcagataccgccccaagtccttaacagtgcgagcaaacatctccagcttttctgcttgatacaggagctcgtggcccgccattgccagcgtgtgcactgactccttcggcagagtcattctcaaagaatgaacaacaccgcgcgacctggcttttatacctggcttgtgtaccttgccacgctgagtccacgttggcacgccagcactacgcaccgcgacgcgtggctcgaggcgtcgaggaaaggacctcgtttttgaataccttcagccagttcagatgttgcttccgctgttcttccagaatttgcgattggaactctttgttgttgttggcgtgcatctctgcaatgtctgcggcgctgattctatcgcccttgcgagttttgtaccggggagatttcagctcacgtagcagctcataagcacgctgctggaaatttgcgttgtcttgtggcccgcagtatgttgcaatgtactctatatggcccaggttttgagcgagccgtttggacacaaacttgctcaatggcgtgtagaccgttcctgtttccgaggtctcaatgatgtgccgcttagccagttgcagattttgcagtctgggtgggccgccggatccgtgcatgttccggaagatggagcatgcaccgtcttcgggtggacatgccacgacaaggagtgccatccgctcgttgtcgtggtagcagtccatcatcacttcgacttctgcttggcttcctgaagggagaactttcgtcttcacaggcttggtggtggtggccgactcgtcgacagtggcaggtgctgccttggccacagcattctcgacgtcgccgcctcctgaaaccagctcagagcgcgacgtgatcccaacatcaccgcatctcttctcttggtgtctcttcacgtgagactcgtggaagctcgtgtatgcacagttggcacattggtggacggtcgcgcgaaccacatagggtttgagactcatgatcttgaatggtggaggtgcctttaaacctgcagctgaccggctgtatatacggaagacgtattggacgggtgcgaagactggaacgttctctgtatagacagggcgtttgagcgcatcccagacatgctgcactcgggtaaagaggtgctgcttgccgtggacaacacgcatacgtacaaggaagagctcatggcaaaggcctggcaccccagccggatggtcgattggtgcctggacaccgaagaagcggcagtgtttcgaaataaaagtctcgaagtcgtgtaatgagacccgaatcatactaccgcgatgccatcaactctggaaaactggataagatgtcagagaagaaacgggatgagttcctgacggcgatgatgaaggacagcatgatttccgccgacgaacggttccggcagcgatccccggtattgcacgccttcaggccgttgctgacccgcgtcgccgatgagaccggattctcggatgcgctgttcagggccagcaagtaacttaaccgaccgatcgattccctccgaatcaaagagatccggtgcacccccagtcgggaatgtgccttgacacgcgcaagggtgctctgggcttcggatgtgtgcaaataattatggctagaagtgcttacgtgacacacacaagggtgcatcgggcttcgtgcgggttagtactccaaagggctcccgtgcgtgtctatggacctgtaattatttgcaccctagtgttcacccttttggtggtgacctgcggacgaaaataattatgaaaatccttttgctgggaacaagttgcgctcaaaccgagagacccggatcgcgttcccacagcaacaaccataagccgtaattattttcgtccgcaggtcaccaccaaaagggtgaacacttgggtgcgaataattatggctagaagcacgtacgtgacacgcgcaagggttgtgttgggctttgggtgctgtagctgtaaaacacgtacccgtatcttctggaattcttcataactatccgcgccttagtgttcacccttttgatggtcacctgcggacgaaaataattatgaaaattcttttactgggaacaagttgcgctcaaaccgagagacccggatcgcgttcccacagcaacaaccataagccgtaattattttcgtccgcaggtcaccaccaaaagggtgaacacttgggtgcgaataattatggctagaagcacgtacgtgacacgcgcaaggctgtatcgggccctgtacgtgtgagtacacgaaagcgctcccgtgcgcgctgctagcttcgtaactttgacgtagttaccgcaccggcttgatgggcgcagacgtcgcttagttcatggggtttaaaaggttctcacgtacgacctggtgtttgtcgatgccggtgaccttcgacagctcggtcgcggccaagtacccgtggggccccgctggcctgcccttctccggctggctgccacgggtcgccgacacccacactctgccggccggcaatctcgctcgcgtggacagtgcagcgcgtcataccggcccgttcaggatatggcgagggagcgcccatgtggaactggactggggggagcacacgtgtgtcaatttgctggagctgcggttcgccaacccccatgggctaccgctgcaccacattgttcatcgcgtcgccctggagatcggcatcagctgcgtcgatacagtgtaccccggagaacagctcgactggctgctggagcaccacgcgcgcggcccggtcacaacctcgtgcgggaccacgcgggtcccgctgccgctcggtggcacccacgctgaggacctcctgccgttggtacggcaccacgtggccaagctgaaggtcgatgtggcagacgggcacagcctcgagcacgcgcacttggaggtatgggcgatgtgctacaccgagccgtttggcatgcccgtgccagcgctgaccggggatcacgggccgccggcgcccatcgagaacccgtggcgggcaggtatcgctggtgcagccacgacgggcgcgtcgacccgcatctccaccgtgcacaagaacgcgtggaagaaccccgcgccacccggcaagcgactccacgtggtgcgcttctgggcgcccgcgtcaatgaccatcgaatgcatggcagtgtggccggcagacgacgtcgcgctcctcacggtgttagcctcccccggggtcccgcaggaggttctggccacgtgggagcccgagccggctggattcgaggacccgcgcgtgcgggcagcagcgggatgtctgagaatgctaccgcccgagctggtgtcgcggatcgtaaggccgctgttcatgcgcccggagccccgtgccgtcatctcgttctccacgcccgtcaaccccaacacggcaaacctgctggtggagctgcagttgagagaaggcgtaccagcggacacgaacttcggctacgcgaccattggcctcaatgccatggtgtttggtgggggattgttcggcctgatgtacggtggctgaggcggggaaccacgggctccatgtgtgtgagcgtgtgtgtgtgtctgtgcgtgcgtgtgtgtgtgttacaggttcaggtgtcatatttgctccaaaaatggccctgctcggctgggactgtttgccggaatattccaaaaaactatggtcgcatgccctcgtgacagcttgagctgctttcaacgccatgtcgccacaccgtacccaccactggggcttgagcataggttccagcacgtctcctgacctggaacacacagctcccctccggacacaggcgctacgacatctcagacgtacttgccacaagcacacaccccggtgacaatgccagcctcaagcgaaaattctgctactgcagagtctccaggaaacaccaacagcacgacttgcagcggcaggtcgagtacatgcgcgaacgcttcccagaacacgagatcgtcacggacatcgcttcagggatcaacttcaagcgaaagggcctgcagaccattcttcgacacgcgatgctcggaaatgtccaagaggttgtggttgcctacagagaccgccttgcaagaatcgcgagtgacctcgtggaatggatcctcacaaacaacggagccaaactcgtggtgctgcatcaggcaatggacagccccgaaggagaccttgcagaggacctcatgtcaatcgtcaacgtcttttgctgtagggcaaacgggcgcagaaagtactcggaccaaagcaaagaagcctccaaaagaaggaaagaaaccccaggcgacacactcgcggaaagttcgcatcttcccttgccgtgaagacggagagaagctgacgcaatggatgggttgccatcgggtcgtatacaacagggctctggcgtttgcaaagaagactggtcaacggaattacgcggagatgggcaaacggttcgtggcgtccagaaacatcgaggagccgtggttgaagcaatgccctcaggtcatccggagttgcgccatacgtgacctcaaggccgccttcgacagcaactttgccaagcggaagatcaacccagaacacacatttgacgtcaagttcaaggccaagaaggacgacgtgaccgctgtgcgcatcgagcgagtgaacggtgcgttcaaggtgttggacgacggcaagcacgtctccttcttccccaagtcgttgaagcccatgggggtggagcccagagctttgcaaggcatcgaactgaaacatgacatcacgctaacgaaggaccgcctaggcagattcacactccatgttccctaccgtcgcgaaaaccaagcggcacaggaaccggacacgtggtgtgctattgaccctggcgtccgcacctttgccaccgtattcagtccagcagacgcctgcaagattggcgatggagccgcgacgagactggccaagctgtgcgcacacctcgacaagctgacttcggacacgaccaaagccttgggcctccaaaggagacggaggatgaagaaggcacaagtgcgcgtgcggaatcgcatcatacacttggtggacgaactccattggcaggcggcttcgtttctgtgcaagcactacacggacatcctactgccagtgttcgaaagccagaagatggcttgccggctgtcgaggaagatcggttcgaagacggcgcgctccatgctgacgctgagtcactataagttccgcatgcgcttgatccacaaagcaagggagcatgggtgtcgcgtgcacctttgcacggaagagtacacgtccaagacctgcacccgttgcggcgcgttgaagcacaatctgggaggtgccaaagtgtacaggtgccctgtgtgtatgcttcgtatcgaccgcgacattgcaggtgggcgcaacatcttcctgaaaaacgcggtagctcttgattgagctgcctttgcctcgttagagcctcgtccaatgtgacgtgcagaagactccccctcatgagctgtggccatcgattcctgtggcaacgcaggaagctgtgaaagcagtaatgactgacgggcgagcccagactttatgttgaagtctgtgagttcttgagttttaatctagcggcccagatgcagacgacaacactcccggcagggacggcaaacgtcttcaaaccgcccggaagcgaatgtatggccgctcggagctctccggatacttcttcggagaattcggtttccagcgattcccacagcttgcggtgctcgtcggtcacactcgcccacggcaccatcaacggctccggattgaaggccgcgtgcatttcggcggcccaatctcccgtggacacgtagagcaagtactcgcgaacgtgctcggcttcggcgatcgcccgtcgttggcgcttggcttcccgagcggcggccctctcgagcgctcgctcggcggcggcagcctggcatacttccgtgagagacaaagacatcgagagaaaaaaaagtgcccgaaccataagccgtaattattttcgggaggtgcgaataattacggcctacgtggcttagcacgcgcagcacgggcctacttgaacagtcggttctcccgttcttacactttgcaatgtctgagttcgcgttgcttgtagagcacagcacggaaaccgtgttttacctgataccacaggcgcagcttacggaccccgacaggtcgttgttgggcaggctgcacggcaccgatttggacaatgacgggcaaacggaggacaaacaagcctacgagcgtatgatgtggcgattcgtggactgtggtggcgacgtcatctacttgccccgcggtggaaccgtcacgctcgtatgtcagctctttgtaacaacttgacagctctttggaacaacttgacagctctttggaacaacttgacacatggacacaattcagtgatgcgtgtggctcgtctcgctaccggcaaggcttgctgtctctgaggtgtcagtcacgtcagtctcgtccgtggtctcacgagtcaaatcccgggtctccttggggacctcgtgtgcgcgatcgttgttctggtcttgccgcagcttgtacttgccagtgtccttgtcaaactcgtacttgccattgtcgtctcccagctcgtgcgtgatggtgcggccgtagtgcaacttgtagagccagcccagcgtggccccatcagccaggatcgtgaggaacaacccggacagcgctgcgtcgatgggcatggcaccgtaccaagagccatacttcagctgcaagtttttcaagatcacgtacaatacgatgtacaggaacgcccccaccaggaatgtcctcgcgttgcgtttgccgtgcccaggttcctttgaagcaggcaggaacgagtgacacgcataccacagcatgtcttggctgttcacgtgacaaaaggaatccgtatttgacgcgtggtaattacatacagacaacacgtggatgcataccatgcggcagtgtcaatcggctggctaagtgatcccgttcaaacatggactccactgtggcactggccccgtacacctcgaggtccaacggtgtggttgtgcacagcatgggtgccgctccaaggtcgctgcgcagcttgatgagctccaaggcttgcgcattgatgcatttcagggcgggcaagggctgagccagcaacagatgagtctgcgttcgtatggtgccgagcttgcggatgactgtcagctcttccagcctgctcagggtgcccggccggtcgagcaccaccactccactgacccattcgcggtcttggtaatagcaagatcccagtaccagtctcttgaggcggggcgggtccacgtccaacagggccttgatgcggactggggcagccggggcagcctgaacggaccaagacaccgctcagaccaccactcatagcacaaccaggacagcccgtgttccaatgagcacaacgcaccttccgtctgttttggcaggtgccccagtac

SEQ ID NO: 104 - DNA, 20951 bp, unidentified
  source 1..20951: mol_type = other DNA
  misc_feature 1..20951: note = Fanzor polypeptide
tttttaggaggtttaggtcacaaataatattcaaatacacttcggctgtgggatcaaagatatgtagcagcttgttttacgcgtggtgctaggtctaggcgatcgtgcaggtggtcggaaaagagggggcgttggaggggggggcagggggggggttggggggaaaatatttgaaaactacgtcatggatagtcagaaagataatgacgtgatatcaactgcgtataggtgtttattactcaggccgattttgattgtgagtggggcgtttggacaaactaggcgtatatatatgaagtatatatattctgttttagtatcagcatcttcatcttttagtatcagcataagctttccggcgctttcaatgtatattcctgtgttttgtcccactgcaagaagatatgttccctgtattcggcacatacatacatacatcctgtatttttaactttaaaacagagataagacttgcgcccggcgttaagatccggccccgaacaaaaataaggtacctttttaattaaccatgacccaagataggttgcattagtctgccaaacgcaccttctacgcctttagcctctctccaagtactcactaacctactctaccaaagtacgcacctactatggtttccgtcaagttcccccccccccccatccccaaccaaaaagcaagacaaaagcgaagaacccagatgagcataaaagattagcacgcatatatacactatatacatacatacattgataatgacaataccgcacttgcggcgtggccccgatcctcccatacaagtaccctctatttcagaccgattcctgtttgaatctcttggatggccttccctcacaggcacctcgtaccctactctctttgcaattcttactcacagggataggcgggttgcgcagccccgataaattaaaaggatcagaagggcggtcatctgactgcaccagcgcggacatgtcgcgacaaaacctatcaacaacttcttcggccttagcaaggaagtctgggtttttccgatccacgttgtcggtgcccaacttaacgctagcagtgcactttgccaaccagttcgcaaaggctctaccacgaataacagagaccaagttatcgggtgaatcccctccgtcacttccctcaccgtccccaaaatccatctgcctgtcgtccgtgaacccgccacctaacggtccacacccttcagcatctaattcacgcagtccccaaagttctacactccaggcgcccgacgtggcccgccaacgcgggtgaatagacatgccactaaactccgccggacgccgtaagcagtaaagaagcacggccatcaggtgtctacacggcaaacccgtcctgagtatctgcaaacacgagcagagttgaaaattgttcggcccaacgacaacgatgtgacctacctgtgggtccctcattttgtacaaaactttaaccaccgtgttgatctctacgctctcgaccagcctagcaaaaacaagcaatgaagttgtgccatacattgtggtatccgtgacgtcatcctcgacaaggctcgttaccacgctttctggcagctcacaacaaacatctatggcctcgccgtcctcttggcgggtcgccagcgcattcaggtagtcgagggcaccagctccttccgtcaagatttcagttgaataggctgggctcgcgaaaatctcgttgatcacctcctgtacaaggtgacgtaaacaacggtcgtcggaaggaacatggacgttgtgcgtgaagggggtggtggagtctttcaacagcaaggccttaactcaaaccaacccccctccccgttccaccgctatcggtccaggcatcacgggtcaactcacctctttggcatacttgctggcgttgactcgttctagttctttttttattggctccccggtcttcatggcatcagcctccacgggttctttcccgcagaatgtccgccttgtgctatacctgtagacgaaagaacgtggaatagcgtcggttacaacctcgatacacgcatcggtttcatgtatccacgagttggatgcttggaggaaaatttgccgacgcagtgcttccggggggcggtcggctttcgaaggacccatggggcctgcacaccgctatatttcgagcgttcaacagcacgagcgaagtactgcggccaaatatcgccacaatacagcaacacttaccaccgagactgcagggccaatttttccgccaccctttccgcctccttcttcactgccattagactcgagcgtttgttgaccatgcgtccgttcttgatcacgctgaagcctccctccacacgctgagaagctgtcatgttcaacgtgagtgtcgttggatgatagcagcgtgcccaatgcttgcggttcctgtgttcgtagtggcacatccgagagtataagagtggcgcgcatgacgacggcacaaggggagaagagggcggccgcacgtacgcaggtacccactccttggtacagagtgcaccggacacgatccaaccttttcggcgctccttatacttgcaaaacaccgccacaacaactcacgtgtacacgtgaccggtgatgtaactttcgcacttggtgcccttcacgagattcgagaccttctcccaaatcgtctgaaacgcctgtcaagcgagtacgtggcagaaaaaagacaacgatcaatgagagagagagtaagtacatggatgttggaagtaactgcagcagcatgtgcaacatacgatgccaccaaaaacgtatatggcgcggagcagccaaggtaactcacagtgtgtgatgaagcgaaagaagccgcacggtacagccgaagcaactcgtcacacttctttccttgcagcgccccctggcagtttttcttcaggttcttgttcatatgccacgaggaatgcaggtgcgttgtgttggacagacgagtgcctaccgcactggtcatggcatggtcggcatccgttaatatcacctgtggagcacgaacgtgcagatatggaacatgcatctcggtgtttgtacacaggaaatcgaaaaccacataggccgagaagtggtccgagacgtaggaaaatgaccagtctgcccatgcatgtacactatttcatagcgctttccatcaaagcataccaacaccaccgcactttaaagcagttcaacgggatttcgaagacgatagcggcacaggagcaggagcccaccttagggtgcccgccacaaatcgcgattaaatggtcgatggcaaattcaaaagacggtatctgctcgttggccagcagcccttgtgcgaagatggtcgtcttgttctccgagtcgacgccaacaacaaggcacagcttcatgttgtacctaccggcaggggggaatggaaatacgatacggtgatacacgggttggcacaaccatcctccatcgcatacagccatgtgcatacagttggcacgttgcccgtgccccaccgaaccgcgacaacctggaaggtagttttgctgcggaatataacaaagaggttcagccccccccgtccttgtcacgggcaaaaaaaaaatgcagcctactactgaacgagccagcatttcgatgcacacatcatatccagggttaagtaaccccccccccccaacgtatgttgatactgtcgctcgtcgcgtcaccaccgaccagatgtcggagttgagcaaaagtagccgtcataaccactaacaacgaccgcggtgctcacctgttcgtcagacacgtgttgtcttgtattaccacgccgccgaattgtctcgccgaaatctgttgctcggctgtggaccacatcaccatagccagctggttgaagctgtccattttccaggtacacttgcaagtggagtccttcagcaatgcctcgatgagcaagacggcatccttcgccgtcccccacgagttgcgcctcgcattggtggacatattcctcacctgcgacaaatggtcacggagcaggtacgcgcggtcgtgaatgcctgatataggaattctgtgcttagtatcccccctctccctcggcgatgtaagactggatcaggaaatagtacaaaaggtatggctatcgtgggcgcagcaacggcgttagacgtccagagaagctctagcaggaaaacgaacactgcgtcccttcctgtaatacgagagcagcggtcaaagctacgcgtacagagaatgcccccccctcccctgctcgaaaggatgcggggccagtggtcacattactacggcaagccacagctgtgtacaacacacaacaacaggcaccttgcgtcggcccggcggaccaagcttgaggggggcgatttccagctcgatcaatcggtgcatgtttaggaccctcactccccctgacgtccacgtcctgatctgaccctcccagtcccgttgaattgcggcaacatcaatcaagttgtcctggttcgcccgctgcgcaatttttggcacctcgcactccgggttcgtttgatggtcaagaatgacctgcgcaggcaaatacaaattcacatgatgcggaggtacaaatcaggccccttcgatctccgctataggcatacaggagccgcagatatgatgcattcaataaggattggtggacgaacaacagcgtgtgacttgcgatggccttgtagcaccagccacacctaaaccgttgttgctcgttcagtacaacgctcaccttcgttatgcgaggcagcgcatcctttgtccacgaaacgcagacctggaatagacagccgcactgaaaaaacgaacgagcgccccgaacgtgcgccgaagagacgacatagacgaaagtaggacgcgtcaggctgatggaaccaaactcaaacctgctgcacccagtgttgtggaacaacgcaagtctggtactacttgggctttaccttgacagaccaccccttcttcgagccggtgttgggtggtgccttgccggcgccttgacacttgatctcatatcgcccaacacgacttgatcccccaccaacctgattcgggattacgccggcgtcgtggggggttagcttcgaacacccgaccggaaacaaaaacggtgaagaaatacgcctcacctgtgaccgaactacagaaatcccctcgacagcaacgatgggataccctaatctacctagggctccaaccacgggcgccctgcaaaaacatactctcgtgctctattttgttcatgttggtaggcacctttttcccggtttttcggaacgttgcacccttgtggcctgcacgatgcaaggctgcacggatgccgcccaaaatcttctcccacgtctcctccggagtgtcgttctcatcaacgctgaaagagaaatctttcactaggtcgacgtgaatgtggtccttgtcgtcgtcgtcttctttgtctgcgtctggtatcaagaagcgttggggtttattgaattccaattatgcgccgaagatgggggggagtcgaacgacgacgcggtatagaaaacgtgtaccactccacaaatctcaacaaaaaagttcgttgagaaagcaccataggtggctggctgggcagtaggataacactttatgctacgatcgagacgtcatcgacttagagggggttttcgtctgcgcgccatggtcacggctgcggggcatccccattcccgtcatcaaaccaaagggtaattcctgcgctgggactcgtggctgtagggtcaatactaaatgtcgtcgcttaccttcgtcagagaagacatcgtcctggctgtcccagccgtctgtgccatccgagtccacgtcttcctcgctgccgctgctggtgtcatcggaatttcgatacagctgtggcgagtcgtgcaaagaagggcaatacaggaaggtagatctctagtcattatatattaacggccagcacgccaccttcatacccataccgctcgaacctatttttgaacagccaaaaccaagctgttcgggacatcctcaggagcctgcttccgaccaacgtagtccccacgctgccaacaaaacgggcacgtaccagcggggattcgaccacaggccaccagccacacacacattctgcagcgctcgctctgccttcttgaactgtttccaggcccgcgctgcagcaactctctgctcgccgcaggctttctcgcgatcgttggggccctcaatgccgtcgtctgtctcatctacagcctgttcgatagcatgtagagaagacggcgcgaagcacatcttacaccacacgatatatcggttatgcgaccggctccccgccaaccaagcacagcactacggccgggctcccctttttgcctttgcattttcaaccccaacacacgttgctcaccgcgaccaggctgttgagcttcttcttcgcctccttcgcggtggttcggagcgcctgtacgtgacgttcctgctcctcgcgccgcgccatctctgcggccgatggtccaggcaggacgctatcgtctgaatcatatcctggcaccaagccagggtgagggcatattgcgcgcgttactctagccagcgagcttttattggtttaaacaatgtgctcacagcacgatttttttttcttctctttacccctttcgtgtaccttacctccgcccatcgacaagtcgtcgtcgctgttccagttcctggctgccttgctgctggtcgtgctagagtcgctgtcctcgttacctgggtcaacccccccctcctcccccccgaacatctgcagcgcgcgcgtaggacggcggctagcgacgctttcatcgcaggtggtacaaaacatggttacctcgcgcagacctacctctctactcgtagatttcttatgagcgagcaagcatacacccaagctgccttctcccagaaagatgaatgacaagccatgcgcaacgaacaggtgcgcctagcgctggcacacggcaataataaatgggagcctgcaatacccgccgaaacccttcaaacataccgtatgcccgccaactacagttttcgcgaggacattctattggcaaccactacacccaccttcgccatcctcgtctcggttcttctcaattttttccattccttgtcgtacccccgccgtgcttttgccgccgccactcgtttgcgtaaaagccgcccgtctgcgagagatgtatcccctacccactcgtgtttgtttcgctccacgtcggcaaccctttgtcgatgggcctctgtcacagcctgtgcgtaattgatggggagatatgcaatcggatatcaatacaacttggttcgagtaacaacggcgaacggtgacctgacaggcccaacaacaattgaaattggccttcttgaaaccaaggcccagcaacaacaaaaataaaacagcaaatttcgagtaagatcaaacgccagcacacgacagcggcagttaacaaacaacgccccatcactcaccagcttcagcttgtgatacagcgtcttcgccttttttgctccctctctggcctgctcggccttctcaccagctgctagaagcgcttctgccgactcctgccgagctttctccaccgctgcctctgctgaatcgcccccggtggcccctccgtctcgccccttcccaccttcgcctccctcctccttgtcgtcctccgcacccttctgcttgtcgtccccctgcttggtgtttgctttcgccgccacggccgccacggctgccgcagcggccgcctctttaccgccatccgcattttgcctccgttcccacgcagctcgctcagcacgggtcttctgttcggaagcttcgtcctacacaagacaaaaccagcaaagcaaacggcggccaacaatacgaattggtggttagtgcaactatattctccattgttttgccttgattcaaggtacagacctacacgagccggaggattggtgacgtgaacagcatgtgtcgcggtgttaaagcaggaaggatagtactctcagcacacgcattgccgagatttcgacataaacgccgacggggtatggtgccacgtatggtgtgatttttcggcaccacacatactcactttgcaccgtctctcagccatgaaccatggcagatgaacggtattcggatgacactcacatgttgcgaaaacatcggcggagcaacttcgtgcatcggcaacggttgacgtctggcacggtccttgctcgctatcgccgcgaagtgcacccatgtgtcaacgccgaaagttgaatcagcatcagtcgcggcgatagcggcgagcgctttctcttcgacgctgtgtgcgcagacgtctgtcagcacgattgcgagctcttcgaccaccacatccccttcgctgcccatcccaccacgtaaggtgatgttcgtacggtctgttggctggatccaccgagatttgcggttgtcaccaaaatcgcaacctttcttccccagccccttggctggctccccactcgccggtccctttgccttcaccttctcccgcgctagtttatctgacgggaccactagtttcaccgctacaccaagcgcctcggcagccaaaacaacaccaaggtcgccacaccaccttttgtctcggcaaaaccatcctacgttctccatgagcatcccagcgtagttgtcacgctcgtagttggcggtgccgtacttaacgtgaatgtgggctgtgaagtacaaaatgttcagatgaagggggctaccctctcccaccagggcgtcgatgttcaccgagctccaactgagcaccacaagcttcagctgacgccaacacttgtctaagccccacagtgccttgctcaatgcgcgccaaaaacagttaccgtctcctgcaacccataacgccgcaaacgtctctcgcaactcaaccgggagggtcatcgttgccctggcgtcatatgcctgctcgcaatcaaggatgcaaggatgccacgccgtttgttgtgtgcgaaaacaaggacggagctatgttggatctttcccacgagagggttcactggtcaactaaattcgaaaccaaacaataccaagcgcaattaattagacacgtaaacattcggagaagtgaaccgcgtttgtttcttactttttattttgttgtctgtgactagcataacaacacggtatgaattatgtctccggatcggtcctttaaagaagtacggagtctccaaaacttccgcgagacgatggagaatcgcaggactcttgcgatcaattcagacaacaggagggcaccatcgatacttgctcgatgacatcgtcgcgatcagacaccgaacaaccaccggacgaagaatcgcatattgccgggtcagctcgtcaaaacaaaaagatgacctgtgcaggcaggtcgaatccttcaaagaaacacatcccgaacacgagatcatcaaggacatcggatcaggtatcaacttcaaaagaaaaggccttctgcgaatggttgacgccgttctcgaaggacgtgtcgaagaagttgttatcgcgcacagggatagactgtgtagattcgctttcgactttctcgaatggatctgcaagagggggaatacacgaatcgtggttcaagaccaggtcatacgttcttccgagcaagagctcacagaagatctcgtggccatcatccatgtgttttcctgcaagctgcacggaagcaggaggtacaagaacaaaggcaagaaagatacgtctcaaaccacaaaaggagcaggagaaagtgcttcggaaatggatgaactctgctcgacaaacctacaacgaagccctgcgactcgttaaggccaagaaggccaaacccaacccacttctgaataaactcgtcgtcacctcccgtgaacggacaagaactcgagactggaaagcatgaaatcgacaccggctgatgtgcggaagtcggctacccgagcccttgtgaagaacttcaagagcgctcgtgctgcgtacaaagatcggcttcagaaagtcaggtcgggaagggtgaggatcaagaagatgcgcaagtcggggaagttcaacgggagacgccgggaggaagccgttcgaggtgaagttcaaggccaggcgactcacatccgattccattgagctcgaaaagaaatcaatctctttggagagtaacatggtttctttttttggaacaagtaagaaacactcactcgaagttcaaatgagcgaggtgttctcggaagagtctggtcggcacaagccgtctcaaagctgtaggatagcctactgctttggcaggtggtacatcatcatacccgaacaagtacaggtcgacaaggcgaccatcgacacatctacggaaccacgtgtcatcggcatcgaccctggtcttagaacggcttttacgtgttcttctagctcgggagaagttcaggaagttgggatcgaaacccggaaccgcttcgagagggaacaatcgaagaagaactcaatcaccaagaagatgaaagatgcagcgtgctccaagagaaagagaaagctacggaaagcttggtaccgctgtcaggcgagagccaagcatctcgtggccgacctgcactggaaaaccatcaagcatcttttggatagatacgacgtcatcgtggttggaaagattggcacccaatctctcgtgtccaagacagggcagtctgccagcaacaagaggatgttctcgtacttgagccacttctctttcaggcaacggctgaagtacaaagctgggcttgtgagcaaagtggttgttgagcaggatgagtcgtacacttcacaagcgtgtttccggtgtggccaccttaagaagaatcttggtccagcaaagacttattgctgtagagagtgtggacttgtgatggatcgagatgccaattctgggtacaacatcatggtgcgctgtgcatccgagcaccatgcaacggaaagcatcgttctcggcaagcgcaagtcttagatgtgctaacacacagggcctcgtatacgctctttaaagtagcttaagcatgaatgtgcgtccagcgtaagatcgaagctctcccgaagctttagaagcagaggggatgagaatttctggcggtatccaattcgttttcaaatttggcccgttttaaataggctgtttgacaagggttggctacgtttggattgaaagctgtatacggcacaccggtgattcaggcaaaccatactgtaaatacattgggttcaaaggtggggtatccgtgcagacaccatcaattacaggagtgtcccttcagggttggtttggggggctcgggtcacatcatgaatggaaacttgttgtatgccggagggatatacaggcagcaacgccgtcgctaacgctcttcccctggttgctagcgctgttccccttctgaacggagtgacgaaaactaatatcaactcagcattgcctacctcatcttccatggcaatgacccccgacaaagctggcaccacgcctctgcgacagccgaaaaccttttgccaagagcaacaagtgccgacgaactcctccagcgtcttcatggcggggccgcctttcccttcctggcccaccacgttggcgatcatgctgtcaaggcgatggagtagtctccctgcctcctcgtctaacatcacataaccagcggcctggacaaacacggcaagcaaacacgccgccagtcatggcacacaggtcttagcggatagcagtagcagcaccaaatgacttttttcaacacaaccaaatgcctattcaagtacttacgattctccatccaaaacatgagccgcctctccacgcggccagccatggcacacaggtcttggtggatagtaacagcagtgtagcaacaccaaatgccctctttcaagtcattacgattcttcatccaaaacatgagcggcctctccatgtaaccttgaatacgaccataaacgggtttcatcactgccaggattttgaaatcacccacaggctacaacaagtggccgccgtccacgacacagcccatataaaacagctcacctcctcctggggggttgacgttggcaccgcggcgtgactgctgctttccctgccagtatatcatgttacaagcccagcacggcacaagtcagcattggtacccgctgtggagcaccacgggactacatgcacatactccagcatgacgaggaggagagagaggcgcggtatgtgtgaacctacagcagtagacattttccattgcaacgaacaccgtacccgtatgtgtaatcaaaacatgcgatgcgctactttagtctggcagtacatggcagtacatggcagtacatgcgtggcctagcgcggcacacacaagccttgaatgaagcgggttcgtgcgtggagaaaatgactgctaaatagatgtacgtggcatcatgtagacttcgtggtaccgcagtacagcagcagtagcaccagcagtagcagtattagcagtagcagtagcagtagccagtagtagcagcagcagtagcattagtagcagcagtagcagtagtagcagcagtagcagcagtagagtagtgatagtagcagcagtagtagtctagcagtagttgcagtagtagagtagtattagtcgtacatacagtagtggcagtagcagccgagaggtctgcaggggtctcattcaaacgcccccaaaacgcgcccgcgaccaagacctggacgcatttagtaccttccattgcaacgaacaccgtacccgtatgtgtaatcaaaacatgcgatgcgctactttagtctggcagtacatggcagtacatggcagtacatgcgtggcctagcgcggcacacacaagccttgaatgaagcgggttcgtgcgtggagaaaatgactgctaaatagatgcacgtggcatcatgtagacttcgtggtaccgcagtacagcagcagtagcagtagcagtattagcagtagcagtagccagtagtagcagcagcagtagcattagtagcagcagtagcagtagtagcagtagtagcagcagtagagtagtgatagtagcagcaggctactgctgtagtagtatagcagtagttgcagtagtagagtagtattagtcgtacatacagtagtggcagtagcagccgagaggtctccaggggtctcattcaaacgcccccaaaacgcgcccgcgaccaagatctggacgcatttagtaccttcgcgtctagaacaaactctcttgctttcgacaaatcaccggagacgatgccggcgtagggcgcgtgctgtgtatgttttggcgcgcgcaggtacatagtctacatcgactacatgtagatcttctatgttgttttagacaggcacatgatatattgtaagttatgtggtccgccgaaggaaatatccggtgagatcacactaccagatcatgaccagagcgtctctagacaccaggggggggggcaagacggttgtcgatggaatcttgtgtgcatccaagcgtgcaaggcacacttccccacacccacccttgtttgctgctggggacctccatctctccggcggcgtgtggaatgctcctcgatttctggctccgggacgctttaatttcgacctagaaggcgcgtacgactcgggtagctttgctgtctatccccgttgctagtctaccgctccttgtcgtgtgtgtggcagcagcagccagcagcagcagccagcagccagcaccaagttttcaaacacagcgaaccgtaatacgacggtgaaaacccgggtatggtcctcatatgtccccgtgggcgaggtttagattccgccatagtgtctgcgagattatcactcccccccccaaatagccccccaaatactaataataatgcctccagtttttggttgaaaccctcactgtcgatgttcggcgggagactgccgtacagaggacgaagaagatatatcgttggcccagcagaagctaacgagactccattgcgccaggctcctccgaagccctagtgccgcccatcgtgcgtggcgcatcaggtgcgaggaataaggtttgcggtaagcagattagctatgtactagaccgtacgtgcgtctagatccttttttgaaggacgcgcctgcggccacagcagcagcaaaacctcagcggatgcccctagcgaactcggatgctcaacaccatacattactgcatcgtaccgtacatagcttgcccgaccttgcgttgcttagtctcggaagggagttgggtgttgggttgggtttggggcgcacggagtggccgggcgggcctgggtgatgttgtactcgtggagggccacccggcgtatcaaatgtaagatcaagatcggatctgctgcgccaagatgcgagagggcatcggtgctcagccgccgctaaatcgaagcctggtatgcttaacagactctagcgttcgttagaccttgcctggggcttctcatgattctggcttgcgttcgtgccgtcttgtttgtgcgtcataccaggaatatcaactggtaacggtacctcgtatggcacgaaagcggtgcgattgttctgatgcacaacgtacctggtactcgtttgcactgggcgggcgtgtgtgtgaaaagaaatgaccggaagttgaaaattgaacattggtcgacgtgttttttgaatgaacgataaatcgttcattcacacacgacactccagcagcacccagcagcagcagttgcgctgaacaagggcagcacaaccgccaaaagggcgatgcagcactgaggacgagctcccgtggccctatctaacaaaagtcaacacccggtcagtcgagcacgcctatgggtccctcatcggtcacatcagagtttggacgtacgtagacttgcttatcgttgtcttgtccctgagcgggttcggttggtacacccatggcctctcaagatgtccctcttgaacacggcctcctccaattacttgcggaactgtccagcttttgtttgatctcttccttcacttttttttttagctgcgagaagtattttttttttttgcatacatttactttccagcttctggacaagccgtggtcacaggtgtcgtcccttctccccgccggttcatgccttcagttttcatcgcgcatagggtccagcagtcccactgctcgtcgacttttcatcgagtgttgctaactcacgctgtcgcgttttccgcaagccaagttgtgcacaagaagaagtccccacgaatttatacgagtatgcactcggggagattcgaactcacgaaactgacctataccaggctcgaggataacctggtacgccacccgggcgtttgattgcttccttcacctttttttttcagttgcccgaagtatcatgtcatgtcccagctgagctcagcttggctcatcagctcagttcagcgcagcagcacacagcgctagctcagcagcgcagcgccgtgccctgccgtgccctgccgtacgctgccatgtggtgcggtgctgtgccgtgctgtgccgtgctgcgtcctttgctgtatttactctatcattcgaggtatcgtaccaggtaccgaaactattaatactacacaaggtgtgtgcgtactacattgaatttgttgaaccacaagaaatgcactcccaacttagctcagcccagctatacgtaactcagcagcccactgccgtgcggtgccgtaccttgccttgccctgcggtgcggtgctgtaccgtgctgcgttgtgctttatttcgaacatgcaaaaaacggtgccggtacgtacgtgtgttctcgtatttttcctctcttcctttgattgttgcggtcctcttcatgcctcctccccccccccccgcaaattgcacccgtactgccgatcagcacgtggcatcgccaacaagcacgcagcatatcacaagggaattagtcctgcactagtagctattggcattatcaagtcgcgagttgcaccaaatcatgggccccttctttttgccccgttcacaatttgtggtgttcttccttgcgcgaacgtggcgggcggcgttagccgcccacggagcggagcctttgtatgctctactgctgcaccagcgcgcagtattttgtagtcgtacggtatcttaagagagggagtatcgtcgtaagcgaagtgcttgtcctcccaatgcacggagattaagtcaatattaatgtactttgacgaaaatacatgtagttggcgttagagcaattattatgggaaaaattgagctgtcatttctagatctgcgagtcggcacgacttaagtcgccaactatttactggtcgggccaacagttggtcgttttctggaggtgccgactgtccgactttttgggtttccatactcgtaggacgcattgtttgatgcgaagtgcctttttcttttgttgcttggcgggacctcctcggccgaggagggtctgatttggctcgcttccctcttctgacttacgtcggcaagtcggttgaccatcaaatgatttcgcaagccgactttcagattgacgccacctagttggctaacggcacctaccgattacctggtaatgtttagtcgtgaaatcctgccgactcacatgtatacatttttgtcatccaggcgtttgtggaaccccaaaactcgaaaaatttcaggccgaaataccgcctctataatgtcccataatagttggtcttttgtagtgttgatatccaatttaaatatatgtttccacaaaaaaagagtaaaaccggaaatgatggtgtacagctccttcttcaagtgaaccttcttcaagtgcgcatttattaattgcttggctgcagcgacagctctggcagcgcaacaccgcagtatcgtagcagtgctgcaatgcctacatatctgacccagcacgcagcaaccctgctgtctgtttcgcgtgttccgccattaatagtctgccagcaacatcccgtaccgtatccacttggcattgccactcacgcgataaaaaccagcactgccatgttgctgccatgaagttcaattgcacacacagaggttagcatcaacacgcctcattatcactcaacaaagtgcaggttagcgttggttcggtttcccctagacctctgatcgtcctctctctccgttggtaactcttcacgcccaatcaagacttcggaggggacaatatcaaagattttcacggatcttgacccggccctcgggtcgagttaggagggatttcacaaacccgcgggtcgagtggggtcgggccacgaggttttggaatctcgcgagtcgagtggggtcggatcaggtggttttccaatattacgggtcgggccgggtcaccctgattcgatccgacgcgcgagaagggatccgacgagtgaaaagccctgtaaaaaaagacgaaatcaaaatgacatgttcataacgttttcagcgtcgcctacgcgacgtagcccgttctactggggtaggggatgttatccgacccgcaaagtaaggagccgcgcgaaacgcgcggagcatcgcgatactcctatcatcccgtttgggccgtattaattttgagtaaataacacgagaagggcggtcttgccaccccatctgtctattagtaggaagagcgtgcaggccacacgtcgggcagatcatcaatcccgtcgtgaggatatagacgtcggacagatcattgatccccacttgatgatctagatatttcagaaagatctgtaaggtctgtagctcatgtggccgggtgggaaccgtacggtctgcatgatctaggtacgatctgcatgatctagcacatgcttgtggggttgaatttataccccacatgtgcagagcttgcacaacatatcatagccgcagctatagaatctactgtagattacatagatgatatacttcgaagtagatgatctagatcgtgatctgtttgagatatgcacaacatctcacaacggcagccatgtaatctactgtagattatctagatgatctagatcgtacagatcctgcacaacatctcacaacggcaggtatagaatctgctgtagattatctagatgatctagatggcctagatcgtgatatgcccgaggtgtggactcttcacaaaatcgcactgaccgtgtgtgtgatcgcaaaacatgggtccctcgagggttacttgtttgactgcaggaacagctcttctactagctctgcaacagcagtgctgcaatcctgcatgtgtactcccggcgcccgcgccaatctcgagaccttctctcgatgcttcacatggcctactatcaggatagtaagatgtcgcttggaaccccgctcagtaggatatttgtaaccctcgtcaaattgtcttgcgcttgtggttggcggcggccgcggctgtatgtatatatatatataaaacccgtcttcagcgatgtcgaaaggaggccgcatttgatattttgtggcggggtgtgtgtcgtcttcacgttaaaccgttgtttctacccaatgacatcagtacacctagtgtccgtgccgattcttcatcgtaggcagatacaaattgtgttgtcagactgagacagggtataccaaacaatcgcaattaatcaaggtaaagcaagtgaaatgctagcgtaccagatacgagaacaccaacaaaacgagccagaccataaaaatgtgaagaaaaaaaaaagacgaaaacagtggggggtgcaaattcgcaactcgcatcgtcataacaagaataaatgtccacgcgaacccggctccagcgatgtcgaagggggcccgtattttatatttttggcggggtacaaattagaaactcgcatcgccgaaacgacataaatatatcccaacgcgacaggtcccgacgacgaggaggaagggccaccgctaagccaatatggctaagtctatgggcatgaacctggcctccgggctccagggaatgctgaaggatgggcacaactcgtacgagggggtggacgaggccatcatgcggaacatcaacgccgccaaggagctggccgccatcgtgaggacgtctctcggccccaacggtgaggattgattggagagccgttgaggttggttgtgttgttggtgtggtgttggcgttggtgttttttgttgttgttgccgtttttgttgtcgctcggaacaccaacgcccagaagctagttcgccatcgtaagggcgtctctcggcccgaacggtgaggtggatggagagctattgaagtttagtaagcaccccgtgtttaagagctctcaatatgagagcattcgagactgcaagagcggtcaaatcggcatgtcccgcctatgctaacagctatgtttttgtctactacagacaagagcaatgtgtagttagagcgcctgtgtcgtcttgtcacgaggtgctcttacaatcggagtacccactgggacccatacaagtcaaccaaacgagcgagaagggcgtttttttctttttcccacgcatttgctttccagcttctggacaagccgtggtcacaggtgtcgtcccttccccccggctcttgccttcaattttatcgcgcataggattcagcaatcccactgctcatcgatttttcatcgagtgttgctaactcacgctctcgcgctttccgcaagtcaatttgtccacaaggaaaagtcccaacgattttatacgagtatgcactcggggggattcgaactcacgaaactgacctataccagtctcgaggataacctgatacgccaccggagcgactggctacgttgtcaaccatcggttaataccgtgggggtcatctaataaggcggtatccccatataaggcggtatcccgatgtaaggcggtccaaatcgcgtggtgcaactgggaagttgcgctcacaacccaaaatgaataaggcggcttccctcagtaaggcggtcatattgctctgaaataccaccgtcttcctgggggacccctacagtaagaagagcgtccagcggtacgaggatcatcaagctgcgccgtctcgtgtagctccttatgctgcagtcgcccccccgcccccgccccccagtcttatcttacatgcctttagattatccgccttgtgtcatccttgtcttatgcatgttgtccgtctggtcttacttgtctggccttaacccctttagagccccaaatccctccctgtactaacttcaagtatctttttcccccgaaagggtttccagtagtgaaggcgtcgagattttcatagtcttatcctgcccgtcttatccgtcttgtatgtcttatcttattcgtctactctgtcttatccgcattgtccggagtatgatatccgtgttgccttactttttttgttcttgcaagttattttgcgccttgtccgtcttttccgccttgttcgttttatctgccttgttcgtcttatccgtactatccgtctcgtccgtggtgtccgttcaggcatgaacaagctggtggtgaaccacctggacaagacgatcgtcacgagcgacggagcgaccatcgtccgggagctggaggtcatgcacccggcggcaaagatggtggtcatggcgtcgcagatgcaggagcaggaggccggcgacggcaccagcttggtcgtcactctcaccggtgagcgaagcaaagctgctgctgtgacagcaatacagcagtaccattatttcgtatttcagtgtttcaccatcgttccagtgacattatttgtagctttactgcagagtagtacgtactgtagtactactgctgtactacgagggttaccagtatttcagtgtttctgtgctatgatatttttgtattttagtacggtataacaccattaatcattaacatgcagcagaatggttatgttactgtcatacttacgggttgtttttcgactaatggaatctgttgtgcctctaataagcgaaccaccgctgctgccgccgctgctgctgcctgcgcaa

SEQ ID NO: 105 - DNA, 20900 bp, Cladosiphon sp.
  variation 17528..18425: note = n is a, c, g, or t
  variation 14298..14487: note = n is a, c, g, or t
  source 1..20900: mol_type = other DNA
accgatgtaaggatacagccagaaccatggttttcgtcgcctacgtgtacgacgacacctctttcgctcgagtggtcaaaacgtcaacaagttgtcgcacgacgaccgtgtcgcggaacctgcatctttgctcggcaaccattccaatttcggccactgctgcatttagcccagtgaccttcatcagcgggaggtaagcccatctaccgtcatccacagtgtgcaacgggttgtccggggaggcgttaccaaaccagtccggtccgaagacttctgactctccgtagtctgtcatccctagggcggctgtgaggtacagcaaattggcaaacgaagaggtccagagaggatgcgtaggcttcagaagaacgggacaacaggttcgacaaatcaaattttggcatccccacaggatgcgcaagccagtctatcggctatatgccctgtcaacactaatatgtaagtcgaacttgcgaccatgaaacccacgagagcgccggttcgcaatcgcccgaacacgctcactcgtgggcaacacgaaaagaattcggagaaatgagatgggtgctcgcagcattgcaatcattttccttcgtgcatacccaaatcggtcattacacaagtgttgtcaagccctctgcctggaccggtaggttcccgacggcggcggctctgccagcacgaagaattttcgtcaaggcaacatcaagatcgggcacagctcaccgcacagaaagcacacaccaacacccccaacatacattcgatggtgtactcccagtaggggatggagacggaggggtcgacgacctgtagggcttgctcgaactgcaggatgtaccccatgtggtgggtcatgatgcctgccgaatcaacgtcgagactggattcagaagcgacaggtttgagcatgaactgtgcacagcaagggggataccagacagaaagtacgagggtcgttcatacggccgcaacagcgctggcctgcaccgagaggatcacgcaggtgcaggatggatttgttttgaagtggccatcacggtaacgttccgtcctacgcttggttgtacctgcagtgtaagcttcgaataaatgaaaggggcacggcaatgacattggcgtgaaggcggaagtttcaacatacgggacagctccattaccggctccatcatgccagtgatcgcagtcctttacgccggccccgtcaaggtgcatctgcacgaagaagttgatgccctgctcgattgaagcagttgggggggtcaggaaggacgtacaacgtggtgtcggaggggcaagtgaagacatgggaaaccaagaaaaccgcagcggagggaacggttcgaacgtgttcgggttactgcggatggttggcgacgtggtcttcgttcccatatgtgccaaggaacgactgtgcaccatagtatgcatcacgacatctcacgccgaacgacggagaatttctcactttgtattctttgccgtagagcgcagtgccttcggcggtgggtagtcggtagagcgtttccatcgcgtcaaagaacgcctccctgtcttcgtccgtcagctgccggatctcccgtcgcacgtactgaatggttaaaggagttccgacagcactagagttcgaaaggaattggcagtggtattgagcttctggtttgtctggttcgtcaggacaaccctgggtgcaaccttgtttttggcagatacatgtcaacagaggcacgaatcgagagaattcttcacggcatgtggagcgagtcagcctcaaactgcgccgcttctctcaggcggcactcaccttgaccatgacggatgcgtgcatgcgatacacattgccagtcgacaccacgatctgcgtcaagaccacttcatgcggcccgacttccgtgaaggtgtgcgacactacccttcatggataacagcagcagaaacagcccacaccgccgtgcaagggcggggggggtcaggcactcggaggcacttcgacatggaagaggtttcctttaaggagatatgcaaagtgttcagggggagccacgcatgaaaacataacgtgacaacaggttgtttcagacagccctcgctcggtgaactcgaacgaggcggagaaatccgatgccgttcttgcgggtcgacgtcgccaccacagacaacctacaggttcctgatgttggaatgtgaatgtagcgttgagggcctggtggcattgtaagatggcatgtagatccacgtgaaaagtcccatggctttctaccacaaacattcgtcgagacggatcaaacgaacaatgtgcaggccaactcacctcccctccagcacggttgtatctggaaaggtccacttgaagacgtccttttctggatccccgacgttagaaatagctgtgaaggtcgtgctgcgaaacggctctgccaggagcagccatctggagtgctctattggcgggtactcgttcgtggtcgtaaagcccaacgcgtgggcggtggcgtattccagcgctcctgctaccacgcaccgcacacagtgaacaggcaccaacaagtacgttttctttattcgcccccacactagatttgggaaccatgtacggcaaagaaaaatggctttgacttcttcgcggttggggctccacattgtcaccacaaagaccttctaggctagtatcttccttgatggcaggatacctgcaatatcaccataagccgagagatttgcctttatcttccaactggcgtactacttccgacatacttttcgcgctctttatagtttcgttccccccccccccgtccaatgcagtttgacgtttcgtagccttctcccctttggtgcgcaagtgcacgcttaggtgtatctgtgcacggctgactgaacggtcccattcgggatctcgcaggcggtttcccacaccgcgggttgttctttctatttttttgttgccaacaggaataactcgtgcggtgcttgcctcggttactaccgcgaccagggttccgtcattccttcccctctagtcaagagtgaagtggaagttggcgtactcatgagcttgtcagccatgctaatttagtgcgtgccaccgctgttgagaatacagttctcgaatacggcacgagtttttactttcgagaacgttcgcagaaggttccgcctcttccggtctccttccttttctcctgaagtacgcgagagcagaggaagtaggcaacggtattttgagaccatcccacccattcctatgtacacactgtaatcatgtcatcattactgatcattcaaacaccccctagcctggacatatagcgacatgcccaccccggaagggttacttcaaggcgagctcgtcctgccggcgcaggaggcctcaccggaccaatcctatgcttccactcaatgatctgggtaagagacaaggatacaccagtgtgctcataaatttcaacgaccgacgtcgcgttcacacaaaagtgtcatgcgttttcaaccaaccctcgtttcacgtggtgtcgccattattttgtatttcggagtagtttattttgtgcatggagcgacacaaactcaaacaactggacactccattgtgcctctacctgcccgctcatcagtaaatatctttcgcaaaaaacaggagagaggatggcgctcggtacacgagacaagctcacatggtgcaagccaaacacaacaaaaaaacaccgtaaagaagattggtatggtactttagagtcaggatatatatgtccgttggatatagagatgaaggatccacgctcaacgatacaggcacggatagatgcgcgtgtagctctgagaggttaggtcaactgtttgacacagtgtctcagtagcagttaagaaccaaggatgattgcacctgacaatcataacccccccggtcacttgcctggtcacttgcctggtaccagtcccgcgccttcctgctcgagagtttcaaaaaaacgtgagtgacactttgaagcaacatgctgcacttcagtggtcgggttcgccccacactgcctatctggaacctagagacttaccaacttctcatgaaagatggcatcgcatgtacacgttgcttcgggtcgaactcgtgtctgtttaagttgttttttgcatttcccttttccatcaccaaactctctttatgtccgtagcactctgcactcgacggaaccataacaagtccagagcgtccccccgcctctgcctgcagcagcccgtcacggtcacctgctgcttaccgtaaacgtcggcgtcgtaaccccggcgagggaatcgttttttattttgataacacgttgcctgggggctaaatggtagacagggggcatcgtttttcttttttgctggcactaccccggggtatactaaccccggggggaagaacaaaaaaaccacacttatccacacaccgcacatcaagatggcaatgtctacgagaagcagtacaaaaggcagagaggggaggagaaggaggaggaggaggaggaaaatgtagctgggtagggtttaaacggaagaatgatgcaatcgttaaggtagttctctcgttgctgtttttttttgcgtgtcgcttgtttgttgtgatggaagtcgagggggcactgcgcgtcgttttgtagtcgttggtgcacttatgggtagactagtggtagctgacgtgaatctccatgcgcattgctggcgccgacaacggttgcttgtcggcaacacggggtttgatacttaccttttgttttccgcacttacagtcgagggacccttttagtgccggtacgtgcgcagagttttcaccggcactaaaccgggcacccggcactattgcgaatagtgccaaaacgacactattgagggctggccaatgtttcattagtgccggtaccggcactaatgaggttgtgttcgatttgcggtgtagcgcccacgcttgcggggccaacagagaacgaaatggatcgacactatactgtactgttgagtgaaactccagcatggtcgtgggcagagttgtgtttcctttttgttgtcttggggcgctctttggttcttcattttcttctgcacctcactatgtgtgtactgtgcgtggagacacattctctcctgtttgcctggcgaacccgcttcgatgttgcaagaaattaaaaacgacaagcacgacaggcagcgcaccgcaaaaaaatcaaacaaccgtcaccacagctgtgacccctgccctcactactatacgtcgggacaaatactctcctgtgtgcctagcgcacccgcttccatgccgcaagaaaaaaaatgacaagcacgacaggcagcaccgcacaaaatcaaacaaccgaatcaaacaaccgtttaataccacagctgttcctgcccttggagttgaaatccggccgcgcacgaggctgagacttgttactccccccattcgtggccttcgggcgtttacattgtgccttcccagtgctgtctgctgctgatactttgcgcttgccggctttggcgacgcacgtgctgcagatgcggtgattctcgttgcctacatcaaccacgctgccgcaaataccgtgcagtcgcccgccacatccttcctggcagacgtgaccatgagggtcttgcggcgttgtgtcctgtagttggcacagttcaccttccgcacagggcatggtacgcccctgcgtagagctgttcgggtctgcagcagcacgtgtaccccacacaactgtgtgtggagtctatgttttccgccctggttgtgcgtgtgtgtgtttcgcacatgcggagtaccggcactattgggggtgacagcagtgccgaatcggcactatatcgggcatgctttaattagtgccggtctgccactattgagagctccacctgtgcgcagagattttaccggcactagactataccgggcacctggcactattcaaccggcactaaaagggtccctcgactgtacttctttttcttgcctgcttttttcgttgagcgtgatgatgctgtattgttgctgtattgttggcagacctgtccccaaggaatgcatgtgtctggttcttcttcaaacaacaatcctctctacgatatttcccagtgctccatgtgatgctcattgcccggtgaagcgtcgatgattacggtaggcaacagtggcgcagtgtcacacttcagcggacttcacgtgtcggatttgaattcgtctatgcggctagctggtgttcgaggctagcactacaccgccggggcggccggctctacactcgagaagaagatgcagccacaacccactgctgtgcatgtgtgaatgcgcatgttcatgactgatgtaggctactgcgtccgtagcgcaaacaacagcagcgctggtacttgtgatctccgatggggtatctacgaatacttgtccaggctagagatctggcctagaccacatacatacctgatccctccctttgggcggctcctcgagtctccccatactccttcccagcagcatctgctgcgatgttggcgctagcgcgagtgttttctgacaaacccatggcgatttgtccgccagtgcactcgcacccaacgaccaagacgctggcaacaatagcagcaacggctgcagccctcatcataagtagagcacgcgcgaaggcacttccgaactctcggcccaggctgtagtatcagagtgaagttagagcagacaaaagcgcagctggatgcagcttggacccattttttctctccaccttgttgattaaccgtgaaccgtgctacagatgtacatctacgtacgcacgtagaacaggactgtcgtttgttatcacgtgatgcggcccaacctattaaaaacaatcgtgaaatctgagggaacctcccaaaaaagaatcgaagctcaagctactgtagaaggattagcggttccattcttgttgtgggctctgttgacctgcagcgtgtattatttgatgaatcatttgtacgcgtagatgccctgtgcccagggcgcattgaatatccacgtccaatcgttggttatcctcttgcaggacgacgaaaccacgccggctggaggtgaagccaacatcaagaaaaaaagaatcggcacacctcaagacgtagacagtgggacggaaaagcccaacaagaacccgcatgcatgtggatatttacggagtaggaggacctacgtatggcgccaacgcgttacagaccttactatgaagtacttgagtacctaaaacgaaaagatacagctcgggtggaggagtagggtatgcggatgtcccggaaagctagaatcatcgtgcatgcgtgtgcaaggtatagactagtctacatcatacgaagcatatgaagtacataaaaccctccttcatcaaagctggcgaaggttcgcaagcagctggtgcacaccttaaggcgacaagcaaaacgcactgcgcactgcaacgcacaccccaaaacaaagaagaaatctgacgtgctgctatggtcaaatccaagccatttgccgacgggtgcttcgccgcaaggtacacctccactcgcgcctccgcgctcacccgcacctgtccgcgatcacttgcaccactccacagtcactcgcaccactccagggaccacgcaattttcagcgcggtaccacgaacccgcccagaagaacagctttcactcttttgagaggccggacttagcgggcgctttcttgctggaggacgcgcttcgcccaaaagcttttcccacaacttgacggcttgcttccgcaggaggtgggctatccgtgaccggttcccacgaagtctccgtccgcgctgtgtttgcgaaccgaaaaaacaggcaacagacacggaaacgcggcaagggccacgggaatatggagtagatcaagacacctcgacgatcttgcttgggtcaaactccacacgttcgctaggagctccgaagctacaggactttcgattcgcatgcagagaaaggtaacggaaggtttgtcaaacgctgcaactgaaaggcaacgacatatattcacgggaggctgaagacctaaccctgtgatatgctggtagacccagcgagcagattgttaaagctgtcgtagataacccatggcagatggataacccacggcagatgcaaatgtatgcgttcacaaactcgaaatgtcacatggagctctggcgtgagccgtgtcaacggtaagagttaaaagctccccagcctttgtggtatgcgccaggcctacccacgcgcggtggtcccagtcgaactcgttgtacatataggaaaggtcgtcattatccgggaagataaagttgtacaactccaggttggtcatcttgacgatctcgcccgtgagctataagggagcagaacgccgacagggaaggattgcatgccacgaggcggtcaggcaggcggatcaacagcttccagtgttggggctacgacggaggatcaagtgaaacatgtcaaatgaaatggataaggcggggaggacgtacgtgtgtacggtgcagtggaatcgccatgtggaccacagacgacgttctcgaatgaaagccaaaaaaaaaaatcgccagacggcgcccggggctcaacgacgaaatcgctccgtctaagctgccaccgcgcgcacgaccgaccttcaacttgaagggtagcatgtcaccgcccttgtggccgccacaggtgcccttcacacatgtgggcatgtcgagcaagtcttccctcacgcccgtccagtcacacaccacccctgactccccggtggtctgcccgcgaccttatccccaggtttcgtccaagggctacttgttgcagccaagcggcagggaatgggcacatacaaacacgaggtttgagcaccatgaatatggctagtgagatgcgaagggcaagagcaactgtctggtccgtgttttttccccagtacagaaggtcaaccacgcgatgaatctgagccgtcgccgctctgcgcattctgtgcgcattcatatgcaacacgccctgagcacaaacggtcaggtccccgtcgaaacgcaacacagctggggggcgacaattacactgctgtctcgaatcaactcacatgtctggttgcttggtggccagctttctcctccattcaaggaaacgttcggcagcagggtgaataacccggaacagggggtcgtacgatgctgaggaggtgataagctcgccaactgccgggagaacaaaataaacgtgaaatcatggtggatcagtaccaaaggttgccgtcgtccttgggatgaggaaattctgcaatagaggaaagcatacgacctacctgttgttaacccactcatcgtaagcagggcgcgaattgacgggagatattcggaattgagcgatggtgaaacaatcaacggtgcattttcaactgcagcagatgcatgctatagcgctcgttctccggcagtgccgcaggagaattccccgggccgccgggggagggtaggagctacagtagcacaacagaaaaacaaaggcgggttttcaatgttttttcttcttcatgcgcatatccggagttcagccgaagcaaaccaaccatggattactcaatatacaggcaagctgtgctagcgatcgaatccaatgagtcatttgggcttagaggttcatgaccatgatagacgttacggtcattggtttgaacatgtgtgtaccaacctaccattagcggagggtaaacgagacatgacaagagaacaccgtcgcaaccccaatacgtttccaccccactgttatcccatataaagacgtaccctacatcgcagaatagtgcaatacccgcttcccgaactcgtggttaaagtcgtcgtcgccttcgtggccggcaacgatgaacctgtctcgagtcttggtcgtacctcttaaaccagagtttggcgggaaatgagacattggacgcatgcaggggggccctcgaaggctttaaaaccctcggtcaaggagcaactcgacatgagttatgtctcggcatcggtcctcgcaaaaaagtacggagtctccaaaacttccgcaaggcgatggagaatcgcggggatcttgcgatcaatgcgaacaccaggaggacactacagatacttgcttgatgacatcgtcgcgatcagggaccgcacaactaacagaagaaagatcgcatattgtcgagtcagctcgtcaaaacagaaggatgacttgtgcagacaagtccagtccttcaaaaaaacgcacccggaacacgagatcgtcaaagacatcggatcaggcatcaacttcaaaaggaaaggtcttctgcgagtggttgacgccattctcgaaggacatgtcgaagaaattgttatcgcgcacagggatagactgtgtagattcgctttcgactttctcgaatggatatgcaggagggggaatacacgaatcgtggttcaagaccaagtcatacgctcttccgaacaagagctcacagaagatctcgtggccatcatccatgtgttttccttcaagcttcacggaagccggagatacaggaacaaaggcgagaaagatacggctaaaaccggtgaacggacaggagaaagtgctcagaaagtggatgacgtctgcgagacaaacatacaacgaagctctaaggctcgtcaaggccaagaaggccaaggccaatctacttctgtctaagctcgttgtgaccgcccgggataccgacaaaaactctcgactggaaagtatgaagttggctccggccgatgttaggaagtcagccacacgtgacctcgtgaagaactttgcaagcgctcgtgcggcttacacagcccggctacgaaaggtcaagtccggaaaggcgagaatcaagaagagacgcaaatccggccagttcaaggggagacgtcgctacaagaaaagaaagcccttcgaggtgaagttcaagtcccgccgtctcacatccgattctattgagctagaaaagaaatcgatctcgtttcaagacaacacggtctgctttttcggaagcaccaagaagcacaaactacgagttgacatgagcgaggcattttcggatgaaccgggtgcacacaagccttctcagagttgcagactagcctactgttttggtagatggtacatcatcgttccggagaaggtacagatcaagaaggagtgcgccgacgcatcgatggaacctcgaatcatcggaatcgaccctggactacggacagccttcacgtgttcttccaatttcggtgacgtcctggaggtcgggattaacacccgttatcgtttccagagagaacacggcaaaaagacttccatcgctaagaagatgagagatgcgacgtgtgtgaagaagaaaacgaagctaaggaaagcttggtaccgctgtcaagcgagagccaagcatcttgcagctgacctacactggaaaaccatcaagtatctcttagatagatacgacgtcgttgttattggaaagatcggtgttcagtctcttgtgtcgaagacagggcaatctgctagtaacaagcggatgttctcatatctgagtcactactctttcaggcaaagactcaagtacaaagcggcgttgctgaacaaagtagttgttgagcaggatgagtcgtatacatcgcaagcatgcttgagatgtggtcacctaaagaaggacctcggtgacgcaaagacctacgtctgcaaggagtgcggcctcgtcatagatcgtgatgtgagttctggtttcaacatcatggttcgctgtgcatctgagcatcatgtaacagagactactgttctaggcaagcgcaagtcgtaggtgaagcctaaacttgcatacagggcctcgtatacgctctttaaagtagcttaagcacgtatgtgcatccaacgtaagattgaagctctctcgaggcttttgaagtagaggaaatgagaatttcttgcggtatcgaattcgtttccaagtttgccccgttttaataggctgtttggaaagggttggttacgtttggatttaaagctgtatacggataacaaaacaaggtaacacacgaataagcgcgtaggtaagacaaaacaaaaaaacaaaagccagaactcactttcttgcagtctagggactgcttgatccgtccgatgcacttcttgatcgtgtcctcgtacttgagtggcatcaagtggttctcgttctcgggctcgaacctgtccccgacctccaccacaagaacctggagacacatgtcaatctcctcctgggacaacatgtccatgatgggctggatcgtgttgtgcttggttagcttttccatgaacttaagactcggcagccacctggggtcccccggtggaaacattctgctgttttgaacctttgtccccgaggccgtcttcctttcccgattctccacgttgtccgacttcttcttgatttcaccggcgaccttgttgttgaaggccctctgcacgtcgccgagtagtttaaagtctttctccttcgttgtagcagtggagtgttgcatcaccagttcccaagctgggttcccttgcgagctttggacgatgaattgctgtgcttgctcgtggccttgatggtccccttctcagcgggacgagtgaggtccagcatgtcgttcatcggagcccaaagcatccacttgcagaatcccttttccgatcctctagctagcaaggccctcacaggcagcccgaagtcgttgtgctcaactctgtgagagattgtttcgtctttggggaagggaagactgacccccggaggcatttccttcggactgagcggggcaatcatagactccgcggtgaacagccgaccaacgcggaacgctccctgggccgccctgatgtaaaccttcgcctccttcagctgacctttcgtgaatcctcggtcagggtgcaacatgagaccagcgagcccagttggatgtccctccgcggcatccccgagacgcagcaagtcttggatagactctttcttcagtgcggcttccaggcctttgtcctgcttgagaagtttgagctcttcgccattgagtagagagcacgctttggagtctttgatgagtttccaggcaatggcggtcgcctccttggagcgctcaagggcatcaccctcgagtttctccgtgtccgtcttcttcttcaggcgatcgtcacggatgaacggaatgatgaacgtcttaataaaggcgtagagggcacccagaaaggtggcacagtgttggtatgcgtccttcaacgcgatggctgtgccctcatccgcctccttcagaacctgaatcgttgtgtactttgcgtcagcggtcctcttgcgcccccaccggatggtgaacttccagtacccactcttgttctctctggtgacgattgttcccttcccaagtttcggggacgtcaatgtggtccccccatctccagcaacgatgccgagaagtcccggttgctctttctctagcttgaggaaaatgacgtctggaatggtgccatctttctcgtgttgctggagcgccgtctcgatttggagaagcgtcaatgcgcgatagtccgatggggtgtgctccctgtcatcgtagcctttcctggcctcctgaaggtttttctcgatgcgctggctgtcgtcatcatccacgggatcgcagtgaccgtcgaactcatgtggtccgtagaaagcggttttcttgcggcttttcctgccaccggcgctgccgctgctgctgcctccagtgctgccgctgctgctgccgccggtgctgtcactggagtcaccgaagccttcctcgtcgctgctgctgtctccggagtcttcctcgtcgctgccgctgtctccggcgtcgccgctgccgctgcctccggtgctgccgcctccggtgcctccggcgtcgccgctgccgctgcctccggtgctgccgcctccggtgcctccggcgttgcgggtgccgctgcctccggtgctgccgcctccggtgcctccggcgttgcgggtgccgctgcctctggtgctgccgccggtgctgtcactggagtcttcctcgtcgctgccgctgctgctacctccggtgctgctgctgtccccggtgctgccgctgttgctgcctccggcgtcgcgggtgctgccacgggagtcaccggcgctgccaccacggaatgcatccagccatttttgagctttttcggggttctctctcgcgagcgcacgctgattggctccctccttagcagagatagggccacggggggctgcttccccccttccagcccttgaagacctccggcgcggtgtcnnnnnnnnnnnnnnnnnnnnnnnnnnnnnnnnnnnnnnnnnnnnnnnnnnnnnnnnnnnnnnnnnnnnnnnnnnnnnnnnnnnnnnnnnnnnnnnnnnnnnnnnnnnnnnnnnnnnnnnnnnnnnnnnnnnnnnnnnnnnnnnnnnnnnnnnnnnnnnnnnnnnnnnnnnnnnnnnnnnnnnnnnnnnnntttttttttttccttgtgtgcgtgcgtgcaacgtgcggcgcaacttccggtacgttgttggctgtccgttttcttgcatctacctggttctgcgtaattacggaacgttcgtgctcgaccccgctcccccgctgcgagttgttgtccgcttgcgcttgcgtgtcgcccgtgcaacactcgtcaccagccgcgccctgctgtttgcatgtgctctggcgctgcgcgccgtgccgtctttcggcagaccgccgcggtgccttctgttcatgttctctgcttctgcctcttgcgttttcgctgtgcaccacttcctttctctaccggcctgctgcggtatacacttgttaacacgttatgtcgtggtatgtggtgcgcattcatccccatgcttatttatcttgtgtactaacctatccctgcggctccaatgggccactctttttcttcttcgggggtaccggcctgcccgtggacctctcgccctttcttctgttttttttttctttgctgtccacagccatggctagctacggcaacgacgtcacgccggtcgtccaccacagccgtacctttcagggcgtgaattcaaactggtcactgactgttcggcgttgacttggttgtttaggagtagggagttgtgtcccaagttgcacagatgggccttgcggttgatggagtacagctttgttctgcagtggcgtgagggagctcaacacgtgctcccggatgctttgtctagactgccccatgccccacacccccagcccgacatcgatgactccttccccgacgatcccgcgatgccgtcggtgcaagcgcaggagccatcggggccggtactagacggtgttaagttggtagacctcgagttgtttgacgacaccggctcccagccgtcctcccacgataccgacgctgccctctcagcccttcgagccttcgaagagctgccctccctggctgcattcgagacggaccccacccctacccgtcgcagcactcggaagaggacatccaacgtgcgcctggtggatctgggtaccctgcagttgcccgccgacgccgtgcccgaggaccagcagacacggccttgcccggtctcggaggtggagcttcctgcacaagccccaccaacggcaccatctttgccaccgctcggcagcgccgccaccgaccacgtcttggaactgctccatgcagggggggatgagacgaggtcagtcgcggcagagtcgagggaggggggaccggccacttcagcagtgcaacaggccatcgacggcctctccaagcccgagtccttcttacgacggcaacgagaggacttccgtttgggtcaggtctgccagcgtttgagtggatatgaggatgagacggggccgacgtagaggggtacgacattggcgttgacggtttgcttcggtttacggacgatgtaggtagaaggcgcctggtcgttccgcaatccatgatccccgacgttctcgcattggtgcacacgcttcatggccatgtgggaataggtgctacggtagccatcgctcgcaaacatttcttctggaaaacgcttgctagagatgctcgccagtatgtgctatcatgtggttgccgacgacgcaaaaggtccaacagtaggaaggttgcgatgacacctggtagaccgttggacccgtgggaggaactccaaatggatatccttcgcatcgatgttccttcgcagtcgggcaacaggtatgtgttgttggtagtggacagagcgtctggatttccttttgggtttgtgctgccctctaagcaggccgagggagtagcgagagtgttgacggagttgtgtttgacgttcggcgttcccaaggtaatttcttgtgacggaggaggtgagttcggctcgcaagtggtcaagcacctgtgtaggtggctgaacgctgacatcagattcggcccggctgaccacccccggggacaaggtgccgtagagaggctggggggatggttgcaggagttgttagccgagttgtgcggtagctggcctggtaggtgggatgagtacgtttcgccagccctttggatcaaacggacccttcccgacttgtctctccccggcaacatgacccccttcgagatgctgttcggccgaccccctcgcacgtcgctcgactctcttgtcccgctcgatggagaaaccgacacctccacagggctagataattttgtggaacggcgcaagcagaacatgcgtgaagtacgtctggctttggagaagcggcattcttttcgcgtcgctgctcgtgcgagagcgaaccagtctatctctaggttgtcacagggagtgcaggtagaaccgggtagtttggtgctggttagggagtccgagagttcacgacaccgcgaccgtagaggtatgaaactccagcacgagccgtacactggaccttgggaggtattgaaggtattggaagagggcctcagtgtacaggtgtcgatgcaggggaggaagaagcgggagcggcgagtgtcgctagcggatgtcaagcggttccacaccaggcctgcggccttgagacactcattggcggatgagttcgcccagttcgcgtggtcttccgacttcaaacggtcaggagtatcagattctttgcctttcgattctatctcggcgtgtaggagaatgatcaagccgaatggtgtgagagtatgggagttcaagggaaggcggactgacgggggggagtctgagtggttgtcggagaacaaggtgcttgagacgttcacacccctccaactcgacgtgttcgtggctctctggcacctctacgaacccgaagccgctactgatcttatgccccctccccaaaggtccggtgccccgttgtcgcgctccgaagccctgaaactgttccccataggatacaggtttgcgagggacttcggaggaggcttgaagatgcagggagtggtcttcgactacttcgacagctactggaaggttcgctacggcgaccaagactgggaggacctgactcgtcaagaacttcagnnnnnnnnnnnnnnnnnnnnnnnnnnnnnnnnnnnnnnnnnnnnnnnnnnnnnnnnnnnnnnnnnnnnnnnnnnnnnnnnnnnnnnnnnnnnnnnnnnnnnnnnnnnnnnnnnnnnnnnnnnnnnnnnnnnnnnnnnnnnnnnnnnnnnnnnnnnnnnnnnnnnnnnnnnnnnnnnnnnnnnnnnnnnnnnnnnnnnnnnnnnnnnnnnnnnnnnnnnnnnnnnnnnnnnnnnnnnnnnnnnnnnnnnnnnnnnnnnnnnnnnnnnnnnnnnnnnnnnnnnnnnnnnnnnnnnnnnnnnnnnnnnnnnnnnnnnnnnnnnnnnnnnnnnnnnnnnnnnnnnnnnnnnnnnnnnnnnnnnnnnnnnnnnnnnnnnnnnnnnnnnnnnnnnnnnnnnnnnnnnnnnnnnnnnnnnnnnnnnnnnnnnnnnnnnnnnnnnnnnnnnnnnnnnnnnnnnnnnnnnnnnnnnnnnnnnnnnnnnnnnnnnnnnnnnnnnnnnnnnnnnnnnnnnnnnnnnnnnnnnnnnnnnnnnnnnnnnnnnnnnnnnnnnnnnnnnnnnnnnnnnnnnnnnnnnnnnnnnnnnnnnnnnnnnnnnnnnnnnnnnnnnnnnnnnnnnnnnnnnnnnnnnnnnnnnnnnnnnnnnnnnnnnnnnnnnnnnnnnnnnnnnnnnnnnnnnnnnnnnnnnnnnnnnnnnnnnnnnnnnnnnnnnnnnnnnnnnnnnnnnnnnnnnnnnnnnnnnnnnnnnnnnnnnnnnnnnnnnnnnnnnnnnnnnnnnnnnnnnnnnnnnnnnnnnnnnnnnnnnnnnnnnnnnnnnnnnnnnnnnnnnnnnnnnnnnnnnnnnnnnnnnnnnnnnnnnnnnnnnnnnnnnnnnnnnnnnnnnnnnnnnnnnnnnnnnnnnnntattcgatacacccgttgatatgcccttgtttgtgcttaggcagcgagtaaagtttggtttactgagttcttaagctcccgtggaagaggggcaggagagagtcacgcaccacgcttctctgaaaagcggtgtcccgtggcaaacttctttgaagacattccctctttctactgtacgaaatacggaaccccctgctcgggaatcttggatccagcaatcacacgaacaccctcccctgtttgtcactccagtgatgaacaactcgtgtgacccgctagaaaacaagaatgccaaaaaaccgtctcaaacaaaagtcatctaaagggaaacctagcctccagatcaaaaccccttactcaacaccgtcacaagaatccaaaccacaacgccctccccaaatcatttggcattgcaattctcctggcagactgtggaattttctttcaacttcccgacacccctacgtgtgcccgaacaaactgtcccgaccttggcgtccctgactgcacgcccgaacgaacaaattgtcccaacctggtactagcgtccctaactgtacgcccgagcaatcagattgctccaagtttctgtagcgcctttcctgcactacctcgattttagtcaacacatgacatggaagcgccttttctgcactaccccgattttagccaacacatgacatggaagcgcgcttttctgggttttagtcaacacatgacatggaagcgcgtttttctgcactaccccaacgcatgacctgaaagcgtctttcttgcgctgcagtcacgcaaagagacacgtctgcctcaatacagaatggacaagtcttcactgcatgccccctttcatcaattatcgacgcaggcaatatcgttcatcacctaccgacgaaatggaaccggctttccccccgaatccccttgagcggcccagaatgatcaatcttccggctccacctagcgtccctaactgtacgcccggagcacacttgagtactcccacaaagattatgtggcccgggagatcaacatcccggctccacctagcgtccctaactgtacgcccggagcacacttgagtactcccacaaaacatcatgatcggtcatcgggcataccataaacaaccaactcacgaacggaaacgcatttaccacgaatccctacaacttcaatatctcatctggtcgcaatcacacacattcaacactctcgaactaaccagatagaaagaagccttgttgaaacgcctcgtcctggatgttccacctctcagaaagcttggtcttcctcggagtccggttcctcgaagtgctcgatcatgaccacgttcgcttcttctaccttttcttcctccgatgggcactcttccgccgtgtgtccataccccccgcagttgccacaccgcggtagcgggttgttcgggtacggacagtcctcagcatagtgccccctccgacggcaggtgaagcaccgcccctttctaccggatcccccgccgcctccctttgcaccgccaccatttccgccaccgccaccatttccgccaccttcgttgccgccaccaccgttgcggcccttctttccacttccttttccattgctcgctgacgtcacgtaggccctctcctgccccttccgctgcgctgccaccttctcttcgtgccgcagcctggtgatcttctcgcgctgcgtcgtgacgaggcgcaccacgtcgttcctgctgggtttcgacatcccgtgcaagttgatctgtgcagcttcgtactctgggatgggcaaggtatcgatgaactttgtcaggaggaagctctggtccagcgtaaccccgtccttttcgtttagctggctccagatcagctctaagttgttcagcgcctggacgggatcgtccttcgctccgaactcgaattcgttgaagcgtttgaagagctcctgcttggccccttgagtgtcagggctgtacactttatccaactcctgcaaagcttccttaccactggtgcactgtctgatgatggatttcgcatggtcggtctgcaaggccgaagaaatcaagttccacgcgttccttccagcattaatctgggtctgggtgaaaccctctccccgtagctctacactatcctttgtggtgtcaggaacaggtgacgacccgacaaactggcccttcagctcgagaagtccagcggtctttagaaagtcggcacggaatgccaaccagtccttccgatctcccttgaacgcgggggtctggaagcgggggaattgcttcgcagcactattgctgtacacagcgccccctccaacctcctcaccacccccaacaacgctgggaatcagctcacctcgggggttatcaaaacccccagatacctgcagactctcctggtcttcagcaggtgtgcggcccgggatactcgcgaccccggctccgcctggcgtccctgactgtacgcccggggaaacctcgta

SEQ ID NO: 106 - DNA, 20981 bp, unidentified
  source 1..20981: mol_type = other DNA; note = Undaria sp.
ggacgtgtggaggaaaagaggaacacgttgccaaatagctgccttacagctagctttcggcacccattacagtacaacttcagcccacaacttccgccattgagggaaccacagctggctgtcaatcaaccgtgagatctggaaactttagatgagcaagcatatgatataaactaaaataaacggtagtttggtgctagttttaagctaccggcactattgtcgtacattttctgttgtcccacctcccatttctggtggcccaccatttttatgtcgagatggcatgtggacacatatcatacattccatgtcgtgtgtgcatgcctgtcacagccgtcacaaacccggcgtttgagatgcttgtttgaaaggcagtacaactacgactagatgagtatatatatgaagaacatatattctgttttagtatcagcatcttctgcactagacagcataagctttccggcgctttctatgtatattcctgtgttttgtcccactacaagaagatatgttccctgtattcggcacatacatacatacatacatcgtgtatttttaactttaaaacagagataaggcttgcgcccggcgttaagatccggccccgaacaaaaataaggtaccttttaaattaaccatgacccaagataggctgcattacagtctgccaaacgcaccttctacaccttaagcctctctccaagtactcactgacctgctctaccaaagtacgcacctactacggtttccgtcattcccccccccccccccgtccccaaccaaaaagcaagacaagagcgaagaacccagatgagcataaaatattagcacgcatatatacactatatacggcccactatatacatacatacattgataatgacaataccgcacttgcggcgtggccccgatcctcccatacaagtactctctatttcagaccgattcctgtttgattctcttggatggccttccctcacaggcaccttgtaccctactctctttgcgattcttactcacagggataggcgggttgcgcagccccgataaattaaaaggatcagaagggcggtcatctgactgcaccagcgcggccatgccgcgacaaaacctatcaacaacttcttcggccttagcaaggaagtctgggtttttccgatccacgttgtcggtgcccaacttaacgctagcggtgcactttgccaaccagttcgcaaaggctctaccacgaataacagagaccaagttatcgggtgcatcccctccgtcacttccctcaccgtccccaaaatccatctgcctgtcgtccgttaacccgccacctaacggtccacactcttcagcatctaattcacgcagtccccaaagttctacactccaggcgcccgacgtggcccgccaacgcgggtgaatagacatgccactaaactccgccggacgccgtaagcagtaaagaagcacggccatcaggtgtctacacggcaaacccgtcctgagtatctgcaaacacgagcagagttgaaaattgttcggcccaacgacaacgatgtgacctacctgtgggtccctcattttgtacaaaactttaaccaccgtgttgatctctacgctctcgaccagcctagcaaaaacaagcaatgaagttgtgccatacattgtggtatccgtgacgtcatcctcgacaaggctcgttaccacgctttctggcagctcacaacaaacatctatggcctcgccgtcctcttggcgggtcgccagcgaattcaggtagtcgagggcaccagctccttccgtcaagatttcagttgaataggctgggctcgcgaaaatctcgttgatcacctcctgtacaaggtgacgtaaacaacggtcgtcggaaggaacatggacgttgtgcgtgaagggggtggtggagtctttcaacagcaaggccttaactcaaaccaacccccccccccgttccaccgctatcggtccaggcatcacgggtcaactcacctctttggcatacttgctggcgttgacttgttctagttctttttttattggctccccggtcttcatggcatcagcctccacgtgttctttcccgtagaatgtccgccttgtgctatacctgtagacgaaagaacgtggaatagcgtcggttacaacctcgatacacgcatcggtttcatgtatccacgagttggatgcttggaggaaaatttgccgacgcagtgcttccggagggcggtcggctttcgaaggacccatggggcctgcacaccgctatatttcgagcgttcaacagcacgagcgaagtactgcggccaaatatcgccacaacacagcaacacttaccaccgagactgcagggccaatttttccgccaccctttccgcctccttcttcactgccattagactcgagcgtttgttgaccatgcgtccgttcttgatcacgctgaagcctccctccacacgctgagaagctgtcatgttcaacgtgagtgtcgttggatgatagcagcgtgcccaatgcttgcggttcctgtgttcgtagtggcacatccgagagtgtaagattggcgcgcatgacgacggcacaaggggagaagagggcggccgcacgtacgcaggtacccactccttggtacagagtgcaccggacacgatccaaccttttcggcgctccttatacttgcaaaacaccgccacaacaactcacgtgtacacgtgaccggtgatgtaactttcgcacttggtgcccttcacgagattcgagaccttctcccaaatcgtctgaaacgcctgtcaacggagtacgtggcagagaaaggacaacgatcaatgagagagagtacatggatgttggaagtaactgcagcagcatgtgcaacatacgatgccaccaaaaacgtatatggcgcggagcagccaaggtaactcacagtgtgtgatgaagcgaaagaagccgcacggtacagccgaagcaactcgttaaacttctttccttgcagcgccccctgacccagtttttcttcaggttcttgttcatatgccacgagcaatgcaggtgcgttgtgttgggcagacgagtgcttaccgcactggtcatggcatggtcggcatccgttaatatcacctgtggagcaccaacgtgcagatatggaacatgcatctcggtgtttgtacacaggaaatcgaaaaccaaataggccgagaagtggcccgagaagtaggaaaatgaccagtctgcccatgcatgtacactatttcataacgctttccatcaaagcataccaacaccatcgcactttagaagcagtacaacgggatttcgaacacgacagcggcacaggagtaggagcccaccttagggtgcccgccacaaatcgcgattaaatggtcgatggcaaattcaaaagacggtatctgctcgttggccagcagcccttgtgcgaagatggtcgtcttgttctccgagtcgacgccaacaaaaaggcacagcttcatgttgtacctaccggcaggggggaatggaaatatgatacggtggtacacgggttggcacaaccatcctccatcgcatacagccatgtgcctacagttggcacgttgcccgtgccccaccgaaccgcgacaacctggaaggtagttttgctgcggaatataacgaagaggtttagccccccccgtccttgtcacgggcaaaaaaaaaatgcagcctactactgaacgagccagcatttcgatgtacacatcatatccagggttaagtaacccccccccccaacgtatgttggtactgtcgctcgtcgcgtcaccaccgaccagatgtcggagttgagcaaaagtagccgtcataaccactgacaacgaccgcggtgctcacctgttcgtcagacacgtgttgtcttgtattaccacgccgccgaattgtctcgccgaaatctgttgctcggctgtggaccacatcaccacagccagctggttgaagctgtccattttccaggtacacttgcaagtggagtccttcagcaatgcctcgatgagcaagacggcatccttcgccgtcccccacgagttgcgcctcgcattggtggacaaattcctcacctgcgacaaatggtcacggagcaggtacgcgcggtcgtgaatgcctgatataggaattctgtgcttagtatcccccctctccctcggcgatgtaagactggatcaggaaatagtacaaaaggtatggctatcgtgggcgcagcaacggcgttagacgtccagagaagctctagcaggaaaacgaacactgcgtccctccctgtaatacgagagcagcggtcgaagctacgcgtacagagaatgcccccccctcccctgctcgaaaggatgcggggccagtggtcacattactacggcaagccacagctgtgtacaacacacaacaacaggcaccttgcgtcggcccggcggaccaagcttgaggggggcgatttccagctcgatcaatcggtgcatgtttaggaccctcactccccctgatgtccacgtcctgatctgaccctcccagtcccgttgaattgcggcaacatcaatcaagttgtcctggttcgcccgctgcgcaatttttggcacctcacactccgggttcgtttgatggtcaagaatgacctgcgcaggcaaatacaaattcacatgatgcggaggtacaaatcaggcccgttcgatctccgctataggcatacaggagccgcagatatgatgcattcaataaggattggtggacgaacaacagcgtgtgacttgcgatggccttgtagcaccagccacatctaaaccgttgttgctcgttcagtacaacgcccaccttcgttatgcgaggcagcgcatcctttgtccacgaaacgcagacctggaatagacagccgcactgaaacaacgaacgagcgccccgaacgtgcgccgaagagacgatatagacgaaagtaggacgcttcaggctgatggaaccaaactctaacctgctgcacgcagtgttgtggaacaacgcaagtctggtactacttgggctttaccttgacagaccaccccttcttcgagccggtgttgggtggtgccttgccggcgccttggcacttgatctcatatcgcccaacccgacttgatcccccaccaacctgattcgggatgacgccggcgtcgtggggggttagcttcgaacacccgaccggaaacaaaaacggtgaagaaatacgcctcacctgtgaccgaactacagaaatcccctcgacagcaacgatgggataccctaatctacctagggctccaaccacgggcgccctgcaaaaacatactctcgtgctctattttgttcacgttggtaggcacctttttgccggtttttcggaacgttgcacccttgtggcctgcacgatgcaaggctgcacggatgccgcccaaagtcttctcccacgtctcctccggagtgtcgttctcatcaacgctgaaagagaaatctttcactaggtcgacgtgaatgtggtccttgtcgtcgtcgtcttctttgtctgcgtctggtatcaagaagtgttggggttcattgaattccaattatgcgccgaagatgggggggagtcgaacgacgatgcggtaaagaaaacgtgtaccactccacaaatctcaacaaaaaagtttgttgagaaagcaccataggtgactggctgggcggtaggataacactttatgctgcgatcgagacgtcatcgacttagagggggttttcgtctgcgcgccatggtcacggctgcggggcatccccattcccgtcatcaaaccaaagggtaattcctgcgctgggactcgtggctgtagggtcaatactaaatgtcgtcgcttaccttcgtcagagaagacatcgtcctggctgtcccagccgtctgtgccatccgagtccacgtcttcctcgctgccgctgctggtgtcatcggaatttcgatacagctgtggcgagtcgtgcaaagaagggcaatgcaggaaggcagagctctagtcattatatattaacgaccagcacgccaccttcatacccataccgctcgaacctatttttgaacagccaaaaccaagctgttcgggacatcctcaggagcctgcttccgaccaacgtagtccccacgctgccaacaaaacgggcacgtagcagcggggattcgaccacaggccaccagccacacacaccttctgcagcgctcgctctgccttcttgaactgtttccaggcccgcgctgcagcaactctctgctcgccgcaggctttctcgcgatcgttggggccctcaatgccgtcgtctgtctcatctacagcctgttcgatagcatgtagagaaaacggcgcgaagcacatcttacaccccacgatatatcggttgtgcgaccgactccccgccaaccaagcacagcactgcggccgggctcccctttttgcctttgcattttcaaccccaacacacgctgctcaccgcgaccagactgttgagcttcttcttcgcctccttcgcggtggttcggagcgcctgtacgtgacgttcctgctcctcgcgccgcgccatccctgcggccgatggtccaggcaggacgctatcgtctgaatcatatcctggcaccaagtcagggtgagggcatattgcgcgcgttactctagccagcgagcttttattggtttgaacaatgtgctcacagcacgaattttcttttctctttgcccctttcgtgtaccttacctccgcccatcgacaagtcgtcgtcgctgttccagttcctggctgccttgctgctggtcgtgctggagtcgctgtcctcgttacctgggtcaaccccccccccctcccccccgaacatctgcagcgcgcgcgtaggacggcggctagcgacgcttttatcgtaggtggtacaaaacatggttacctcgcgcagacctacctctctactcgtagattgcttatgagcgagcaagcatacacccaagctgccttctcccagaaagatgaatgacaagccatgcgcaacgaacaggtgcgcctagcgctggcacacggcaataataaatgggaacctgcaatacccgccgaaacccttcaaacataccgtatgccagccaactacagttttcgcgaggacattctattggcaaccactacacccaccttcgccatcctcgtctcggttcttctcaaatttttccatgccttgtcgtacccccgccgtgcttttgccgccgccactcgtttgcgtaaaagccgcccgtctgcgagggacgtatcccttacccactcgtgcttgtttcgctccacgtcggcaaccctttgtcgatggccctctgtcacagcctgtgcataattgatggggagatatgccatcggatatcaatacaacttggttcgagtaacaacggcgaacggtgacctgacaggcccaacaacaattgaaattggtctttttgaaaccaaggcccggcaactacaaaaataaaatagcaaatttcgagtaagatcaaacgccagcacacgacagcggcagttaacaaacaacgccccatcactcaccagcttcagcttgtgatacagcgtcttcgccttttttgctccctctctggcctgctcggccttctcactagctgctagaagcgcttctgccgactcctgccgagctttctccaccgctgcctctgctgaatcgcccccggtggcccctccgtctcgccccttcccaccttcgcctccctcctccttgccgtcctccgcacccttctgcttgtcgtccccctgcttggtgtttgctttcgccgccgcggccgccacggccgcctctttaccgccatccgcattttgcctccgttcccacgcagctcgctcagcacgggtcttctgttcggaagcttcgtcctacacaagacaaaaccagcaaagcaaacggcggccaacaatacgaattggtggttagtgcaactatattctccattgttttgccttgattcaaggtacagacctacacgagccgaaggattggtgacgtgaacagcatgtgtcgcggtgttaaagcaggaaggatagtactctcagcacacgcattgccgagatttcgacataaacgccgacgaggtatggtgccacgtatggtgtgatttttcggcaccacacaaactcactttgcaccgtctcccagccatgaaccatggcagatgaacggtattcggatgacactcacatgttgcgaaaacatcggcggagcaacttcgtgcatcggcaacggtggacgtctggcacggtccttgctcgcgatcgccgcgaagtgcacccatgtgtcaacgccgaaagttgaatcagcatcagtcgcggcgatagcggcgagcgctttctcttcgacgctgtgtgcgcagacgtctgtcagcacgattgcgagctcttcgaccaccacatccccttcgctgcccatcccaccacgtaaggtgatgttcgtacggtctgttggctggatccaccgagatttgcggttgtcaccaaaatcgcaacctttcttccccagccccttggctggctccccactcgccggtccctttgccttcaccttctcccgcgctagtttatctgtcgggaccactagcttcaccgctacaccaagcgcctcggcagccaaaacaacaccaaggtcgccacaccaccttttgtttcggcaaaaccatcctacgttctccatgagcatcccagcgtagttgtcacgctcgtagttggcggtgccgtacttaacgtgaatgtgggctgtgaagtacaaaacgttcagatgaagggggctaccctctcccaccagggcgtcgacgttcaccgggctccaactgagcaccacaagcttcagctgacgccaacacttgtctaagccccacagtgccttgctcaatgcgcgccaaaaacagttaccgtctcctgcaacccataacgccgcaaacgtctctcgcaactctaccgggagggtcatcgttgccctggcgtcgtatgcctgctcgcaatcaaggatgcaaggatgccacgccgtttgttgtgtgcgaaaacaaggacggagctatgttggatctttcccacgagagggtttactggtcaactaaattcgaaaccgaacaataccaagcgcaattaattagacacgtaaacattcggagaagtgaaccgcgtttgtttcttactttttattttgttgtctgtgactagcataacaacacggtatcaattatgtctccggatcggtcctttcaaagaagtacggagtcgccaaaacttccgcgagacgatggagaatggcaggactcttgcgatcaattcagacaccaggagggcaccatcgatacttgtttgatgacatcgtcgcgatcagacaccgaacaaccaccggacgaagaatcgcatattgacgggtcagctcgtcaaaacaaaaagatgacctgtgcaggcaggtcgaatccttcaaagaaacacatcccgaacacgagatcatcaaggacatcggatcagggatcaacttcaaaagaaaaggccttctgcgaatgtttgacgccgttgtcgaaggacgtgtcgaagaagttgttatcgcgcacagggatagactgtgtagattcgctttcgactttctcgaatggatctgcaagagggggaatacacgaatcgtggttcaagaccaggtcatactttctcccgagcaagagctcacagaagatctcgtggccatcatccatgtgttttcctgcaagctgcacggaagcaggaggtacaagaacaaaggcaagaaagatacgtctcaaaccacaaaaggagcaggagaaagtgcttcgggaaaggattaactctgctcgacaaaactacaacgaagccctgcgactcgttaaggccaagaatgccaaacccaacctacttatgaataaactcgtcgtcacctcccgtgaaacggacaagaactcgagactggaaagcatgaaatcgacaccggctgatgtgcggaatggctacccgagaccttgtgaagaacttcaagagcgctcgtgctgcgtacaaagctcggcttcagaaagtcaggtcgggaagggtgaggatgaagaagatgcgcaagtcggggaagttcaacgggagacgccgctacaagaagaggaagccgttcgaggtgaagttcaaggccaggcgactcacacccgattccattgaagtcgaaaagaaatcaatcttttttgagagtaacatggtttctttttttggaacaagtaagaaacactcactcgaagttcaaatgagcgaggtgttctcggaagagtctggtcggcacaagccgtctcaaagctataggatagcctactgctttggcaggtggtacatcatcatacccgaacaagtacaggtcgacaaggcgaccatcgacacatctactgaaccacgtgtcatcggcatcgaccctggtcttagaacggcttttacgtgttcttctagctcgggagaagttctggaagttgggatcgaaacccggaaccgcttcgagagggaacaatcgaagaagaactcaatcaccaagaagatgaaagatgcagcgtgctccaagagaaagagaaagctacggaaagcttggtaccgctgtcacgcgagagccaagcatctcgtggccgacctgcactggaaaaccatcaagcatcttttggatagatacgacgtcatcgtggttcgaaagattggcacccaatctctcgtgtccaagacagggcagtctgccagcaacaagaggatgttctcgtacttgagccacttctctttcaggcaacggctgaagtacaaagctggacttgtgagcaaagtggttgttgagcaggatgagtcgtacacttcacaagcgtgtttccggtgtggccaccttaagaagaatcttggtccagcaaagacttattgctgtagagctgtagagagtgtggacttgtgatagatcgagatgacaatgctgggtacaacatcatggtgcgctgtgcatccgagcaccatgcaacggaaagcatcgttctcggcaagcgcaagtcttagatgtgctaacacacagggcctcgtatacgctctttaaagtaacttaagcatgaatgtgcgtccagcgtaagatcgaagctctcccgaggctttagaagcagaggggatgagaatttctggcggtatccaattcgttttcaaatttggcccgtttttaatacgaaggctgtttgacaagggttggctacgtttggatttaaagctgtatacggcacaccggtgattcaggcaaaccatactgtaaatacattgggttcaaaggtggggtgtccgtacagacaccatcaattacaggagtgtcccttcagggttggtttggggggctcgggtcacatcatgaatggaaacttgctgtacgccggagggatatacaggcagcaacgccgtcgctaacgctcttcccctggttgctagcgctgttccccttctgaacagagtgacgaaaactaatatctactcagcattgcctacctcatcttccatggcaatgacccccgacaaagctggcaccacgcctctgcgacagccgaaaaccttttgccaagagcaacaagtgccgacgaactcctccagcgtcttcatggcggggccgcctttcccttcctggcccaccacgttggcgatcatgctgtcaaggcgatggagtagtctccctgcctcctcgtctaacatcacataaccagcggcctggacaaacacggcaagcaaacacgccgccagtcatggcacacaggtcttagcggatagcagtagcagcaccaaatgacttttttcaacacaaccaaatgcctattcaagtacttacgattctccatccaaaacatgagccgcctctccacgcggccagccatggcacacaggtcttggtggatagtagcagcagtgtagcaacaccaaatgccctctttcaagtcattacgattccccatccaaaacatgagcggcctctccatgtaaccgaccataaacgggtttcatctctgccaggattttgaaatcacccacaggctacaacaagtggccgccgtccacgacacagcccatatacaacagctcacctcgtcctgggggtttgatgttggcaccgcggcgtgactgctgctttccctgccagtatatcaggcccaggatatcatgttacaagcccagtacggcacaagtcagcattggtacccgctgtggagcaccacgggactacatgtacatactccagtatgacgaggaggagagagaggcgcggtatgtgtgaacctacagcagtagacattttccattgcaacgaacaccgtaccgtatgtgtaatcaggcccgtgtaatcaaaacatgcgatgcgctactttagtctggcagtacatggcagtacatggcagtacatgcgtggcctagcgctgcccacacaagccttgaatgaagcgggttagtgcgtggagaaaatgactgctaaatagatgtacgtggcatcatgtagacttcgtcgtaccgcagtacagaagcagcagcagtagcagtattagcagtagcagtagccagtagtagcagcagcagtagcattagtagcagcagtagcagcagtagcagcagtagcagcagtagcagcagtagcagcagtagagtagtgatagtagcagcagcagtagtacagcagtagttgcagtagtagagtagtattagtcgtacatacagtggtggcagtagcagccgagaggtctgcaggggtctcattcgaacgcccccaaaacgcgcccgcgaccaagacctggacgcatttattaccttcgcgtctagaacaaactctcttgctttcgataaatcaccggagacatgccggcgtagggcgcgtgctgtgtatgttttggcgcgcgcaggtacatagtctacatcgactacatgtagatcttttatgctgttttagacaggcacatgatatattattgtaagttacaaggggctacgccggcggcctggacggccgccggtcgcagcgcaggatagtaaatattaagagggtaagaagtaatgccaagagttagacgaagtttgttaattcatatactacgtatggtgcgtatcgtaaacaaagcaataaatagctgaggcgtgcccccgcaacgacggcaggcagcggtcggcgccgacaaaatgcccgcccggcgccggtcgtcaaatgtacggaactgaaaatctaaggcacgcatgacaatgaggtgatgagcgtttgaggaaaggcatcaccgagaaggaagcgattggcaaataatggaacccagtgaagggagaagaatatgggaataaatatttattgcattaacgtgaaggagagcccccttgaaaccgcacgaagagagaaatgcggaaggcatcgctaagaaggaatgacgcaagcagaatgctccagcgaaaaaaaatcatgcaaggggggggcacaacttgaaggatgaaactgaaatcacggcaagctggcaaaactgaacaacggaatggaaagcattaccgggaacgcaaagcttgcgcgacagcatgaagaaaagctgtgtttgaaacacctgagacaacaacgttcaacccacactaatgacaaatgtctagaaactaaaatcttcaagccacactaatgacaactggcaaaacttagatgaacgtccagagcttcggagcaacgcaagcacccgaggcaagaacgttgaagcgacactaaagacaactggctagacttagactaaaatgttcaacgaccctaatgagaacttgctagactaatgacaacttgctagactagaacctagggaggcagaaaacgcaaaactaggacgaaagcatgaaaagctgattgtaagaaccactagacacaacaccatcaaacgaaccggtcggactcggactaaaatccacggaagggggggaagacgacagggccgcaaccgagtttgatgggtgtgaaaaggtacggagcaacgtaaaactgcacgtaaggggttgtactaaaaaaggtacaacgaggaagacagcaagaaaagctgtactggatggacgaaaagcatatcatccagcccacactaatgacagctggctacgcttggagtataacggagggaaggaagcaaatgtgtcaaggcggcaaccgatgacgaaggatgcgacgagcaacggagcaaagaacaactggatgggaagggttccagagaaaaacgcacaactagcacgacagcaagaacagctgtacatccgataaataacacaatgtgcacgacggcatgaatgaaacactatttccaaccgcgtaacacaacagaactaaggaagcggcagcgggcaaaaacaggtcaaaccggactgcaccacaaaaaaatgaaagggctacttacggaaacatgagtactgaacacaaaggaagtgaagacaataaacctaaaatgtcgaggaggaaggagtcaaactctacgcaacaaagacgacggtgtaaacacacgaagtggaacactgacaccgcctaccactaataacgatgtacatatataaggatgctgaaggcaatcctcaaggtcgatacgcccgagcggggagggcgaaggaaagggcggggtgtcgtgtaggaagcacgcccatgtaaatgaagactggattacaaaagtaatcgccagctacagggccgagtgtggaaggcgaagggtagagagagaagtcatgtcggtagcacaccgaagtagcgagcacatgttgggaggacaccgatgtagggagcacttaggcacctgttggaagaggattggcgagtgcaacggatggtgggaaggtaatagttagcgagtcgtaatgtttggatattgagttgaagagtaggtggatggtgtcggtgtaggcaattggcacgatgggcaggggcgatccagcgaaagaaacgtgcactgtcctgccgtactttagctgagcagcgattatctcagggtgtcccatgtaggttgcaggattggacatgagctcaaggtagtggtcgtacgattggtaaagacatgggggctcaccgagaatgggcaagttttcaatgccaatgccagatgtaattgctgcttgaaatgtatgaatgtgacggttagcatcgaggtactgaacaatttcttgtcgaatctgggagtgaaggttagcgtcaccaagaagagcacgtgcgagagcacgaaatccgcaagatccgtcaccaatttcgtggcaaatagaccatgaaggcgtaggcggtaatgatggtggatgaaaagacgaagggggtaaaaaggggggtaagggtggaatttggcgaacaattccagtagcagcttctacaaaagggtcatagacaacgttcgcagcatgaggaatgccgttgagaacatgagatggggaaatgaggcacatgacagaatgcctattttgagcacggctgagggcaacatagagttgcccatgggcgaagacatcacttcgaaggtctagacctatacgggtaagtgtttgaccttgagatttattgatagtgaggggatatgcaattcgcaaaggaaattgtacgcgttggaaagttacaccgtttctgccgacctgcgcgtgaaacaaaatgcgaggaatgaggacgattggtttgtccggagtgagtagttctacctggataacgcgagagttaggagaaatgcctctgagaacgactttttggccattgacgaggccctcggaaaaattgaggtttctggtgatcatagcaagggcgtcagatttgagatgaagctgatgagggggaacaccctggacgttgagactgttaaggtgttcaggcgaggcgaaggcggtgttggtgttagaatcgtcttttactaatgtgtcagaactataaaaggtagcggagcttccgggacgtttgtcggtgatgtgatcatttgacgcgtcgatagaagagttggttgtggccaataaggcacgatcgtgaagtaagcgggtatcagcatcgggatcaggataaacaaatttggctaacgtatcgaagtcagtggtgtgttgaagggtgaagtggtcggtagaggagacgtcgtgggagtttgaaaggggcatgaggtccgcgccgtccggaaatcgcacgcttggttggcggttttcaccgacagcgcgaacaaaagaagcataagcagcgtcgtccctgtcacgctgtgagatagtgaggcgtacgcgagtgatatcacgccataagtagctagagataatggacgcctcgaccgtatcagcagccgatccgaattggacagtgggtcctatttggcggaagtcaccagagaagatgatagtcttacctccgaagatggaggagttgcgcataaggtcacgtaatgtaatgtcgagggcttcgatgcagtatttatgggtcatgggagtttcatcaaagatgatgacatcgcatttcttaatgagctcggctctctgcgtttcgctgttgatgttgcacatagctccagggacaacgtactcgttgaggggaagtttgaacatggagtgcgccgtccagccaccaggtagctgaagggctgcaattcctgtcgacgcgacagcaatgacagagaacccctcaccccttaaacgggaagcaattactttttcggtgaacgttttacccgtgcctgctggggcatctatcatgaaggctttcgggtggcgctgcttcacggcgtctattacagcggtgtaaacgcgaagctgttcagaggtgagtagaggttcgtggacgtctgcgtaagaggtttgttcgtcagcatcaaaagaagatttcattcgctggtattcggtttggcgatgtgtggcggacggaagaccgagctgttcattggtcttgccatgtagctgtaatttaatgtctatcaatcgcaaggcttcctgtgaagcttcttccctgtcgaagcgacgggtcaggtcttcgatgaggtcatcttggtaatcagtccataccttcggcgcaggaccgccgtctaaaatcagggtgacaaaaagaccgcgcaattgatgtggcatttggaaggaaatggcttcttccatgcaaatgaagtactcttcttcgccggagattaaaccgcgtgctctggcggcgtcatggaaagtcggatgctggatgggttgtccttccgggtttcgtacggtacggagttcgaggaaggatctaccaaaccatttatggtagccagtatcacggctaatataagccagtatcagggctaatgaaagccaaatatgagatggtaaacgactaaccttttggatcttcaaaagtcggcgaagtcggaggggaccaaggcagaggggttcttcgcctcactttccgcggaggctcccgtcttgcgcaggaacttcttctcgttcacgagctcttggcgctgtcaagacgaacatggggaagagcgcaacacaggaaaaataaggagtgtgatcatatgttataaagaaaagagccagacctacacaacagacgcaaggcggcatgatggaaatctacgatgactgcgtaccttcttcgcccagagacgcttagcgcaacgcaggtgcaacggctccggaatgtcggcgttggcccaccccttgaccacgagctggccgtcctcgatctggccagtgcacccgtcgcggaggtggtcgaacgtgtgcgttgggtcgtagcatatgcagagttcctgtgtgaaatcatgcgtagggaggggaaaattataaacagtaatatatactcgtatgaaagatgcatctaatatgtgttgactcaaccgataaatatactcgtatgaaagatgcatacaatattagaaaaattcacttgataaaaggatacatttcccttcacagctgtcagattttgtccccctcagaaacgggttttatagtttccgcgcacagactgactaaaatcatcctgttgaccctgatagctacactgtagttgtaaggggagtcgccgacctatatactgaggacacacaactcgtaatgcgcgcgatcggagtatcacacacagcttgcaaagatgagtttcgacgaaatcttcgatctcacagctggagtgtactttcattttttataatagaaaaattaaaaaaaacaacagctgtgagcaatatgtgttacatcatgtagaacacaggcgtttataaatatactcgtgtgaaagatgcagttggacacaggcaattgtcgctcactccgatgaggtcttctgtggccgaggtcccgctggtgaaaacttcctccccggaagcgttcgtgaccctccggccagcgcagtcctcgaagtgtacgtgcaagttctcgtactctttgggtcaagtatacggacggagagcaaaaaacgagacagacacgagaaaaaagcaaaaacgagacggacgcgggaaataaagcaagtatgagtcccctgaaaaagaaacaaaaacagcaacagcagtagtattcaggcgggttggcaagtgttttaatttcaacgtgcctttgatacgacacgaaagagggctgtgatggtgccgaagaaacatatacgcaggctaacccggaaggacgacgaaaggatgcgattacagagcagaaaagagacggacgccctacgagtaaacgtgaaaaaaaaagcaggtaaaagcggaacaaagccagcgaaatcgcagcagggcgttttcgcaaaggaataaacgttcgccataccgtcggtacatacagcacacaaaatcatacgctcaaaggagggcacacacgctggcaggcggacaacgcaggacgaggaaatgatgcgaggatcagacgagtcacgcacggggcgacttacactacagcagtagggcgcaaggctgcagaagtgagacgaaaaacaaatacgatcgtaggaatgaaaagttgggggaaaaagccagtaaacaccagtaggggaaaagaaggcagtaaacaccaatcaaaagtaggcgctcaacagagtagcagtcgtgcggtttggcaacataccctcagagggcgctgaaagaatgggacacacgtcggcatgcagacacggctggacggtggaaggatgcaaggcatcaaatgatcacacccggcaggcaatccaacagcagcgcaataaaaccccgggcaaaagcgctgtactgctgttgtatcgactattctattatacgatagcaaaaataccgaggaaagaaacgaaagggcaaaaataccatacttacttggcttgccgtcgtcgtcgacctccccgtcaagcttctttccgatggagatggcgccgttgaccggggggatgcagaccacacagataagcttggactgcttcttggtcgagtcgcgctcgggccgaaacttgttcgcggtgaaggggcaggagtcaggatccccctgtacgttttggtcacaggagtaccaaactacaccacgggatgtcaccttctccaggaagcgttgctacgcagaaaggcgcggccacagctgcatataccatttgtagcttcgtgatgctgctgtgcatataccatttgtagcttcgtgatgctgctgtgcatataccatttgtagcttcgtgatgctgcaggctcatcatagcttcagctactgctgtacatcatgtacatgtatacgtgctgctgtagaccaccgggggttcaaaatttttgagagttcgcagttctccactacgcctgggtggcatgtgttctcggggattacgaacttttcttccccagatcctagcacaaacctcgcttagtggcctttacaatggcgacgccggccaggtaatcgacccccccccgtgtgtcggaggtcagagaacacgtaccgaagagataacgcgaagacattagccctgtgtgcagactacgcaccaaacgtctcacagggcatgatttttcggagatctcgtcgtagatctcgacgtcgaggcctcgcgcgcgcgctacggcgccgagcgggcggatcagctgagccggtggttgcaggcgaggcgggggcacgcctcagcgaagaaaccgcgcggaaaggcggtcagaggcgggagatatctgcagacgtaaggatgtgcatatgtgataagcgaactaatatatatatatttacaagggcttcgctcgcggacggctgggcgccgcccgctacgcttgcggaaggaggaaaagacattcagtagaaaggcggaagagaggcacaaatggcgcaactggcgacttgaaaatgccaagaggtccatatatagtacaacggtacaggatagagacgattatgattatgagtttgttattatcatccattcgcccaatccatgatgggcaagtcggaggacttccttggcatatccttccacctctcaggtagcacctatctatgtaggtcctgtacacttattaatagctctctctctaagtcgatcatcaacaataaattatcgcagtgcataaacaccaggcacgcgcttgtcaaggatagagacaggaaaactacaacttaagatgtaaaggagcgcagtgccaaaaaaaacatgctggaagcaggaacttgaacgcacacaccgcaaacatgtgaagtacatttgtattcctgaaagacgaagagcacgcatttaggcatagttctcaaaaaacgatgctggtataataaaccacaacttaacgttctataaagaacgtgctgtcaacattgcttccgaaggagcatgcaggcttgcttggactcttcctcctcagcggaggtacccagcaccttgcactcttgttttttgtcgatggtcttgtggatctgtccacaaacgttgaagcagggcgggagaacgtcgataagtgtcaaggaattagtggggtattagtccgtttgaccacttgcacaggttaaccaatagcttacccaaactaagccttataacactttcccccccttaaacg

SEQ ID NO: 107 - DNA, 20591 bp, unidentified
  source 1..20591: mol_type = other DNA; note = Undaria sp.
gacaagcgcgtgcctggtgtttatgcactgcgataatttattgttgatgatcgacttagagagagagctattgaagtgtacaggacctacataggcgctacctgagaggtggaaggatatgccaaggaagtcctccgacttgcccatcatggattgggcgaatggatgataataacaaactcataatcataatcgtctctatcctgtaccgttgtactatatatggacctcttggcattttcaagtcgccagttgcgccatttgtgcttcttttccgcctttctactgaatgtctattcctccttccgcaagcgtagcgggcggcgccaagccgcccgcgagcgaagctctgtaatatatatgtaatagggtaaggtggccgcccgccgtaggcggcgggacggccacccggagatacgcccgaagaaggtcaatcaatgaattgaggatgagaagtgcgggaaatagagaggaggatgcaggttatgtctattaaaggaggaagtggcatcgatgatacatccccgcgactttgggcatgactgaattgaaacgcggtggccgtatcaggggcgatgaatgtgtaatcagtacgaagtcgttggtatggatgacattagataatgtactgttttgtgcggtgatgcaaacggaggcaaatacagcatagggtttaccttgttgcatgtcatcgtgatgaagtagtccggaggtcccaagtgacggaggatggccatactatatgtataacggcaagcatcaccaaccagtcgcgcaacgcagcgatttttcatgcgtttgtgataaaaatttaatgttgtcgttgctatacaacgcgtttcttttgcgttgaactccttggtgtgtatcgaatgaatgaagtagggctttcggtgacaatattcgactgggaagcgatgcgggtggttccgccaaaatagacgacacgaacgccacaaaataataggacccatgcaactccagttcaaccaaatgaatggcgatgcttttgaaaaatcttccttcatccaatatagacacttatgtgtcgcgtatgtattggcactgaaccgttcttgccacccggcgacatccagcacccccatcatgcccggcgaaggaagagaaataccaggggggtggagaatagctacgagtaggtaccaggtaaccccccccccttcttctttccctctccccaggtatggaaaaaaaggaaaacgtgggaggggaaaaacaaaacaaaaagggctcacaattgtgtcgacaacggtagtagtatcgctgttgaccccccccccccgagatgaaacagacaatcaaacccagggccacacaaaaccaaacggccggctcgcaagcgaagcaaaaaacataataaactcgtacggtcttcattctttgtaaattaacaagaggcaaacttgacacgacactgcagacgctaacctaccacaccaagatgggccggagtgcacttttcacattcacaccatgaccacctccgctttccgtctgatctagttttttcccagttctgcaggcctcaggtcggtgcttttctggcggcacattgcattgggaccgcccctccctcccacgcggggcagggtgagcctcctggcacgcgccttcttgtcgactgtaaccgaggtgaaagaaaatctgagggccccggagtggggccttgggcttcttgggcgtcggttggcggcgccaaactacacagcctcatccccgccgccgccaaaatccaacacctctgcagctgacgccgacacgcctgaacctgccactgcgccccccccttcactgccgccacgaacgccaacaatacctgccccataccaactccgcgaaacagcaggggaaacagcgctaccgacaatacccgcaatcatagcccccgtcagcttcctgcatcctagcacgcaatgcagcatgccgttgactaatagagatcatcgtattcttaacgatggcgtgccctttgatttcatcatagtgattcggaagttgttgggaggtcgacaagatcaaccggcccctcaccccgagcatcaggtccccacaatctcggagaatggtcgcttctcacaccagtgtctgccacgtcaagagcagagacccacccaggaaacatcgggctatccggtgaccagctggccgtgtcgctttagataatatcaaactcaaactgttcgtagcacgctccaatctacttcggcagtccgcggttcttcgcagccatcccaatattccagcgataattgaactccagcaggatcgagtgggccagcgcaggagaagcgcaatagtagcctgcggaggtagcgatgaaaacccttttaaaaaggacaaacagttacagcaggcggaaaacattttgaacaggtgtgcacgtcaggtccatcataacgcgaattacctggttgaccaccaagccgaggaaaaaactcaacatgttacaagcactgcaacaaacggaaccgtgacacaacgtatgtaactgtaacttattgctaggctgttcgttgagacaagctatatcgtgttagcaacactacaggaatgttcctactcgtcaatgttacagggatcgtctcgtggtatcacccacgagtagtcccacgggtatgtacgagtaggcactatgcgaggaggtttaggtattcgactacgagcggttgttactgggctgtggagagttggcccacatgacccactccactttccagcatgtctctccagacggaagtctcaataagataataccttttccccagaagctaccgatttaccaacacatcgcactttagaagcagtacaacgggatttcgaagacgatagcggcacaggagtaggagcccaccttagggtgcccgccacaaaccgcgattaaatggtcgatggcaaattcgaaagacggtatctgctcgttggccagcagcccttgtgcgaagatggtcgtcttgttctccgagtcgacgccaacaaaaaggcacagcttcatgttgtacctaccggcaggggggaatggaaatatgatacggtgatacacgggttggcacaaccatcctccatcgcatacagccatgtgcctacagttggcacgttgcccgtgccccaccgaaccgcgacaacctggaaggtagttttgctgcggaatataacaaagaggttcagcccccccgtccttgtcacgggcaaaaaaaaatgcagcctactactgaacgagccagcatttcgatgcacacatcatatccagggttaagtaacccccccccccccaacgtatgttgatactgtcgctcgtcgcgtcaccaccgaccagatgtcggagttgagcaaaagtagccgtcataaccactaacaacgaccgcggtgctcacctgttcgtcagacacgtgttgtcttgtattaccacgccgccgaattgtctcgccgaaatctgttgctcggctgtggaccacatcaccacagccagctggttgaagctgtccattttccaggtactcttgcaagtggagtccttcagcaatgcctcgatgagcaagacggcatccttcgccgtcccccacgagttgcgcctcgcattggtggacatattcctcacctgcgacaaatggtcacggagcaggtacgcgcggtcgtgaatgcctgatataggaattctgtgcttagtatcccccctctccctcggcgatgtaagactggatcaggaaatagtacaaaaggtatggctatcgtaggcgcagcaacggcgttagacgtccagagaagctctagcaggaaaacgaacactgcgtcccttcctgtaatacgagagcagcggtcaaagctacgcgtacagagaatgccccccctcccctgctcgaaaggatgcggggccagtggtcacattactacggcaagccacagctgtgtacaacacacaacaacaggcaccttgcgtcggcccggcggaccaagtttgaggggggcgatttccagctcgatcaatcggtgcatgtttaggaccctcactccccctgatgtccacgtcctgatctgaccctcccagtcccgttgaattgcggcaacatcaatcaagttgtcctggttcgcccgctgcgcaatttttggcacctcgcactccgggtttgtttgatggtcaagaatgacctgcgcaggcaaatacaaattcacatgatgcggaggtacaaatcaggccccttcgatctccgctataggcatacaggagccgcagatatgatgcattcaataaggattggtggacgaacaacagcgtgtgacttgcgatggccttgtagcaccagccacacctaaaccgttgttgctcgttcagtacaacgctcaccttcgttatgcgaggcggcgcatcctttgtccacgaaacgcagacctggaatagacagccgcactgaaacaacgaacgagcgccccgaacgtgcgccgaagagacgacatagacgaaagtaggacgcttcaggctgatggaaccaaactctaacctgctgcacccagtgttgtggaacaaacgcaagtctggtactacttgggctttaccttgacagaccaccccttcttcgagccggtgttgggtggtgccttgccggcgccttggcacttgatctcatatcgcccaacccgacttgatcccccaccaacctgattcgggattacgccggcgtcgtggggggttagcttcgaacacccgaccggaaacaaaaacggtgaagaaatacgcctcacctgttaccgaactacagaaatcccctcgacagcaacgatgggataccctaatcaacctagggctccaaccacgggcgccctgcaaaaacatactctcgtgctctattttgttcacgttggtaggcacctttttcccggtttttcggaacgttgcacccttgtggcctgcacgatgcaaggctgcacggatgccgcccaaaatcttctcccacgtctcctccggagtgtcgttctcatcaacgctgaaagagaaatctttcactaggtcgacgtgaatgtggtccttgtcgtcgtcgtcttctttgtctgcgtctggtatcaagaagtgttggggttcattgaattccaattatgcgccgaagatgggggggagtcgaacgacgacgcggtatagaaaacgtgtaccactccacaaatctcaacaaaaaaattcgttgagaaagcaccataggtggctggctgggcagtaggataacactttatgctacgatcgagacgtcatcgacttagagggggttttcgtctgcgcgccatggtcacggctgcggggcatccccattcccgtcatcaaaccaaagggaaattcctgcgctgggactcgtggctgtagggtcaatactaaatgtcgtcgcttaccttcgtcagagaagacatcgtcctggctgtcccagccgtctgtgccatccgagtccacgtcttcctcgctgccgctgctggtgtcatcggaatttcgatacagctgtggcgagtcgtgcaaagaagggcaatacaggaaggtagagctctagtcattatatattaacggccagcacgccaccttcatacccataccgctcgaacctatttttgaacagccaaaaccaagctgttcgggacatcctcaggagcctgcttccgaccaacgtagtccccacgctaccaacaaaacgggcacgtaccagcggggattcgaccacaggccaccagccatacacaccttctgcagcgctcgctgtaccttcttgaactgtttccaggcccgcgctgcagcaactctctgctcgccgcaggctttctcgcgatcgttggggccctcaatgccgtcgtctgtctcatctacagcctgttcgatagcatgtagagaaaacggcgcggagcacatcttacaccacacgatatatcggtgtgcgaccggctccccgccaaccaagcacagcaatacggccgggctcccctttttgcctttgcattttcaaccccaacacacgttgctcaccgcgaccaggctgttgagcttcttcttcgcctccttcgcggtggttcggagcgcctgtacgtgacgttcctgctcctcgcgccgcgccatctctgcggccgatggtccaggcaggacgctatcgtctgaatcatatcctggcaccaagtcagggtgagggcatattgcgcgcgttactctagccagcgagcttttattggtttgaacaatgtgctcacagcacgatttttttctttctctttgcccctttcgtgtaccttacctccgcccatcgacaagtcgtcgtcgctgttccagttcctggctgccttgctgctggtcgtgctagagtcgctgtcctcgttacctgggtcacccgcccccccctcccccccgagcatctgcagcgcgcgcgtaggacggcggctagcgacgctttcctcgcaggtggtacaaaacatggttacctcgcgcagacctacctctctactcgtagattgcttatgagcgagcaagcatacacccaagctgccttctcccagaaagatgaatgacaagccatgcgcaacgaacaggtgcgcctagcgctggcacacggcaataataaacgggaacctgcaatacccgccgaaacccttcaaacataccgtatgccagccaactacagttttcgcgaggacattctattggcaaccactacacccaccttcgccatcctcgtctcggttcttctcaaagttttccatgccttgtcgtacccccgccgtgcttttgccgccgccactcgtttgcgtaaaagccgcccgtctgcgagagacgtatcccctacccactcgtgtttgtttcgctccacgtcggcaaccctttgtcgatggtcctctgtcacagcctgtgcgtaattgatggggagatatgcaatcggatatcgatacaacttggttcgagtaacaacggcgaacggtgacctgacaggcccaacaacaattgaaattggtctttttgaaaccaaggcccagcaactataaaaataaaacagcaaatttcgagtaagatcaaacgccagcacacgacagcggcagttaacaaacaacgccccatcactcaccagcttcagcttgtgatacagcgtcttcgccttttttgctccctctctggcctgctcggccttctcactagctgctagaagcgcttctgccgactcctgccgagctttctccaccgctgcctctgctgaatcgcccccggtggcccctccgtctcgccccttcccaccttcgcctccctcctccttgtcgtcctccgcacccttctgcttgtcgtccccctgcttagtgtttgctttcgccgccgcggccgccacggccgccgcagcggttgcctctttaccgccatccgcattttgcctccgttcccacgcagctcgctcagcacgggtcttctgttcggaagcttcgtcctacacaagacaaaaccagcaaagcaaacggcggccaacaatacgaattggtggttagtgcaactatattctccattgtttcgccttgattcaaggtacagacctacacgagccggaggattggtgacgtgaacagcatgtgtcgcggtgttaaagcaggaaggatagtactctcagcacacgcattgccgagatttcgacataaacgccgatgaggtatggtgccacgtatggtgtgatttttcggcaccacacaaactcactttgcaccgtctctcagccatgaaccatggcagatgaacggtattcggatgacactcacatgttgcgaaaacatcggcggagcaacttcgtgcatcggcaacggttgacgtctggcacggtccttgctcgctatcgccgcgaagtgcacccatgtgtcaacgccgaaagttgaatcagcatcagtcgcggcgatagcggcgagcgctttctcttcgacgctgtgtgcgcagacgtctgtcagcacgattgcgagctcttcgaccaccacatccccttcgctgcccatcccaccacgtaaggtgatgttcgtacggtctgttggctggatccaccgagatttgcggttgtcaccaaaatcgcaacctttcttccctgccccttggctggctccccactcgccggttcctttgccttcaccttctcccgcgctagtttatctgccgggaccactagtttcaccgctacaccaagcgcctcggcagccaaaacaacaccaaggtcgccacaccaccttttgtttcggcaaaaccatcctacgttctccatgagcatcccagcgtagttgtcacgctcgtagttggcggtgccgtacttaacgtgaatgtgggctgtgaagtacaaaacgttcagatgaagggggctaccctctcccaccagggcgtcgatgttcaccgagctccaactgagcaccacaagcttcagctgacgccaacacttgtctaagccccacagtgccttgctcaacgcacgccaaaaacagttaccgtctcctgcaacccataacgccgcaaacgtctctcgcaactcaaccgggagggtcatcgttgccctggcgtcgtatgcctgctcgcaatcaaggatgcaaggatgccacgccgtttgttgtgtgcgaaaacaaggacggagctatgttggatctttcccacgagagggtttactggtcaactaaattcgaaaccaaacaataccaagcgcaattaattagacacgtgaacattcggagaagtgaaccgcgtttgtttcttactttttattttgttgtctgtgactagcataacaacacggtatgaattatgtctccggatcggtcctttcgaagaagtacggagtctccaaaacttccgcgagacgatggagaatcgcaggactcttgcgatcaattcagacaccaggagggcaccatcgatagttgtttgatgacatcgtcgcgatcagacaccgaacaaccaccggacgaagaatcgcatattgccgggtcagctcgtcaaaacaaaaagatgacctgtgcaggcaggtcgaatccttcaaagaaacacatcccgaacacgagatcaaggacatcggatcagggatcaacttcaaaagaaaaggccttctgcgaatggttgacgccgttctcgaaggaagtgtcgaagaagttgttatcgcgcacagggatagactgtgtagattcgctttcgactttctcgaatggatctgcaagagggggaatacacgaatcgtggttcaagaccaggtcatacgttcttccgagcaagagctcacagaagatctcgtggccatcatccatgtgttttcctgcaagctgcacggaagcaggaggtacaagaacaaaggcaagaaagatacgtctcaaaccacaaaaggagcaggagaaagtgcttcggaaatggatgaactctgctcgacaaacctacaacgaagccctgcgactcgttaaggccaagaaggccaaacccaacctacttctgaataaactcgtcgtcacctcccatgaaacggacaagaactcgagactggaaagcatgaaatcgacaccggctgatgtgcggaagtcggctacccgagaccttgtgaagaacttcaagagcgctcgtgctgcgtacaaagctcggcttcagaaagtcaggtcgggaagggtgaggatcaagaagatgcgcaagtcggggaagttcaacgggagacgccgctacaagaagaggaagccgttcgaggtgaagttcaaggccacgcgactcgcatccgatcccattgaggtcgaaaagaaatcaatctcttttgagagtaacatggtttctctttttggaacaagtaagaaacactcactcgaagttcaaatgagcgaggtgttctcggaagagtctggtcagcacaagccgtctcaaagctgtaggatagcctactgctttggcaggtggtacatcatcatacccgaacaagtacaggtcgacaaggcgaccatcgacacatctacggaaccacgtgtcatcggcatcgaccctggtctttaaacggtttttacgtgttcttctagcgcgggagaagttctggaagttgggatcgaaacccggaaccgcttcgagagggaacaatcgaagaagaactcaatcaccaagaagatgaaagatgcagcgtgctccaagagaaagagaaatctacggaaagcttggtaccgctgtcaggcgagagccaagcatctcgtggccgacctgcactggaaaaccatcaagcatcttttggatagatacgacgtcatcgtggttggaaagattggcacccaatctctcgtgtccaagacagggcagtctgccagcaacaagaggatgttctcgtacttgagccacttctctttcaggcaacggctgaagtacaaagctgggcttgtgagcaaagtggttgttgagcaggatgagtcgtacacttcacaagcgtgtttccggtgtggccaccttaagaagaatcttggtccagcaaagacttattgctgtagagagtgtggacatgtgatagatcgagatgtcaatgctgggtacaacatcatggtgcgctgtgcatccgagcaccatgcaacggaaagcatcgttctcggcaagcgcaagtcttagatgtgctaacatacagggcctcgtatacgctctttaaagtagcttaagcatgaatgtgcgtccagcgtaagatcgaagctctcccgaggctttagaagcagaggggatgagaatttctggcggtatccacttcgttttcaaatttggcccgtttttaataggctgtttgacaagggttggcgacgtttggattcaaagctgtatacggcacaccggtgattcaggcaaaccatactgtaaatacattggattcaaaggtggggtatccgtacagacaccatcaattacaggagtgtcccttcagggttggtttggggggctcgggtcacatcatgaatggaaacttgttgtatgccggagggatatacaggcagcaacgccgtcgctaacgctcttcccctggttgctagcgctgttccccttctgaacagagtgacgaaaactaatatcaactcagcattgcctacctcatcttccatggcaatgacccccgacaaagctggcaccacgcctctgcgacagccgaaaaccttttgccaagagcaacaagtgccgacgaactcctccagcgtcttcatggcggggccgcctttcccttcctggcccaccacgttggcgatcatgctgtcaaggcgatggagtagtctccctgcctcctcgtctaacatcacataaccagcggcctggacaaacacggcaagcaaacgcgccgccagtcatggcacacaggtcttagcggatagcagtagcagcaccaaatgactttttgcaacacaaccaaatgccgattaaagtacttacgattctccatccaaaacatgagccgcctctccacgcggccagccatggcacacaggtcttggtggatagtaacagcagtgtagcaacaccaaatgccctctttcaagtcattacgattctccatccaaaacatgagcggcctctccatgtaaccttgaatacgaccacaaacgggtttcatcactgccaggattttgaaatcacccacaggctacaacaagtggccgccgtccacgacacagcccatatacaacagctcacctcctcctgggggtttgacgttggcaccgcggcgtgactgctactttccctgccagtatatcaggcccagtatatcatgttacaagcccagtacggcacaagtcagcattggtacccgctgtggagcaccacgggactacatgaacatactccagtatgacgaggaggagagagaggcgcggtatgtgtgaacctacagcagcagacattttccattgcaacgaacaccgtacccgtatgtgtaatcaggcccgtgtaatcaaaacatgcgatgcgctactttagtctggcagtacatggtagtacatggcagtacatgcgtggcctagcgctgcacacacaagccttgagtgaagtgggttagtgcgtggagaaaatgactgccaaatagattacgtggcatcatgtagacttcgtggtaccgcagtacagaagcagtagcagtagcagtagcagtattagcaatagcagtagcagtagccagtagtagcagcagcagtagcattagtagcagcagtagcagcagtagcagcagtagcagcagtagagtagtgatagtagcagcagtagtagtatagcagtagttgcagtagtagagtagtattagtcgtacatacagtggtggcagtagcagccgagaggtctgcaggggtctcattcaaacgcccccaaaacgcgcccgcgaccaagacctggacgcatttagtaccttcgcgtctagaacaaactctcttgctttcgacaaatcaccggagacgatgccggcgtagggcgcgtgctgtgtatgttttggggcgcgcaggtacatagtctacatcgactacatgtagatcttctatgttgttttagacaggcacatgatatattgtaagttatgtggtccgccgaaggaaatatccggtgagatcacactaccaggtcatgaccaaagcgtctctagacaccagggggggggggcaagacggttgccgatggaatcttgtggcacacttccccacacccacccttgtttgctgctggggacctccatctctccggcggcgtgtggaatgctcctcgatttctggctccgggacgctttaatttcgacctagaaggcgcgtacgactcgggtagctttgctgtctatccccgttgctggtctaccgctccttgtcgtgtgtatggcagcagcagccagcagcagcagccagcagccagcaccaagttttcaaacacagcgaaccgtaatacgatggtggaaacccggggattattttatatgtccccgtgggcgaggtttagattccgcctatgtctgcgagattatcactcccctggcagattctcaaactttgcctcgcatggcatatttacggcggctgccggcgaacgtttagctgtgctggctgtgtgggctaaactcgcttacactgacaggtggttttgcgccctgcttgtccttctgaacaagccgtggtttaagttgtcgccccttctccaccctgggggtaagtgccttcatgtttacgtcacagagaggtagccttaattcccggtgctcgtcgatttagtttttacttcgattttttaacaaccggcactctccagttagtctgcactctcaagactatgcaaatccgcatgtattgtgtacaaggtatatattccactgctgtacgacactccgccagcaaccacccgatattccaaccccgcgcaaccgccagcaggggtgacagcagtcgaccgctgtcccataaacgccaagcttaccgctgaaacttacttgttatgcgtgcgtcttatccccaactagagagtactctcccaacaacaccagtaacttacccgtacactgggaaaaaccgcatttgtgtcttccgggctggatgcaattccccgtcccgccaagcgatattgacaacatcctttagcatagggatacaggtacctttcattacctttcattcagactgactcacaaatttatgttaggccattgtttatggtaccctgatccaggccccattgttcctgacattcgtttcgccgcctgagggccgttcttatcggagagctttttttgtcctaatttgcataatttgcataattttccacatttcgtcttaaaatacggaggcgttctgtcataatttaggaaattcagccctaaaatatatggaaaagttaacaatcacaaattaggaaatcctgtcgtcgatttccatatttcgaagacaatcagtgctccgacaagcgccgtggctcaacgctgggaccatcgagtagcttcaaacgttgaccagggtggtccaacgttatggccgatggaaggaagcggcctgggcctccggaggactcatcctcgagtcggacgaagcaacgattcagccttcccaattatccagacacgaggcgcagaaacagaaggctatcgctggtgtcctcgtcgcgttcggcatgttcctgacagcaggagctacactctatgctcccaagacacgggcgcctatctacgagccgccccgtatgacatggccagagttcagagaagatctacgtcggcgcaaggctttccgcaggactgttcgaatgtccttggcgagcttcgtgaagctcgctgacctgcttcgtccagctatccaaaagaacgagcgctttggaagtgagtatcacgtgaggtaccctctggtacctggtatacgagtacgtagtttgtcttcgcatcccaaggctgtaccctctgcagcctagctacgttgtaatgctcagcactcgcttgcagcatctcccatctaccataccctctgtatatgatagtttgtatgcctggtacgttgcacggcaactcgtgctgctgcaaggcggtatgtactcatgaactaaaaaccacctgtacatacgctaagtaataaaacatcagctgtgagatagatttttcacaaaaaatcccggccataggacacatggtacggctacgagtacgtgctacgtacatacgagtacttgataccggcaccaggtacctggtatacgagtacgtagtttgtcttcgtatcccaaggctgtaccctctgcagcccagatgcgttgtaaggctcagctctcgcttggagcatttcccatgtaccatcccatctgtatatgacagtttgtatgccctgtacgttgcacggcaactcgtgctgctgcaaggcggtgtgtactcatgaacaaaaaccacctgtacatagtctagtcaaggcaaaaaaacataagctgtgagataaatcttccacaaaatcctggcacatggaacgactacgagtacgtgctacctacgagtacgtgataccggcaccaggtacctggtatatgagtacgtgggtgtatattttgtggtttacggagggagctacctggtatgtgttagggttatggcagctgttcgtacatacagtagcactgcaacagcagtagtcgcgttaggcaatgcaagggtagtgcattgcggcaagcaggagtgcgttgcggcaggcacagcaacgggatgagcaatgctgctgtaccggatggggttggagctcgatcgaggtggacaccaacattctatcgtttttgctcttacccaggactgcattgcgcgaagcatggagctatcgaggtggaaatccggctggcgataggcctgcgaatgctggcggggggttcctacctggatatcgcaccgaggtttggcatttcaccgtccacggttttcaccatcatggagaaggtcgtcgacgcgatcaacaacacccctgaagtcggcccgttcttctttccgcagacagacgaaaagtgccgattttttgccgcgggattcaaggtgagggtacgtgtactattaatacaacagcaacctgtcacagcagcagtagtctatggcgtagttatgcaagctgtacgaaagagattgaattatatagatatggtttccgaaggcaggcctgcttatttcttcgtgaggaaccttggttctggcgtcctgatgtgaccccctctgaagcacgcctccccggccctgttcttgttcgtccatatgtcaggccaagagcaccaacggaatcttcgatcatgttgtgtctgccacagatgatctgttgatcaatatgaaaacgccgcctgcaaagagcacctcccacaccgtatcgtacttctcaggcagcaagacgggattcggctttaacgtacaggcgacgtgcgatgccaactatcgcttctgcagcgtctcgatcatcgctccgggggctgccaacgattggtcggcgtggacccgatcttctgtggcaaaggcaactatgcgccttccagacgggtaccacatcaccgagtatgcggcgtacccaatcggcgacaagttgctcacgccgtaccccgggaaaagcttgccaaaggaccaggactccttcaacttctacctgagccacctgcgggtgaagatcgaacagtcgttcggcatcgtcgtgtcaacgtggggcattctgtggaggcccctcagtgtagggttcgcaggccggactgacctgatcgtcgccctcttccacctgtaaaacttctgccgacatgagcaaaccaaagtggtcgcgtcggaagaggactacaagacagaaaaggggcgaatcctactggcgacgggcggggttctgccgcctgcgtgcaagagtgcggtccaaccggcaggcccagccgccaaacccacgcgaaacagcgaaactcccacgcgagcggcgaccacttcgctcttagcctacaacagacggtttcgcccgaaggagaatattctcaggaacgcctagattactacgcgttgtataatgcgtaggtagagagtttgtcggcatccgaacgtcgtacggcggggcgattgtgcggtacaaggaggatgggaatggcgtgtggaagatgggaggtgggccggagtataagctgttggagatggacgtgatggtcgtcaacgggtgagcgttgggccagaaaaaggacgagtgtcaaccgtggtgatgaacgtctgatggcatggccttaataatactgaggcggagggggggggggctttggttgttggattcgatacatacatctgacggcgtggtttttctaatttccaggtggtgagttcgaagacagctgcctatacccccccccctcccccagttattattgtttgtcgagcgtcagaaacaagagccccacccccccctatcttggtttgtatattatcgtgtaaataatggtgtgttttatcgtgagagcaccccggtgcagccggccaccgttttgttatttttgaataggagtgcagggtgttggccgtcgagcatcagaaacgaccccccccctcatctctatttttcaaatcctgcctgacgaagcagtggagggtgtaagtttggggtttgtcgtgagagtaccacggtgcagattgcccccttcttttttgtttgaataggggtgcagggagttatttgtccatcgtctgtaacgaacccatcccccgctctcgttttttccctcccagtctggtggagcggtagagggtgtaattttgtggcttatcgtgagagtaccacggtgcagcttgcacccgtttcttttttataggagtccagggtattggttttggtcccttcccccccccgttttttcctcccagtccggtcaagcggtggagggtgaaattttgtggtttatcgtgagagtacaacggtgcagctggcccccgttttttttgtgttgaagaggagtccagggtattggtcgtcgatcgtttgaaacaaagcccaaccctctcgttttttcctccctgtctggtcaagcagtagagggtgtaattttgtgctttatcgggatagtagcacggtgcagctggcgcccccctttttttgaagaggagtccagggtattggttgtcaatcccccccccccaccccaccccgatttgttcctcccagtctggtcaagcggtggagggtgtatttttgcggtttatcgtgatagtaccacggtgtagctggcgcccccccccctttgtttttagaggagtccagggtattggttgtcgatccccccccctcctcccgtttttttccccccagtcgggtcaagcagtggagggtgtaattttgtggtttatcgtgacagtacgccggtgcagctgccctccccttttttttatatataccaattcagggtattggttgtcgatcgtccgaaacgaagcccccccttccatttttttcttttcagccagatgaagcagtggagggtgtgagttttttttttttcgtgagagtaccctggtgcagctggcccccgttttttttcaatgagagtgctatggaacctggtctctcacggggtcccggagtcgaagtggcgagggtggtcccggaggtctggtactcgtcgcggatggtcggtagtcggagcggagaggtcgttgcagagctgaagtcgaagcggagagggcgtcgcggtgctgaggtcccttgacgatcgttctcaacagcgaacgcgactgaaaacctttctttcttatatgtagcaaggagatgctaagccagagctagagtgacggtgggcatatgcccttcgtcatgcggcgggatcatctttcggcagctgaccttccggggacgggtcaacgccgtctatgacgggtgacgccgttcgcgacccgggatcgtgtattgcctgaccggtgacgtgtcttctcgcgcatgcgtgtacgcgatctacgataggtatctacgaccctgtcttccacagtgcaaggttttgtttgtccattgtcagaaacgtagccccccctcccctaccatttccctccgcgggtctatgatcatacgacttcgaccatgcacgatttcaacccctgccgccccaccccccccccctgcccctttcggtttcctcccagcctcataaacgaatggagtgtgtaatgttgtctgttgtcgctgaaggaccccggtaaagctgcctccttgattttttataggagtgcctgcgattatcgagcgtacgaatagaaagtgctctttcccccaatatggatgcgccagcagtatttttattctatgatatatcgagggtacatattcgtttcttgtaatgaagaggacgccggagaaccttccgcctactccttgttttccgttattcgtttgcaacagagcggtaggttgccgagcttttacctgtaagtgcccctttacccgcgttttgtgctactcggtttttgatggggagcatggcgtcggatgcttgcattaatatattaagcacgtggaaatgaatacgaggggtactgacgacgtcactggacctaataacatctgcgtttcacaggatgtgttcgcgatacgacgacgcatagtagttactggagatcgtaataaacatacttccgcgccacgatgacccagctcaacgacttcaataggattatgagggctcctgcatcggattcagccacgatatcttctgattgaaacccacacgtgtcccaagctgaaatgcatacgttcccgagggaaatattttctgatactggaggggcttattagccgatatattactgtggtttgatgggacaacaaaccaagacagggagtactctcgcttgccaatatcgaataccccgtatgctctataaacctgcacgtgaaaaataaacacgtagtgagctggggccagctacaacggggtactctcacaaccaaactcaaaattacacccgccactgctcaaggagactgcgaggaaaacaagcgggggcgagggggggtgggcttcagttttgacgctcggcaacaaaataatctttacacctaccaaaaaataaaacaggggccagctgcaccgtggtatgctcaagacaaatctcaaacttgcaccctccactgcttgaccagactaggcggaaaaaaacgggggggggggacgacaactaataccctggactcctattaagaaaaggaggggggggcgccagctgcaccgtggtactatcacgataaaccgcaaaaatacaccctccactgcttgaccagactgggagaaacaaaacggggtggggggtggggggatcgacaatcaataccccggactcctttttgaacaaacaaaaacggggcccagatgcacaagagtactctcacgataaaccacaaaattacaccctccactgcttgaccagactgggagaaacaaaacggggtgttggggggggggggatcgacaaccaataccctggactcctataaaatataaacgggcgccagctgcaccgtggtactctcacgataagccacaatgtttcaccctccactgctccatcagactcggaggaaaaaaaagggggggaagggggggggtgggaatcgacaaccaatgattctcgccttgagcacgacaggcgggattgaaaaaaggttccccggtgcttgtcggaaacaatcgactccagtaccagcatacaacggtgcttcgacctccgggtgttgatggaggacgcatcctccgcgacatcttccttcctgatgacggcgagcacatcagacgccttgcactgatttcctccgtacctcaacgtaatgttttcgtcgacagagtatgacttccccttcatagccgcgcaaagcgtaagaacgaccccccctgggatagtttctgactggaccggtgtgctcgctttgacttgacctgtgttcaaaacgtagcgagcatcggggaaaggcacaaactttaaagtcatggacgtgtgacgtaaaatcgggctgcgcactcgaacgagtagcctgaaacagtagagataaaaaaactgcgctatggagcagtatactgggttgcatcagaactggaagcgtatactggcagagtggaccagtacaacacaccaccagaaatataataccacctggcaatgtat

SEQ ID NO: 108 - DNA, 18323 bp, Rhipicephalus sp.
  source 1..18323: mol_type = other DNA
agtgttctctggctcagcagccaaagcggttccgccgctgtgcacgacgaaagacgtatgcatctagatagatagatatactcaaagtgcattcggttcgccaagaagtgttgcgcataaactaaacgaagattcgagaagctccacattatagcagtatgaatactgaaaaaacagcggagctggtgacacatgcccgctgttacggcgcgacgccaacacgctcctgaaggcgccactgctctgaaactcgccgctgcaaaggtcactggctgttaggtagagtatgtttctcagctcgcgactgcttctgcgcagagctgacacagaacacctagcagtggagctgagagacgagcaaacaagacgatcgtgagttaaagcaagctttgtgtacagtatagaaatagaggcgctacatattcggcactggggcagacagcttaggaactccaagagccgagatgtcttctctctgacactacgtcggcttctctatgacgcatagctcgactgcttatcgacgcaccacttggcttttttttatagaccccgggtcatccattacgtcacccaacgtccaatcagaagcgccgctggccgtgatgtcagattcctctagtcaagaaccgccactgggttgtatcatgatcctcgaatccggagccgctgcgctgggttgcacccaagaaggagtgatgttgccacgcgttgggtaaggctcgccagactcgacggtgccacttgcttcatgggcccgtgggctgaaggagctcgccgtgcgttgcgtaagacagaccggcaccggcgcttgatgacgtcgttgagttgatggcgttggggtgagctcgctcgctggccttgacacagattgcctttgcagaggcaatgacgttcgtgtggactcccaggaacgccacttttcctcaccctcgcttcttttttccgccgcttcctatacaaaactacgctatgctttattctcatacctactgcctttcctcctcgcttcattcgtcctcgtcttttctagcctttcccaccccttgttgtgccttaaaagataatgctatatttcactctctctcctcatttccctcctcctcacactcacgtcacacttcaccctcactttctataccatatagctgtgccatgcttttcccactcccttcctgctttccttccgcacatacctcctccttacccacatttcccttttcaaaccttgcagtactatgcatggctatgccatgcactcttaaaaaaaaagttgtagtacttactaagttcggattactaactgcttgtcacatacgttactaaccagttggtaaaagagcctagtaacggggaggttagtaaccgttactacctccaccgttactaacgcaatggttactaacgtaggtagtaacggttgctaacaaaaaaatctactaggcgcaatcatttcacctcacaaatcacccttttcataacagtcctattcgcgagcatcaacattttgatatatcgtgcactgagtaattatgcacataaagccgtaaaaagagcagcacacatacacaagtccacgcgagaagtacagttccctaagcggtaccaggagtatttagagctccgactttggggaacgcagctggtgccggtgggcggctatgctgtatataggatgtatatttaagtaatgagtttttatttgtacaacgtacagtttttttaggtgagcgaggtaggttttcgtagagtaggtaacttttaatcaaggactttttatcaagattaaaaaacaattagttatgtctattttgcataataccacctgaacacggcctaatattaaggcataagactaggtcagtaagcctgcttatattgcctcaatgaacttgaatgcatccccgtgctactaaataggttgttagacgctcgtagtaataacctcaaattttttttaacaagttcattaagtacgtgcatgacaaaaagttactaactgtgcgcaaaacgtagtaaccgttgtaaccttcaagaattaatttgctaacgtgggtagtaaaaggttagtaatggcacaggaaggttagtacagctgctgttataacaatttgctcgtggttactagcttttactaacttacttttaatagtgtgttgtaggagctgcaatgcacacccgctttcagtggcgcaaattgactcgcccgacattgtgccaacgccacaacgagtgaaaaaaaaaaagtgtcggttgcggcacaccgattaccaacgtacctttttctggcaaaaccacgggcgtgagttccgttggtgggtttagcgagtgcagaagagccgccattgcttgttggtcctccgactgcagtgtttgtcatttccatcttttgcgttgataggctggaaaaaaatatgcggaaaaaataacgcaaatggaatgctgatatgtgagctcacccttgcttactccgaagcgcaatatataaagtatttctctgcttaacacctcttttacgaaacaactcgaatgggtgcagaaccagttctgacttcaggccctgacttatttgtatccgtttggccaatatagctaaaaaaagtgcacaatttgcattaatcgtaatgttcttttgttaatctaatgaacatctgtttcatataatatgatgtgtaattcttgagatgtttagaaaatggtaaaattaacatcctagggcttctttggaaaggatcgccttactatgtagttatattctcaagctatacgtatattttctattcatattcaacggctggcgaatatattttgcagctcaacatcggcgacgttaatgaagaagcattttgctaccttctgtaataatcaaaatgactcccgttaataaagcctgcacaaaatgcgttttgtgcgtcgtcttgtcagtgaaagatcatttttgtacctggtgtctcagttaaaatggctctcaaggtattaatcaagatcacacaatgtgctctttggatgatcttgttcttttattatcacccttccgcccaagttctccgaacaataaaagccgagtttccaccatcttgaaagttgctattgactaccgttatcgctgtgttatcagaaacaaacaaggaccatatgagctgtgatagttggctctttctaagaggaggagaatgtgtgggtcaacgcgtcacattccttagcatacgccctggtgacgtcatctgtggaaacatggcataccgccctgtggtgttatcttatagcgagaaagtcgcgaaacttagcgtcttttcagtcgtgctagcgacaattctatctcttcgaagtcttagcgacttttttttcggggggggggggggggtcaacatttgaggtagaggtagtttctacagcagagatggaaactagcaaactgtcggaacagtggaatgctcggaacgagtttcaatgaatcaggccaaagcatacaggatcatatttgaacacaacgcacgactacaagcacacaaaaggagagacataccgcagcgctctcctcttgtgtccacatagtcgtgcgcggtgttaaaatatatgttcaagtactgtcaccaactggcccagctttcagcccttttgcatacaagatcaagctgcttgtggcgctgtaatctttagcgtgcaatgtggccgttccgggcactccttctgttcctgttagagagggcaaagcagctcggctgaacgcctcacggttcaccgctaacggtggactatacagctgctcactggctcgcagtggcgtagccaggagctagcagcgcattgattgattgattgattgattgatgattgattgattgatgattgtatggggtttaacgtcccaaaaccaccatatgattatgagacgccgtagtggagggctccgaaattttcaccacccgtggttctttaaccgtgcacccaaatctgagcacacgggcctacaacatttccgcctccatcggaaatgcagcggccgcagccgggattcgatcccacgacctgctggtcagcagccgagtaccttagccactggaccaccgcgcggggcaagctagcagcgcagtccaacttcattcagaacaacaaaaaactgatttcaaatgttcattaaatgaaaaataatctcttcacgtggtttatcaagtcaagaactactgaagcaggaaaaaaatcatcatcgtttagcgacatttgtataaattggcgacgtttcggaagcgttttggcgactatgccagtaaaagttaacaccactgcccagcggccgaactagttaaataagtcacagctttgggcaagtaggtggcgcgctggtcgccgaagagagagaatgggcatgattaagaagtccgcactagagacctatcgaacctttaagcaggaaattgccaaggaaaggatctatatatgatagtactcggggtagttctctactgtgttgaggccaggacggagtacgtgcgaaccaagacatatcgggccaaatacgaaggggtagacacagtatgcagtgcgtgtggagaggaagaagaaactgccgaacacttgataatgttctgtaaagggcttcaccctatagttcaggatttggcgcagagttttcaaagcactggggtttagggaccgggagggcaaaataaactttaagcgggtagacttaactagaaggaggttatctgattggtggctaaagtcaaggcacgagtgaaaattaaactcttcactgcaaagtacgaatcctcaaactcactttttaaagaaaaaaaataaatctagtttttggttcattaagtattacggcttggtggcgctagccaccgcccgatctaaagggtacagcccatcatccatccatccagagcggacgcgcatcacgtcggctctcgtcttccaagaactatttgccagtgattttcggtcattcagcccatgaattttacaacaacgcgtgcggaaagtgaccaggattcctgacacaccaaatttcaagttggaagggactttttgccggattcgagaggttttcaacccgcgcccctttggcccgacgctcacgcaagccggccacccgacgagacgcgctgagcgtctcctctgacgcgggcgctttcttcgcgccatcaacgatggaagtccgagtgaacggggaggatatctcccccgaaaagtttctggagggcacggattggtgcaccatcatctaagacccaagttaaccgcgcaaacgcgcagagcaacacccagaacggagctccctcctgcaccggcgagggagcggactgcaaccgacagcgttcgcgtcgacaaccgcgtaacatcaagcagcaagtcattagaaagagcaaatgccactactccccacggagcgagttcaagatcgtgatgcgaccacgaggaggcctcgacgtggccaccaccggaaccgtgccgctcgcaccggcgatttaccgcgcggccaacgtaccaacgcatgaagcaggggaggacacggtgtgttccaacaaccatcaaaacatcatcgtcgtgtgagcacacccatgcctctcacgccgataagtacagcagcttcaagccatcaccatcggcgaccaccaccacgaggttagtgcgtacgagatgtcccccgacaacacggtgaagggaataatcaagggcatcccattggaagaagacgccaagtccattcacaccagcgtcgttcacgcacgtaaccttactccctggcagccaaacggctcagtaacaccacgaccatcatagtggcgtttgaaggatcgcgagtgcccacttacgtcaattatggcggcgctctccttcgctgcaccttgtatccgcaagcaaatcgacgtgtgtcactgctgctgcggagacttggtcaccgcatggacgtgtacacaaagcccaaggacaaagtgtgtcgtggttgtgacgcccctaacccaggccccaaccaccagtgttccccccattgcaagctgtgcgggggcgcacacatgacggcggacccaactgccgtgcaaggtagaaaactccctacatcgtgacgaagagacaatgggaacgacgcagggccaacgaggaggcagaggccactgccaccaactattccaccagcaggccccgctcaagatccaggacacccagtcgaagccactcccgatctcgtagccgcacaccgggaccccgaaagcagcagcaacgccgagctcgcagccgaaaacctggccggaccccaacgagggacgccaaggcaactgagtcggtgagctttgcagatgcggtcaaaggaaaacgcgcaacaaacgcggaggctggcggcaaaacacacactaagatagaggcggagatagctcagttgacacagacgatacaaactatgcaaatggaaagcatgcaggcacagattcacgcaaaagacgaactcatacaaaagctccagtctgccgctcacagcgagactgatcaacaggcaatgcaggaaacacaagaacttattgaggacggtgaggtcgacggccatgatactaaacgcggaccggctatctcccttaaaaggtcagtacgttccaagcgtacgcgcgcagcgatagggacacgcgagtgaaagcactcgaggctcgcgtgagcagtctcgaggaaactatcaccgcgactatcacgcgtacgattcaacaaagcttggagagcatttatctcagattgtccagattagaagctgccaacagcacgctggtgacgtcgcatagcgaagcggcgccacacatgtagcaccacataaccatggcaagacactcttcgaaacaaaacatacaatatggcagtggaactgcagaagttacaaaaacaaacgagcgcacctacaaaatacctgaaaacaatccccgaccgcccaggcgtcatcatactgcaggaaacaaacggccccgctaaattttcagggtaccagtctataacaggcaaggcggagaatccaaacgtcaccacactggtcaagcgagagctcacggttatcgaacacgacacccaagtcaaggatattgaaaacgttctcgtagagctaattccaccgcctaatacaccctaatgcatcttcgtactcaacgtctatagcagtccgagatgccgcaaacactgcatgctttcacgtcctcttcaaacgagcactcgatatcacccaggggcaacaactcttcattagaggcaacttcaacgcggtgcatgcggcgtggggttacaaacacgatcagccgaaaggcaggcatttgtgggaaacggcgcaactcgccggcctcgggctggtcactgacccagcggcaccaactaggcagggcaacagcgtcagcactgacaccacgccagaccttacctttacgtgcaataaacgaaaggtgacttggagaaacactatgcaagacttgggcagtgaccattacattatctctatagaagcagaaggtggcccacaggaacacaatgccggtcgccaaatgaagatcactaattgggaactactacgaaaaaatcgagacaagcaacagattgaagacatcaaagacattgagcaatggaccgagcaacttcggcacgacatcgagagggcgacgaaatgatgccgtcaacagctggacttgatagaatagacacccggttactgcacatgtggcaagccaagacccaactgcatcgccgttggaaacgacaacgatataataggagattgcgaaaacgaatagcacagctcaacaaagaaatagaaaagcacgcacttaacctgcaacaacagcaatgggaagagaaatgcacgcatatggatggtcagctcactacgagtcgcgcatggcagatactgcggtacctcatagatcccgcgaacaccaagacctcacagaggcaaggcatatgcaaaatcatacacgcttacgaggaaacggagcaagatttcctacgggaagcggaactccattacataccccgaatgcccccgcaagtacatccggactacaggagagaaggcaacgccatcctagacgcagaattctcaatttccgaaatcgaggcggccctcgtcaaactcaatgccaagtcagccccaggcctagatcgaatatcgaacagggcactgcgcaacctcgattacagattgctagagaaactcacagattatattaacgagtgttgggtgcgtggaaagttaccccagccatggaaagaagcgagctcatactttaccgaaacccggcaagaaattgcagctgcagaacctgcgccctatcttcctaacatcatgtgtaggtaaactgatggagcatgcgttcctcaatagactaacagattacctcgaggacaacaacctattaccacacacaatgattggattcagaagacatctctccacacaggacgctctcctgcaactaaaacatcaatcatagaaaatcctgggtgctcaacaagagccatccttggcctggacctgaagaaggccttcgataacgttcgtcacgacgccatattgaacgatagacagattgaagctcggaatgcgagtgtacaactacgtccgagacttcctcacgggaccacaaccacacgcgtgcgagatcaactagaatcaaatcaaatcaacattggaagctcagctacaccgcagggctcggtgatctcgccggtgctcttcaacctcgtcctgctggggttacccgagcgattacatcaaattgatggactgcaccacacgctatacgcggatgatattgcgatctggacgacaacaggcagtgacggagagatcgaggattgcttacaggcggccatagaatgcgtggaacattacctcgtaggcacgggactcacctgctcggccaaaaatccaattactgctatatagaaggtgaaaaagggacgcccgcccaaagactacgtaccttcagaaaaacaagaaatcaaactagcatcatcaaatggctcaccaatcccaatggtaaagaagatccgttggctggggatgagtgattgagcagaacggcggcaatggtgaagcactgcgcaagatatggcaaaggcctaccagcacgatgcaactcatccgacgcaatcccgaacaaacatgcgtgcatgacgcgaaggcagcgtcatacgactcatacaagcctttatttccatgtacacggcaccgtttccaccaaatggacagttgcggaaaaaagacaagcttaacgccctgatacgcaagacgtacaagttcgcgttgcgactggcgcccggaggttagcacccagcaaactcctaaagctagggttgcataacaccctcgaggaactcgtagaggcgcaacaagtttcccagctcgagcgcctatccaagacccgcccaggccgacggcgcctactcgaaaaacttggaatcacgtaccatacgcagcactgacatcaaagtcgaaattccaagatcggtacgcgggcaagtatacgtacccccattgccttgcaacatgccccccaacaccatacggaacggcgtaaagccagggcacaacgcattactcaaagctactccaacgacactgaagcggttttcactgatgccgtgcgttatacgaataaaaatagtttcgtggtggtatatagttaccggcaatcgcggcaagtacaaacacaagcctcactgttgtttgggactccgggtcatgccggtctcgttttcggtagctggccccgtcgcagaatccatcgtccaacaattcagcgagaaagaagcgcccgaacgaacgacagagatttatttacatgtggagaagtgatcaactgatccaaagagagagagagatacaaaacgtcttcggcattttatagcgtcgcgttgccaacactgggcgcattggtccgcatcgtctagccaatacggtggccccggcaccacgggccacgagggagggggaaacacacctcaccaacacatgggagtggcacaacctaacacgatgtccatatatgtcacggcgccctaaaaatgccccaaacatggtcacgataacgcacagcagattacggattctcccggcgagaggggggagcgtgaatggggaggtgggggtcgacgacacaggtcggtcaagaaccggttcctccccgcaactcctcttgcttggttccctaggggccggtcgtaacactgtgaacatggcacacgctgaagcggcagaggaagcggcactggcgctcacacagaccaatgccacaaacgcgattagtgattcgcgaaacagcgattcgcatttgccaacgacgcatctcgcaagaggtgtttcacatactccaacgacatccatacatccaggagaggttcgacttcgatagccgaagggcacctgttatggatcccggcacacaccggactgagcacccccaacgaagcggctcaccgcgttgctcgaggcctcactcaaccgagcatcgccggaggacgacgagcccccgcggggaactgcaggacatctgggcatgggtggatcgtatgactaggttcacgacatcaccacacattaccagttacaacgacgcatatgcccatcccctcacgaaaggctaaacagaacgcaagcggtacacttcagacaattgcagattcataaagaaaaccccagactcatgcacgccatgtatccagacatatacgctacaaacagatgcacgtcacgtggcgaggttgccacccttagtcacatgctgtgggagtgtcagggcctaataaacaattcgaacgattcatctcactctttcaccgccagcctccgctcgcgttggaaggccgcactgctcagctcgaacctgacagcacaactctgggccgtccagcgtggctgaggaagccgcttcgagacaaggtctcggaaccgcatccgcggtgggtgcccaggcccactaaaaacgccggactcgaatcgtctggattcgacaataaagtttatgttattctttggcgcaaaggtgaaaacaatgaacgtggtagcaattattggaaggtcacacccagaatggcaagcaaatcgaaacatgcgccgcaacccttgcgaacaaatgacgcacgaaacgtactcacaggtacagatgaacgcgaataagcgtttcagttgttacttccttgtgtctgaaaagcgtgctcttctcgcagatggagactgtgcaatgatgatggtggtggttgtggttgtaaagaaaaggaaaaaaggcacctaatttctgtctgtctcaggggcgacacggcgcaggtgccttataggggtgggaggaaggagggatagaaataatagaatgaaatagataaagaaatagagaggcaagcgacggacaaataggagataggaaagtggggatccgatcgaagcagtccaatggcgggggcataccacaaaggcgagctgcacggcgtcaggagaccgcggagggcgaccgtgcgggagctgcgatgtcgtcggagattgcgagggcacgaccgtctagcttgaagtcctccgagcaatgactgcagtgagcctgcatccgccgcgtcccaaactggaaggtgttctgtggccgtccgcgatgcgtcgcctctgccctagcccggccaaagcccctagatgttttaagcccggcgcgaggggcggagaggagcggagaggagtctgtagcaacgcgcagcgacgtcacacaccacgtgattgcgcgcgtttccgccctccgctcgtggctgccacgacatgctcgagatcggcaagtcgtcataggtatggattcatggcaggcatcaacctcgactgcgatacctccaacaacgagtcataacgcaatcgaatgcgagcattgcacgcgtcgttgaagatgtcgcgccggttgaagacaaggcagcagcggcgatgggcccgtgatgccgggcgcaagcgggcgaagcgggccgcggacataaacactattatagcgcgaatttactctcacatatgcgcgtaaactctccaagatttgccgagagggtctaatggttcctggcaatgtgatcacacgggggagcttacgttaactcactgcgaatgccaacggattttatacttttactcccctcatagcatcaccccgtacattcgcacttaaccatgttcaccctcggggaatgcttgggagttttttcattcaagaagtgttgagcaattactgtctaaaagtgtgttaccgaaagatgtctgaaactgcagcatgaaacgatgcttatgatgtgtgctgaggtttcggtttgataatcggtcataacgttcctattatccgtggttatttcataatgtcacaatggcgcgccttctagttcatcttatatgaatagcgccacataccagagggatcccgtaggctacatgaacgcgaacacgcgtgcgtgcacgtttattattgtgctcgataaacccttagttgtgaaactacggtgtatgagtgtttcgccgtgcgtgttgtattttgaactataggacaactcgatttgaggtgacaaaaaccgcctatattatggaatgatgtttttttaggtgttttcggtcgcagaaaattacaccgattcgggtcgccatcagctcttgttgtcaaaatttgtgtttaatgttctcacaacagatgagatggtatcatttacacgaattgtaattgagcgttgctgtcatagcttcaatcgcacctttgcccttatgacgagaaaagttcccaaaacgcttcttcggggcctgccacaatttataccttttttcggacgaaccatttcatctgcaaagtataatatcaattgaacattgtaataaaatgactacggagaacgtcttacatactaattgccataaagccctaaattatcacattgcaaacgaataatgtagctgacctagctgattgtttcagggaaacctttgaaataaactgcgtgctatttttaactgtaagtgcccactagcacagcaatagcttgttaattcgacgcacattagttcggaaaactgaattattcggacatgttctctggcccgcagcgtatgtattgtttaagggcaccagaactctcattgatttggtgaaatttggacgcaacccgcttaattcgggtgttcctcggagcgcgtgcaccgagcgtgaagcatgcaaatatgtgacgtaaaagtaggaaaaccaagtttcgcggacagccgaaatcggcactgctttcagaaagctgtggtcaccacccgcgattggagcgccacaaggtgttgaatcggaaggcacttcgcattgaaacacggggatcttgaggagggtcttatcaaaagacatgcgcggttcaagaaatccctgaagtcagcgcactccgtccgcccacgacgccatttcttgtattactgcgcgccgtccgtcgtgccggggacgcacgctagccgctcgcgtctccccgccgaggtagggtgagagggttgcctctgaaacgtaaacatcacgtgggctagctgtgaggcgaagcgctctttcaaggcaaggagcggacctaagggcgcacgaaggtagctcgtgtctttcgtgtccttcttgtctctgtgtcgtcgtttttttctcgcgctataactatcgtcgtagccccaaagcaaccttaagctgaggaagcgccaaggaagccttcgccgagggctcctcagtgaggaagctttcagagtgacataaggggcctcacaaaaatcaagccttcctcactgaggaaaggaacgtttcgttgtctggcccttaaactcgggcgaattcgtggcatgtgcttagtacgctggtatacagtaacgaactcttcaagtctattctttatcgcaaacgttaaaataaactaaactgcgctgtgcaccttgccttcataggtgagcttcgttgacaggtagaaccgtcactgccgttattttgcatctgctatggaaaaattcagctgcttaagcatcaccaaaataaataagtacgctctctccccgcgtttcgtctttcttttagtatgcatagggtaggtgtaaggtgacaggagtaccgtgttacgaatgcttctgttttcattcatagcaaaaattattgacgggcattccgtccaacgagaattcccgtattttttttttttgaaaaacagaagttatgcattctaagttagagtcgtgctgtgctagggataacataattgctttgtttagcaatacacagatgacgtgcacctaatactgtgtggtgctgtcacaaacgactccaattttcggatcatccgcggaccccattgcaaggaagggcgcttttgtgttggggggacgacatccggcgactataacgacccagcgtggcgccggctcgtcttccttgcacctgcaccgaaaggggcaccggcggtctaaaaaaggaaactacccccagatgagacgggatcacgtgtacgccgctgaagaagttttgactgcatcggaagagcagttgacgtacagccacacaacaagtgcggtcgtcggtgtctcgcgtgggcggcgagcatggagtgacccgttcaacgtattgagacggctgcaattccgggcaccctcgtcgtctaccaagccggcgagatcttcagcggcacccgtcaactcccctacgtgcaccaagagctggcctggtccgtatggaaatttttgttgtgttgtttttttaaactgccagctctcttctcaagaacattactgcgtaatgttcaagaaaatcacaaacgcacaatgttcgagagctttcagtgttccggtcgtctaccaatgcgttttctttttcgcgcactatttcactgccgtggactcatcgcagagaacacccgacacactacgcttcatggtcaccataaaatgaaagtcataacccgcgcaccacgacacggacatacacatgaaacacgaaaaagtctcaaaaatactgcacgattcaaggaaaaggcacgtaggcattctttcatgccgcatattcgaaaatacacgctgtaagcggcatacaaaagtcgcttattcgcacgcagctttaaaaaaataaagatgattgaaagaaatcggcatgatcgcctgtacacagttccggtacttgctgcacactaaagcgcttcgcttcgaagtaacaacaaaaactaaagctttgaagaacatataccgccatgtttatcacacaagcctaccgcgttagacttcgaatatgtgatcaaccagtctcttgaaaagaagcccaagccactaaaataacaatatccctaaaacgaggctttctaactgaacgggtaatagatgaaacaacagatcatcatttagaaaacacacagacgacacaagaaaataaaaaaaaccaagcgattgttccgagcgtttagcaaatgcttcaaaatcgaatgaccgaaatgcacattgtttcaaaaagtatcccattagccctgaaggttaggtgtacgtttcgatgtacatacgcataagttttatccgcgctcttgggggagccgttcgaagcaacaagggcagacaaaacagtggacggccgctacccggacgcctgtttcccgctagtttgccccgtggcagcaagccatcgtcgacacagcgttctacggaaatgggcttcgcaaccgcgtcgcgtcatctaggcataatgcgcgccctccccgtgcattccgctcctcgaacacgagaatggagggggtcggctcctccgagctgcaggtacaatcgcctgcctcgcccccccacccttcagccggtttggggacactaggaccctgggcatctgcctcagttgcgcagaaagtgactaaagcactgctactttacttaaagtcaacaaacctgagcgaccgcctgtagactgtgtgtgctccccgagtatgctcgtgattgtgtgtaccttctcatctctctgcaacctctttttctctcccctttatcccttccccagtgcagggtagcaaactggatgtgcgtctggttaacctccctgccttccttgcatctttatctctctctctctctctctctctttctagtgactaaaaataatcgggaaatgacgaacatggcctccaagattacgggcgcgtagtgtggttaaacccgccgcgcgcccaccatctcagaggtcttgtcacaagattgttatggcagaaacattgcgcatcgtatgtctggtgtatagaccacgcagcggcgttattacgaatgagttacctttttttgttaatcgttctgacctgccccccgccgcggtggtctagtggctaaggtactcggctgctgactccgcagtcgcgggttcaatcccggctgcgcggctgcatttcgatggaggcggaaatgtcgaggcccgtgtgctcagatttgggtgcacgttaagaacccaggtggtcaaatttccgagccctccactacggcgtctctcatacataatgtggttttgggacgttaaacccaacaaatcaatcaatcaatcgttctgaccttatttaattggcggcggtggtgtatagtggtatacggcgctgactcgaaaatcgcgggttcgatgcggccacggttgtgacatttcgatagaggtgaactgatggaggcccggcgctgtgcgagtgagtgccagttaaagaacaccacatagtccatatttctcaggccctccccccattacggcacacctcatcataacgagggttggaacgttacctccagatgtttctgttattatcactatttttttaaacaaaagcaatatataaaggtaataacgatattcgtatgagtcctttcaatgtcacgatgatagtacgctgacgatttcgtcactttcgtgtcactgcaacttgtagtgtgcaagtatccccgaaggaacgccactagcgtgggtcgtcttagcgacccgcagagcacgcgtcaaccgtcgccaggccgagaacacggtactgctcaaggtcgcaacacctcgttgtctgctgcggcaacaccaaaactcactacacagcccgttccaaaggcttatctacgcgccggcaaaaagcttgtcttaccgccggcgagaatactacatgggattccgcgagcacgtctccacgggcaacggtgactcacggcggcacgggacaaaggacccattgctcggcgagggaaaagagaaaaaactcgcgttggcttcataggtacgggccggcttatagtttgacttcgcactataggacaacgcgccgctgttcgaccaagcgtttgcaaggggcaacaaaaggtgagcgtttgccgcgggcgccgttgtggcgaagtccgacaagcccgaacaacgagagtcgacggacggagagaaagtgcgtgctcaccctcagctctcctggacagatcggacttcttcgccggtaacgcgtcagatattcccgcgtcccactgcttataatacatgcgctcgagcgacgcaccgaggcttattacagcttcttcgatcggccgccctctggtgtggcgtcggcaacgcgttcgtgtgctccttcacgaaagagcatcgtcccgatggtacaacgtaatgaatacaaatgaactggaagccttcttaacaattggtgtagaaaaaacgtacacatcacaaaagattgtccattagtccgcttatacttcatagcgtaatcaggccccgtgtgcatcgcctctcaattgctggccacgcttcgttctcggtgcgtgcatcaacaggtccgtaaagaagctacgacttacgctctttaaactatccttgaatgcctgctgcaagcccatttaagtgaactgctaagccctatatatttctgcattttgcgcagcgaaggcctattacgcattcgtgaggcatttacgtgaaccttcgcactgcatgcttccttcgttttttttttttaagatgatgagtaaacatttcgagcaccttgtaacgcgtgagcctttaacacaactcactcgttgcgatattgaaatgttatgacgggagacgcaaacttgtgttagcaaattacatgcgttcgggaagcttcgcagaattacatgcgttagggaaattcgtgggtgtttctttcggggaagttctcgcaatatcgtggctcagttaccctcccagccattcaagatgctgtgtttatttgtctctgaaacctagcattctattatttatttttctatttgaattttcctcgatgttccggtcacagacagcactgatttggcgcttacaaccactgacaccgacaccggaatttcggcaaaacgagctatcgatattgcattgaaa

SEQ ID NO: 109 - DNA, 20798 bp, unidentified
  misc_feature 1..20798: note = Fanzor polypeptide
  source 1..20798: mol_type = other DNA
tagttgtgtccgtagcgcggaatcgaaccagggacccctcgcttccgaacgcgcggcgctaaccactacgccacaaagcgcacatggacacacgcaccacgatgacaataaatacccaacattaactaaagactgcgcgtttctaacgcgtttgtgctagcgcgttacggcccgtgtaagaagctggtgtaagacgctgtggcctctccgccttgcccccgtattcataaacgctcctcgacttgaacttgacttgccaccgccttgggcagcgcgttcgaaacgcattgaaggcggtggcaagtcaagttcaagtcgaggagcgtttatgaatacgggggttatactctctcagcagtcatgtgatggcgtcggcaaacgcggtgcacgttccggcatgtgtaaacggctgcgtaagacgctgtggcctctccccctagagtactgcacgtttctaacgcggttgtgctagcgtccccttaagcgggagatggtgcaattataatgaagggcgctgttataaaataggaatgacgtcacatatggcgcgtgtcaatggcggaagtcaattgttcgatttagtgcggcgagactgggcgaattacacggaagattcacggtttactgatgattccctccggagcttcgcccactcatcatcattcactccgtggatatgcggtgttttttttactgttggctttatgtggttctaacctgcaatgttccgaatgtaattgaggcatggaacgggcttccgaatgatgtgatcaatacaaatgatgttattgaattcatccgtttacttgatgtacatttatgtgatttactttgatgattagtctgaggtttagctatgattattgttatttaaatgtgtcttcttgttacatacatatatatatatatatatatatatatatatatatataatgtgtatgtatgtgtgtaaacgactgtatgcaaaatgtcctccctccctgtaatgaccctcaagagagggttaacagtatttctaattaaaaaataaaaatgttttgtgtcaatacctgctttcaccttaaaggggccctgaaacactttttgaacagagtctaacccggatatatccaacgctgaaggggatcacaaaaaagttagatgtataggtaattcaatatataaaataaaaatggtatacagaaattttctaggggatttacagctgttccatatcaacaataataagttatatgcgggttcgatatattcgggttcaactgtagtaagaaaacattgttcgtttgacgaggctcctgtgaatatgcgagcaacagcgtaatgcactgcatgctgcaggaagcttacgatgtcgtttcaattgcagagaaaaatcgcctttgctctccttcacaacgtaatcgcgcagtgtcatcgcaagcagctgttggctgatttctcgatcaccagaacgttctcagtaatacaattattgctcattcgagttaaataaatggaaaatatatacttctgcgatctcaaagcgacagaaataccgtttcgtattttcactgccggtctacatacgacagttgcgcgttgctgcgcttgctgcacgcggcctccgaagtgactagcgtagcgtagacactgcatggtggtcgccacgagcagcatcaccacgaataaattcaactttttggcggagccaccggtccgttgctcccttgcgcccccttgccatctcccacgtggatctcacagcgcactggtgcaattcaaataagaaagaaggccgcttattggcccggttactgcgattaacttcgcttatgcttgaaggattcgaaattttgagggcaggagattcatgaggagacgtaatataatgatgatgtcattctatgattaggaagaaaaccgtttcagggcccccttaaggcatcttttgcaattcaaataacggaagttagcaagaacagcgtgggctagctgcaagagactgcatgatggaaaacgcgctttcaatttcctatcgcacttaacatggccttactattgttctaatgaacagacttagcattaacttgcgtagattcggctttctggttaacaattactcggagagcgcttgagcccatttgtgttctttcttagacttgagaatgcctacagttttcaaagtgaacaacaattacagagtaatgtaaatgcacgtacttcgcatacatctatcggttcatttacatgttaaacatggcgttgaattacataagatgcagcatgaaaaatatgtgttgtttgtagtgaaagtatgtaaacaagtgtgttatgtatacggagtgtcgagaaacaattgagtgatatcggtcagtaaggttgttgaatgaacagcaagcgatgcagccgagggccattaaaattaggtctgcgctagttacgactacacattatatcacttttgtcagggatacattcaataaatcctatatcgacacgtcgatacatattggtggaaaacctagcaagcgcatccttcgtgaataacgtctagtggaatgcgcccaacccctgcgatcttttaggcgagttgtcgcaaacacgcatctttgaaggacgatcggccagccaaagggtctcaaatataatccactttcattcagcgtgcatactggggcggtattttgttaagatgcagttcatttatgctggtgccgcaggctatttacacgtggcctcatgctcctataagttacacggctaagggtccagtttgcggccttgccagctacattatgctgtcggagaaatgcaaacgaggaaaaaaggaaaaagaataaaaaaatagctggctatcgatgcacactaaaaattcgcaggattgccccacctgatctgaagccgtgcactacatgcggggtaataaattcaatcatttctttttatcgccgtaaatatgctccgacaccaccgcgccgccacagtctacacgataggccactatagacgtactggtattaggatacgcaatatgtatatccaagagattctttcaaaatacggtccctttacgatctggactgaaagtgtctgtgtcgtcgcaggagatcagtgcctccctgcgacactcgggacaggcagcgcagtgccgacaaagcgaaccgtaactgcgcagctgttgccaactgcagcgacacgtgccaggcacaagatctgctcgcgccagccacgcgtgcctcgtcggccatcttagcctgcaatctcgcccaccctttcccgtgggagcactagagaaggaggtgagaataaaaaatcaaaaccaaataatctagaatgcagagagagggagtaataaaaggagccggctgtgcgtaactacatgaccaggtgcatccccgattgccattcgacgggcgatcaggccgcacgccgatcggtccgtgacattgaagtccgcagtgcaaacgtatctgggtcctgcgagctcttggctcctcgctttctggcgacttttgatgttttcttttctttccttgttttgagccgagttcttttcgcccgcagcaatgtgaatgggagcggatcagtcgctgtatttggcacttgaagcgctttggcgttgttatactgattgttgaatcttgaaaagaaaacactcaatgatgcttgcaccacgcgctttgaaccaagccgaaagcaggacaaggtgaatgttcctccgcaggttgcggagggaagcacttctggaaaaatgttttatttgtatttttttgtgcgtgcttcgtttttcacttcaaccttcagtaattcgcagcacctacatttattgaggccttttcctttagaaaagtatgcaattatattgtatttatgctgtagggacacaccgttaaacgcatgatttagttagccaagtttcagctgcacttttctatacaaggacgtgctagcgttggcaattaagctgctaaggtaaaggctattgtttacaggtaggtgcattcgttttacgagtcgtttctcgagaatagctagttcgaaaaaatttgccaaggtaataaaaatgatgctgaataccccaacatattaggtaacacgatctaaaaaaggacattggaatgataaagtccctgaactataaaaaatattagtacgtgttgtgaatctcaaaaaacgaaataaaagaacggcactagaccatttcgcgccatcatgttattcgtttttgaatcaaatattcttgtaagaaaacatttgccaacggcgacattacggatttcgtctaaaatggtggtctactttcaccctgcccctaaaaacgaacactgaactcaaccgtcataagaatgcgagacttcagtgctccacttctttaacaggtgaaatagacttcggtctctgtctcgatattttcagaacaccctaaaagcctgcagcatgcaacgcttatgctttaatcctcttcgcgatttacatccatcgacctccacagttccacttcaattacctgccgtagcatgcgatagcggcaatgaccttggagcaaaagctcgtcgtgtcgctcatggcttctcttacaacagactgagcctatgtgaaagggatctttggtcttgcgcgcagacgtacttgcgtgtgtaatgctctacgtcaagtcgcattacaaccaacgttcgattacaaatcacagcctgctttgcccctatacgcttatttctcacagcggagcatcaatttagcgacctccacggcatctccaccatggtttctctgatcgtcgccatttctcttaaaatgtgtcgctgcaatccgctgcacaaatcacgccccaatagatcgcatataaaacgctaaagcttcaccagaaatgtatcgtaatctttgttacaatgaaatgattatgaagacaacagcttaagaagtaatctttatgtagacgctagtagtgacgaatacctgctttatgcccttaggtaacaaaactaaaaatactgtaggacgccattgacgaaaacagcagaagtccgaattctggtgttatgtacatgaaaggggaaccaaacttaagtatacgcactcctcatcggtgccccacgaagtgtgcatgaaaaacaatccccctgccagaggctctctccgtgcggactctgcagctcgggggttgggcgatcggtgtaaggtgataagccgccatggcacgtacaccctacacccctcatcacgcagccttggaggcgggcagcctctaattaggcctagcacgaccgaaagagcgccggtcgcgcacgagttgtacctcaaggtaggcggagcggtggcaacgcaaacaaatacaaagaataaaagaaaggtggcgggggccaggagggagcatgtagaaaatgaaaaggtaagtgaaaggaactaaccaagtggagagagagccgcgttctatcgaggcgcacattctgtttccttggtatagcggccccgactgtccggaactttacgaggaagtttgcctgttgctgagggcgcggcgacaattttccaagggatttgtattgtacgtgtccttaatgctatcattaatgcggtgaatattatgcgtcattacgtcgctgactcatgatagacgagaacagagtattttgcacccaagattccttaattgtgcaacacccctatacaccaaacatataatggctcccttctctctccacacacacacacacacacacacacacacatatatatatatatatatatatatatatatatatatatatatatatcataagaagccaacaaacacagacaccaaggcaaacatagcggaaattgcttgtgctaactaattgaattaaagaaatgataaattaatcgaaatgaaactggatgaaaaaacatcgccgctggctgccacgagtacggcccggagtgccacggaggtgtgggcatttattagttaatacaattagcacgagttaagtcgtaggctcggtttgaacggtgaattaaattttatgcgtaagtgtgaaatgacccattgagcgaaatgcagctccactaacctgaaacctggggaggtgcgaagcacgcagtgatgcactgctgatgggtgtcatactgcgttgagcaatggctcataaccccgtaaacgcggccttcctattacgacgacagaagagaagtcaaattctacgctggaatgatgagcggcaacgcagccagctgtggaagacgacgaagacgacgaacgcgggagcagtgtcacgagtgcgtgccgagcgcgaccacgagccgcttggttaccgtgactacgacaggagacgccgacagcccgagcgcatcaggtgcttcgcacctaaaacaacttgccgcaattggggaatgatcccacgtcttcgcattacgcctgcgatgctcttgccaattgagctaccgcggcgccgttttcccatccactttctgggttatttatgttttacaactagaaactaaccctgggagtcagcgccaccacaaaccttggcggcgcatgcggaacatcctgtctgccgcaggcgatacgagtacgtgatcttttggggtgaagggagccgatgaataaacccgcatatgctacctgaaggcatcaatgttgcctgattcgagaccctcgttatttaatgaaaaagaagaaaggaaaccgaggggcccgatttcttattaatcatattataagatgccaacaaacacagataccaacgaaagcataggaaaaaatacttgtacttactcattgaattaaagaaatgatagaataattgaaatgaaagtggatgaaaaaaattaggggcaacttcacactagtagtgaactgggcaaacagcgaagctctcgaccccacctagctttatctcgcttcggccaagtttttgcgaggttatgcttagagaatcgtccacgtttgcgcaaggttaccccggaatcattgacagcccaacaagccacgaacactcggtcattatagtatctggaggcttctggacgctcaaaggtttttgctcggtttcgcgggctcgtaactccggatcttctgcaaatcaccgacgtttcgccgccgttttggcggcgcgatgcttgggatccaaccaaagtcatctcactcgctctcgagtagcggcgcggcgatattcgtgccgcgcttccaatgcttcgggagtgacgctcttcttcggccgtccaacttcgcggcgatgtgctccgccgcggaggcggcggggctttggtgtcgccgcggcggcgacacagagctatttatcccgtgggtcggcgcagtgacattacggcatagctccgtgtctgcgcagccgcggcaatcactccgcatggcgcggcgacgccatggctcggcaaagctaaggcgaagtgatggggcgcgcgcgatgacctcacgggtcgcgcagctgtggcgaggctctgtaccgctggggcgctcgttgataggtgacgcatggtgacgtcatcgccaggtggagattatgcagcgtacactcgacggaccatcctcgagattaaacagcttcactagttcacaggaatttgtgccattgcgcttggacccacctcaaggatcggcccccattttttgttcaaactacgtggtctaaccaagagcttgaacagctcggctgttaaaaaaacttgtcacaggtggggaacgatcccacgccttcgcattacgcgtgcgatgctcttaccaattgagctaccgcgtcgaaaaaacaaaatctaaatttttcactgtaatttcaaatttttccgcatctaaaatagccgtaatcgtaccgaacgttaaaccggccaggatagtttttattttagctctgttttcccatccactttctgcataggactgcccttttcgggtgacccaccctttatgtaacggagaagtgaaaggtcgataggggaacagcgcaaaaaaacacgacaagaagacgagaagggcgacacacaccagcgctgactgaccactgatttctttattaagaaaggaacacatatataccaaaagaaaaaagaaagaagggtagatcactgcgcatgggcaaaaatagacaccgattagatttagatttacacaccaacacacaccaacatcacacatctattcaccataattcatcaccatctattcacaccaacatcattcatgtacgcaaccctcgcgccgtggcagccaaacggctcagtaataccaagacaatcatagtggcctttgaaggaccgcgagtgccttcctatgtcaggtatggcggcgccctccttccctgcgccctgtatcgtaagcaaatcgacatgtgtcactgctgcggaagactcggtcaccgcatggacgtgtgccccaatcctcaggacaaagtgtgccgtggttgcgacgccattaacccatgccccgaccaccagtgctccccccgttgcaagctgtgcgggggaacacacatgacggcggatcgcaactgccgcgcacgatacaagacaccctacgtcgtgacaaagaggcaatgggaacgacacagggccgccgaagaggcggaagaggccgccaatgccacccgctccgacggcaagtcctgctcgagatccaggacccgcagccgaggcggctcccggtcccggagccacaccccggactcgcggaagcaacgccggttgcgcagtcgcgcccccagaaggaccgcaacgagagacaccgagaccaccgagaaggtgagctgggcagatgcggtcaccggaaaacaagcaccaaccgcgaaggctggcgacaaaacacccactaagacagagacggagatagctaaattaacacaggcgatacaagcgctgcagaagcaaatagaacacatgcaggcacagattcgtgcaaaaaacgaactcatagaacaactccagcatgccgtgaaaagcggtactgatacagaggccatgcaggaaacacaagaagaactcatagaggacggtgaggtcgtatgccccgacactaagcgcagacccactcccgcccttacagaagcaacacgacgcaagcgcacgcgcgcagcgatacgcgacgcgcgaatagatgcactcgaggctcgcttaagcaatctcgaggaaaccatcatcgcgtccatcacgcgtaccatccagcagaacttggagagcgtttacctcagactgtccagattagaagccacgaacagcacgatcgtaccgtcgcatagggaagcggcgcaacacatgtaacaacatataaacatagcccgacgcccacctaaacaaaaacacacaatatagcagtggaactgcagaagttaccaaaacaaacgagcgcacttacaacaatacctgaaaacgatccccgaacgcccagacgtcatcatattgcaagaaacgaacggccccgccaaactcacagggtaccagtctataccaagcaaggcggaggaaccaaacgtcaccacgctggtcaagcgagcgcacacagctatcgaacacgacactaaagtcagagacattgaaaacgtcctagtagaactaattccaccacgcaagacgcgcaacagcatcttcgtactcaacatctgcagcagtcccagatgccgccagcaccacttccatgttctcttcaaacgggcaatcgacatcgcccaagggcaacagcttttcattggggggggggggggggggactttaacgcggtgcacacggcgtggggttacaagcatgatcagcccaaaggcacgcatctgtgggcaacggtgcaatacgccggactcgagctcgtcaccgaccccgcggcaccaacaaggcagggcaacagcgtcagcaccgacacgacgccggaccttacttttacgtgcaacactcgccaagtcacttggacaaacaccatgcaagacttgggaagcgatcactacatcatttgcataacggcagaagacggcccgcaggaacacaatgccggtcgccaaatgaagatcaccaactgggatcaactacgcacacatcgtgacaagcaccaggtggcagacaccaaagacatagaccaatggaccgaccaactgcggcgggacatcgagcgcgtgacgcaaacgatcccgtcaaaagctgggctcgatacaatagactcccggttactgcacatgtggaagtcaagacccacctgcagcgccgatggaaacaacagagacacaataggagattgcgtaagcggatagcgcagctcaacaaagaaatagaaaggcacgcgcttaccctgcaacgacaacaatgggaagagaaatgggcggagatggacagtcaactcaccacgcgtggcacgtggcagatgctgcggtacctgatagatcccgccaacactaaaaccacacacatgcaacgcatatacaaaatcatacacgcttacgggggaacggaacagcaattcttatgggatgcggcaagcctttacatatctcaaacgccaccgctaatacatccagactacacgggagaaagcaacgccaccctggacgcggaattctccgttgccgaaatccaggcggccctcgtcaaactcaacaccaagtcggcccctggccccgatcgaatatccaatagggcactgcgtaatctcgattacggatcaattgagaaactgacaaactacattaacgagtgttgggcgcacggcaagctaccacagcaatggaaagaagcaaagatcatacatactgataccaaaacccggcaagaaattacagctagagaacctgcgccccatctccctcacgtcctccgtgggcaagttgatggagctcgcgtttctcaatagactcacggattacctcgaggacaacgaattatttccacacaccatgattgggttcagaagacatctctccacgcaagacgcccttctgcaactaaaacaccaactcatagacagtccggggcgctcgacgagagccattctcgggctggacctgaaaaaggccttcgatagcgttcgccacggtgccatattacgacaaatagacaagctaaatctcggactgcgaacgtacaactacattcgagacttcttcacgggaagaacagctcgcatgcgagtgggacaactagactcagatcaaatcaacatcgggagctcgggcaccccgcagggctcggtcatctcgccgatgctcttcaacctcgtcctgctggggttacccgactgtcatatgtaagtgccgcgaggtgccgctggaggatcggagcggccacccaagctctggaaagaagaagtgaacgggtgcacgagcacggcggcacgaggcgagctcgcagtgttcgggccaggcgggcagcagttccgagctccgggggcgaacgaggcgagaggacctgcctggcgagacgtccgtggcaaggtgcggaggatcgcggagccgggcgtggacgagggcgtccgaggaaaccgggctcctgctcccagtgctcgaggcgctggctgacccgagtgccgccggtccctgagctgctgcacctgagctgtgcccagcagcgttggtctggcacagatgttgctgtgctagacgcggtcctcacgtgcgaccgccgcacgtggattgcgagcggcgtacgagctgggcaccgaggtcgtgctggacaaggcgttgcctggctgctgccgttgctgctcctgagcgtgccgagcccgagaaccgtgctggacggggcctgaacgtgtcgtcgtcgcagtcggctcgagcacgggtgtatccgcagcgacttggacgacggaagcgtgagcctcgaaacacgggactgtcacagcctgtttatactcgtgtgctgtgcgtgtgtagacacactgactgccgttacgcagatcatcagctatctctgtatatatatttttagggttcttttccattttgataaatgctccaaaacgactctctgtctttcttccgcatcactgcgcactagcgaaagtgccgaatagtcccaaacgccacaccgaccgattgttgcgaatcgaaggactgcaccacacgctatacgcagatgatattacgatctggacgacaacgggccgcgatggagcgatcgagcaacgtttacagcaggccatccagtgcgtggaaaactacctggtgggcacgggacccacctgcttggccgaaaaatccgaattgctgctatatagaccgatcagaaaggggcgcccacctaaaggctacgcccccccccccccggaaaaggaagagatccaattaacggcatcaaacggcctacccatcccgatggtagacaagattcgggtactaggaatgatgattgaacacaagggcggcaatggcgaagcacttcgcaagatagcagcaaaggccaccagcacgatgcagctcatccgacgcatcaccaacaaacacgcgggcatgcgcgaaggtaacgtcatgcgacttatacaagccttcgttatttctcaaataacgtacacggcagcgtgtcacaactggacggttgcagagagaaacaagctcaacgcgctcatacgcaaggcgtacaaatgtgcgttgggacttgcgcccggaggtagcaccaccaagctcctagaactaggcttgcacaacacgctcgagaaactcgtggaggcgcaacaagtgtcccaactcgagcgcctatccaagacccgcttgggcaggcacgtgctcgaaaagctcggcattacataccacacgcagcacggtatcaaagtggaaatgccaagaaccatgcgcgagcaactttacttgcccccattgcctcgcaacatgcacccccaacaccacacggggagacgtaaagccagggcacaacacatgaacaaaagttactccaacgacaaggaggcagtcttcactgacgcagcccgttatcgagacaggaagagtttcgtggcggcagttactagccaccgaggtaaccccctcacaagcgtcaccgtgaacacgacatatgccgaagaggcagaggaagcggccatagcactggcccttacacaaaccaaggctacatacgtgatctgcgactcgcaaactgcaattcgcaattttcaaatgggcgcatatcgcaagaggcatatcacatactctagcgacatcccatacaccagggagaggccgacgtcgataaccgaaggcacttgctttggatcccggcacacactggactgagcaccccaaacgaagcggctcaccgcgttgctcgaggcctcactcaccaagcatcatcggaggaagagcccccgcggggtactgcaaacgtctgggcgtgggaggatcgtttgaccaggttccacgacatcacgacacactaccagttacagagacgcgtatacccattccctcacgctaggttagacagggcgcaagcagtacactacaggcaattacaaactgattcttacataaacccaagactcatgcacgccatgtatccagacatgtacactacaaacagatgcacatcctgtggcgaggttgccacacttaatcacatgttatgggaatgtcaggacataacaaacaattcgggcagtgccgacacctgcgtctcttccaccgccagcctccgctcgcgttggaagaccgcactgctcagctcgaacctgacagtacagctctgggccgtccagcgagccgaggaagccgcttcgagacaaggtctcggaaccacgtccgcggcgggtgcccagacccactaaaaatacgccggactcaaatcttatcgatttgataataaagcttacgttcttcttttagattttggtactacagagtaaaactaaaaagggaagaagaagcagaagcagaagaagagcatagcttcagtaaaatcttcgatgctcatcaaatgatttcgcagtgacaacagccaagcaccacccggaattatacaccatcggattcagctcgtcaccgggaacccgaagataccaaattctgaggtgggtggccgttgtacgagattttacggccgaaaactacctcgcgcctgctgcctgctattcccgccattgctccgagctgcctcgagccgcctcacgagacccagggtctcggcgtattcttggactacacgttcaggcgaacgggaaggcgaactacagtatatctctcttgtgccggcagaccaaacagactttggccatgattcggtgggtctccaataggcgctcaggtctacgggaacgggacctactgcgcctggtggaggcctgtgtgatcagtcgcattacttaccaccttcccttccacagacttccgcagtcggagcagatacgggtcgacacaatgctgcgaaaggcgaccaagctcgcccacggcctcccacactgcaccgccacgaaacgtctgctagccctagggacgcataacactctcggtgagttattggaagctcagtgggccagtcaaagacaacgtcttttgctcacacccactgggcggcacctgctctcgtgattgggacatccagttttacacaattatgatgaagacatcgccatcactattccgacttgggtccgtaccgccttaaaggtgcacccactaccacgaaacatgcatcctgagcatgacgcgggacgccggcgcgcctgtgtacggtacctggtgcgcatgctcggtgacatccctgagacaaataccctatacacggatgctgctcggtgccacaacgggtattccgcggtagtgctggatggcgctgaaacatttattacagccacctgcttacggaattctgcacctggacacggagaagtccttggagtagcgcttgctgtgcgacacgctctccagattcctggggaggtgtatatccgaaccgattcccagcagacatgccgcgcctttttgacgggacgcggcttctcaaaggcggctctccacatcctacaccagtcaccaaacacagacccatctgccccacagcgcatccacttgctctggactcctggccatgcctcactgccgggtaatgaccgcgcacacacggtcgctcgagaaattaccctccgagctgcccggcatgacgagggtcggagtccagatcaggcgggctccccactcacatacagagacgtattaatatactatacacgagctagacacaccatgggtccgccgccgctgtcgttctcgcgaaaggaagaggtggcactccgccaactccaaacaaacacatttcccaatctcctctccctacataaattttaccctgaccgctacgcagactcttgtccgggctgtagaagctcccccacggcgttccatgtcaccgtggagtgcaccgcaaaattattccctcccctgccagtcatcttgcacccctttcgcaccaaagagctgtgggaggatgccctccgcgacggacctcccgaggtacgccgggccctagttcaacgggcccgtgctgtcgctgagatcgttctagagaccccggactaggggtccctcccacactcttactaccttttctttttgcaataaaatgtttactctctctctctcggcgctcgcgcccaagaggcaataatcgtcagcgatggatgatcagcaggatgaggaaggcacccgacgggaggacgacgtagacaacggatggaaagaagttagatacaggaaacgtgcaaaggaggggaggcagcatatccgtgctagccctagccctacccgaacgccaagaaggcatggcgcgcaacttatatccaagataaacagggccagcagaatgccaagactgcctacaggagactacaagatagtcatcaggccaaggggaggactgcagatatcccagctaagctcaacggagctagacaaagctgtgtacgaagcagccgagatccgttatgaagaacgagatatggacacgatctgcccgaataacttccagaacatcttggtcgtcagcaccccaaatcaagagcatgcagacaaataccaaggaatcaagcacatcaaggccaatgacaaggtttatgaggtgagagcttacgagacggcaccggaaatcaccactaacggagtaatcaaaggtgtcccattggaagaaaccccgcgagatatcaccgcggcagttatcacacccagaaatcctacggcgatcgcagctaaacgtctcggaaacaccacaacggtcatagtccttttcgacggctacagagttccgttatacgtcctataccaaggagtgctcacgcgatgttctctatacagaaagcaaatggacttttgcagacagtgcaacagacttggacacaggagcgacgtgttcccgaggccaaacgacaaactatgtgcgggatgtggaacgcccaacccaagtgaggaccacaagtgtcagccaagatgtcagctatgcggcatggatcatcccacggccgacaaagcctgtcaggccaagttcaaaaagccctacattgtcaagcaacgccaatggccccaacaaatgcagcagaaacagcaggaagagcatctccccaccaccgggccgaccgatcgcggcagacccagatccaggaggagggcaacgcctgggtccagatcccgatctgggtcccgcacgacgctaagaggtcgcaccccccagtctaccggaccgaacctgagaggaggccggactccatcgcgctccagatcccggtccagaccaaggggcggccacggccatcgaggcgatccgccactcgcggtgagctggtcagacgcggttaaagggacgcgccccgggtcttcgggggagactgcacataatttcaatgaaattgccgagatcaaaaaataaaacgctcagcttagagaattaatatcgcaactcactagagaaattcaaagccttaaaagctgtgctcaaagaactgccagtcacacacgttccgcgggcctggagagacccgaggaaatcccatataatcgaatggaagaggacagcacccctccgccactgaaaagaaaagctcaggcgtctagtgacaaaaccgctacgcaaaattcaaacctgaatcaaacattctccgaaatacagaaggcagttaaagaacaggcagaggcaaccaacaacctttcgcttgcaatcaatcaccatgatgatgaatagactagataaactggaggctaacgttgccagtctcaaccctagggcatctccggcgcctccagccaacaccctggcaatcagcaccgtgggcaattcacaattaccgcagggcaccacaacagcggctgtcccaactaatgtcatgagacctgcctccttccatccccctccctcctcaatacccaaatcaaaataggggcgtacatgataaagtcttaataccgaaaccaaaataggtaagtacaggaaaaaagatttaattatttggcagtggaattgtagcagctatgaggggaagagagcagtactgcaacaacaccttaggaacaaaaccaaaccagaaattctaattctgcaggaaacgcacggtttagctaagctatcgggatagaaggcgatcggccccacgaccggggataatggaacactaaccaccctggtaaggaagggattcgtagcaatccgccacgacacccagatcacagaaatcgagcacatactcgtagaacttccccctagaagaaaaaaacttcctagcacgttcatcctaaatttgtatagcaatccttcgcacatacgacaacgcttcctttctctccttaagaaggcagtagtaatagagggagcaaacaccctcgtcattggaggagactttaatgccccacacagcgcatggggatacggatacacacgagccaaaggcaaaatgctatggcaggatattcaagaaaccgatttaactctcataaccgatcccgactcccccacgcgtatagggactggtctcgcgagggacacaactccagatttaacattagttcgcaaggcggggtccgccaaatggaaaaacacatttgaagatttggggagcgatcgtatagtagaaaccaaaattgaagaggcggtagacgcagtactcaatagacgacaggttaaatagacggactgggataagtttcgaaaagtcagagatgccaaaaaacaagcttccatcaagaatattgcgcaatgggtcaaagacgttatacaagacgtcaacgaggctacgcaaacgattacatcagaaccccctaagaaaagattgatagccgtctcgcgcacatgtgtgaggccaaacaatcactacagaacagatggcaggggcagcggcacaataggagcttgcgcaagcgtatagccaagctcaacaagcagattgaagaacattgtcagcagctaagcaaacaacaatggaacgaggtttgcaatgcttttgatgggccaatgcacgcaggtcagacatggcgcatgctcaaacacctgctcgacccagataacaccaaatcggaacatactcaaaccttgcgtaagctgatgcaccagtataaaggcagcgagggggactttatcgccgaagctagcaacatatatatccccataaaccccgtcatagagcacgggcaatataccggggacacaaacaagctcgtgaacgaggagttcaccgtagctgaaattagggcagcgctaaagaagctaaacaccaaatccgcaccgagaccggacgggatcaccaacagaactctccggaacctagacgaccaagcaatagagaacatcacgcaatatataaaggaatgttgggccgaaggcgtcatcccagcacaatggaaagatgctaaagtaatccttatccacaagcccggaaaacaacccgatctgtcgaacttacgccccatttcactcacgtcctgcgctggaaagctgatggaacacgctttcttcaatagaatcaataactatcttgaggagaaggaaatttacccagactccatgctggggatccgctcccagctatccacacaggacgccatgctgcaaattaaacagcagatcctagacaacaaaacaagatcgactagggcgatactaggattagacctcaaaaaagccttcgacaaagcagcgcatgcagctatattaaatcagataagccaattaagcttaggatcgagagcatatagttatgtcaaggacttcctaacggacagaacggcatcccttgtaataggagaactcagatctgaggagagacacatgggtagcgctggcaccccgcagggttcagtcatatcgcccatgctgttcaatctaataatgataggactcccgcaacggctcaactctgtacatggaatacatcactccttgtatgcagatgatatcaccatctgggtgtctgaaggtagcgacggagagatagagcagagactacagaaggccgtcgacacgatcgaggagtatctcgaaggtactggcctcgagtgctcgccggataaatccgaactcctcctctattgacccacgctcaaaggcagaccacccaacggctacaaccgcaaccgagcctacgaagaaatccaaattctcaccaaaaacggcaggactatccccatagtggaacagattagaatcctacgactcatcatcgaatccaagggcactaacggagaagccgtcaagaggctagtaactaaagtcaccaacgcaataagggtaatcaagagagtcacaaacaaacaccagggaatgaaagaagctaacgtcgtctaacttatatattccttcgccataagtcacattatatacgtggcggcatacctcaattggtattcagccgaaaaagctaagatcaacgcactcatacgaaaggcgtacaagcaagctctaggccttccagatagcaccagcaccgagcgactacttcaactgggtgtacacaacacgttagaggagctcatagaggctcaaccaattgctcagttggagagactagccggttcgcgcacgggcaggaatatcctcagcaaattagggataacctatcaccatcaacaaggatctaaagtgtcggttcccaaggtaatcaggcaaaagatccaggtccccattctgcctaaaaatatgcaccccgaacttgatcagggaaggagggagagcagagctaaagctctactcaaggcatacggtagagtcaaggaggcgttgttcgtgacgcagcggagtacacgagtcacgaatccaacgtcgcagtagtaataaactccgaccacgagtgcataagcgcatgctcgatacgctctaataatagtgaaattgcagaagaagtagctatcgctcaggccttcatttcccccaaatatagatacgtcatcagcgactcgcagtcagccatcagaaactatgcgcgaggaagaatatcgcccgaggccgctaacatactccacgggaaagcacagttaatatcatcagaggaattcgaagacagatacatcatttggttcccagcccacacctcctgtgagtccctagctcccaaccttaagaggaagcccaccgcgtcgcgtgaggtctcatttaccgcgctcgcgaagaagcttcctccgaaggaacgggaggggagacctggaaggtgaaggacagaatgttcagattctgcgacgtcacccgcttctaccaaaagtcgaggtgcatattcccacctcctagctccaaattagacagatctcaggcggttgactggaggcgacttcaaactagaaccttccccaacccggtgcacctacatcgcatctaccccgaactatacccaggtgatttgtgcaaattatgtaggacagaacacgccaccctagaacacattctatgggattgcgcac

SEQ ID NO: 110 - DNA, 20504 bp, Polysphondylium sp.
  source 1..20504: mol_type = other DNA
  variation 1109..1208: note = n is any nucleotide
aaccatttcatctacaaaaccacaatcatccaataccttaccaaaactattaaaactcaaaccatcagcaacaacaaaatcattgatattaccaacatcttctttatcagcaccatcaccaatctctaattttttatcagcaccatcaccaacctctaatccatcaccatctacaacatctacaacaacaatatccactaccgatagtagccgtagtagaattgaaacatacaatcatgtcgacaagcgaccaagaacgacgaattatattttccagggaggtagattcgtcaaggaaagagacgaatatagccttcagtccaataacaactccacggctttagaaatggaaatggatatagattatccttcaacaacaacaacaacaacaacgacaacaacaacaacaacaactactacaacaactcctaataataataatattaataataaatatatatttggaatcgattgcggaagatcatcacatgtatccatcgatgaacacggtaaaactcactcattctctgtccatgaacattatcttaacttaagaagtcgtttcaactcggaagctcaaaagaaaatgttgggtccagccatgttaaagtttgaaagtctaattccacctagtaagagtaagtaaactatcaccttttatttttaatatagattgatattaatttattatattatttattattttttctttagatatcaatgatatctgtttggatagatcactgattagtaacaggattagttatcttagattacacccaacaacaacaaaaaactatgtcaacattagattagatgagtacaacctaataatgaagaagaaatactactacgataagcgtgaatcctacaattcaatggtggacaaactggttccaagtcaaaatagtatagtctttattggttctgccaagttcagccacaacagtcgtgggcaatcttctttcatttcttcagccactctctacaagtgggtgaagaaaagaaacataaagcattgtggatcaatgaatgctacacctcaaaagtaaagtacacttaaattgtcacaaattataatatattttttaatatttaaataataatcnnnnnnnnnnnnnnnnnnnnnnnnnnnnnnnnnnnnnnnnnnnnnnnnnnnnnnnnnnnnnnnnnnnnnnnnnnnnnnnnnnnnnnnnnnnnnnnnnnnntactgatctattatctaaaaactggaaacgatgatactctgtaaaaccaggaaagatctttatttctttctgtttcaattcctttgggttatgaatttcgactgttactttgatggtaacagcctccttctctgattcagaagtcaatttgtatgttctttgatagttgttgttgtcagtggtactcttgattgcattgataacatcttgatctgtatagattgaatctttgaaactcgacttgtctgctatcgctctagaaaccattgaaaaatgttgatcgcattcactctttccgtgatagggtgcaaaagtattcaattcgacgagatactttcttttggttttgtttggagtgtttggatcagctacttgcaactttgacaatgtatgcatatatgaaagtatttcatttgacttgaagtgtctagcattatcacaccaaaatgtaattttgttgatatttagactggtgaataatggatcattgattaatttgtcgagacatgaaattgcaaatgtcgaacagtgattaagtacttgtgaaagacagtcatagtagtgaatcttcagcttgtcaccttgcttatagaagaggaccattccaaagaaggtacgagcaggttgttggtaaaattcatggcttacttgcactttggatttacctaatgatatattctctttaaaatcacagagaataatacactctcctacctttaactcatttttctaaataaaaaaaaaaaaaaattttcattaataaatcattagctaaatgtattaataaaattataattacacatgtcaaataatcattctttctttgctgaacaaacatcttgtgaatagtcaagatttcaaacagtttatgatcttgatctgaaagttgcccaaacttaattcgttttgactcgagagcctgatactgaacacacattggacacatgtcggttcgattcttcatttctctgacatactctggtacgaaactgtaaaatgcacttctacccatgagtggatacttgacttgatcaacttcactcttcttgaggtaatctgtaaagcaggtatttatgtttcctaaagcaaggttcttgattggcaccaactcgaaagctcgtttaccatctgcgtcgagttctttgctgtacaacctcatgtttttacttgattcttcagttatatctttcatattgaagtaaccttcgacggctgtccttagcatcgtggttctttgtcttcttgtcatttgtccattgtgtgtaaatttagatctccaattgctgatctcttctgcattaatcagtctacctgcaccatacttgtgtacgtgttgaattgcacgattccacgcattattatctattgtgattccaaactctctgatttccttagaagtgtaaaaaggaactaaacttgataacaatctagattgggaatattagtatcaatgatatacaaaatcgcgagcattacaaaacacttaccttgttttttcatatccatctctatctgtatattggccactctgaagtgatgaaataacatatgacaacgcaacagcatgtgtggttgctccaggtatctcttcatatatctccttatatcgctttctgaattcttctgttgcagctatactaccatctttctttaattcttcaagaacctgaatatatttatagttaaaatatgaacaataatcattcaaaacaacagtttatgatatgtatagtagtcaatagtgtacctgctttccagtggtattctttgttaaccaatctttcattaaatgtgtctgttgatcaatcgttactttgttatgtttttttggtgatgctattacatttactgaagttgttattaaatttaaaactttacttttattaccagacctctctgataatttactatagtccttataacgattactcttgactggtttagtgtttggatcactaactgattttattgaattcaacactccttgtgtataattattgaaagagggagccaatgatcgactattattactcttattttgttgtgtagttaatctgcttgccattttaaaataaaacttaattaaaataacgaatcaaaaatcaaatataaataattaaaaagaatcactaactttaaattttttttttttttaaaaaaagcaaaacacaaaaaagcatagccacatgataataagtattagtttgatgcacctctttaacaatatttctattaatgattaaatctatagattgttttattttttctttattattaaattttaatatatatattgtgttttgttttttaaataactaacttttgatccatgtataaccacattaccaacagtctacctgtttgtagaataccaaagaggttacgaggggtcataatgttcacgaattgattgaacattatattttctcgatatattttctttgacaatcgaaacaatgttgaattgctctaagcattattagttagctaaaataaaaccattggttttcaccatatcttgacaataattaaaaggttcacgtttctcagctgctcttctcctatagaattctctgaatgatgatgatggtttaaccagtcagttaatagttgtttaaaagtgaaaaaataaaataaatctatacctttataaatattacatccactatcctttttagccaatctatgattacatgtgcttgtttatatgtttattttactttttagttgagcaatagaactaattctgttattaaactcaaactttgtaattgtttctgttattgaaacgcatgctaatcggtcattgtccagtaattaacctttatttactaatttactacatgtatatcttggtgataaatattcaaataataattaaattataactatattttaaaagaatgaattaagatgtctgttttcttttgtttttattgcaaaaaaaaaaccaaaccaaaatataattaaaaaaaaatattattttcaaattcaacattttttttgcaaaacttagttttcatatgatccaaacacaaagtttggaagaaaattataaaaatatcccgatttagaatgtttgctaaatatattggtataatcataccaatcatattagatattagaaaaagattcttttttttttcttgatcctcaattctttgtaaaaaacttttggaattaagttttcaacctttctttgttaatacggagagaatttgcctcaatacaacaaaactatgcttttttgttttgatcaaaaccaaattttttcattttaatttttttactttacaaccttcaaatttaacaacaaatacaatcttcaaatttatataatagttattatttcttttatttttaaaatattattttttatatatttatctatttttattatacttattagatttctttttatttgtttacattttactcttacttatttttttgtttagttttatgaaaaaccttttttttaataattttttattatttttttatataatatttattgtttgtttaaatatgaaatatgtatattccaataatcaacatctatctgaaaatgagatcaaatcggaaactatcgtttatccgtataatcatttatatagaaatgtcaataataataataatcatctccaaaaaatttttattcaattatcgcaaattagtggattactttcctattgtttttcattaatatatcacgacattgtaaataaaatcgattttgatatgaaaatgtttagtcaaacatttaaaaaatcggatatcccagaggaatgggtggatattaggaaagatgaagcgagcattagtaaatttagattgctttttgcaaaaagtaaaatttcacacaatactgacctttgtgaggtgattcttttgcagttcctctctgacagtaaattgtatgatttgaaagataaggaaaaaaaagtaagatttaaaattataaattattcttatttctataaactaatcaattttattatttactctaatttagattattaaagagttaaaagaaagtgaaattgctaaagataaattcattttgaaaccagaagttcaaaagttagttgacaagtaagtttgtttttgtttttcgtattttttaaacaattaaattaataagaaattttttttttttttaaaaagattttttaattttgtagttgttctaccattactgagagacgaggagaatgagaattacaagtttctaagaaaactttatcaagatgtttatctggcatttctcaaggaacatggtttgggaaagaacagacttggaagtttgaatagagactggttcaacgagatggtcaaccaaatagtacgagaccacatgaagaatcaatccaatttgaatctgttgaatatcgaaaggataagtaaacacattatggagctgaatggttttggtccgatcgtaacatccatcaagaagtaccttcttgcaaagccagaggaaaccgtagactcggccttgagagagccttcaattttaatatggttacgacaacatgacgccacaatcaccaaagaatcgttcgaccgattcaaatctttcaaaaatgattttgaaacatacttggtgccagtgacaaaatctagtgaaacgaattgtacgagtgcattggaattcattcaatctattctgaatcatccaactattatttgtatgtatactttaattttatttaaaattttatttattatttttatttattttctaatttatataattttataaatcactttagtgcataatcaaagagtacttcaaaatatggaggagaagaagaagaagaaagagaaagagaaagagaaagagaaagagaaagagaaagagaaagaggaagaggaggagaagaagaatcaacacaataaagtcaattggaatcaacacacaattaatcaatttcaaaatattgaaaaagaatttggaaaatattacaatgaagacaattataaaactgaatctcaagcatggatcaactcaatcaaacaaccaacttcaccaattccactcaaaaataataattcgcaatggataaaagccaatgacaactacaacaaactaatcatgataaatgaatttataccaaagtttaaattggcaccacgcaactttattttatctacaaagtttctccaacagtttcttctacaattctataacggttccgatttcaatcgagaaggaagttatctggatcatctttcattattaatcaacataccggaacagttcaaacaaaatttttatacgtttaaacatcctcttaccgtttgtcaattcaatttggatcgtgtatcacattgtggacacgtgccaccagtagattcagtcgaccacaccaatgcacacacaatatgtatgtttgcagcatccaacaatttaactctaactgtcccgaagcaaaagaaagttggtgctatgctttgccctgagcactctacattctcgaagaagtgcaagctaagtaaatgtgggagccgctgcatttctaaattcaaggagtcggaatggcgtatccagagtatacgatgtggatcactggattccgaacctcatattgaaaagaagaaccaatggattagagacctatcaaagccaaattcaatcatagaggttacgtctcaaaaacaaacgtctatcaattggacatcaaccaacgcttcaaccgcctctgtgaaacccaaccaagaacatttcaattcaccattttttgttggctgtgatataaactatcaaggaatggaatcaattccaccgaattgtgatataggtgtcatattcagcgatccaaccagtaaatggcatgttggacttaccgcagatgacactgatttcaattcatcttttaaaaagctcggtaaaattattaatacggtgtttaaagataaaaaggtacttccaaaactctttataaccaatagttactcctctacaaattattcaccttttggaattccggagcaatcactacctcatatattggcatggttggatcagataattgaagggaaccacaaagtgattatattggcagattgggaatctcagagcttcatcttacatcttttctcgggcaagccaattcaaaattcactctataacatctcaaatcagaactctggtaatatcgaatcctacatcctttaccactctggacgaccaacaacattgttcatatttgccaaccatccgaccccaggagttatgaagcctgagttggaattggcaagcagactattggcgaagtatgatggagattccaaacatttcatactagatccagccaaggaaaagaaactgaattttaaaaccaaaccatcggatgctaccaacacagtcagttacgattatgatggtaatattaattagaatctattgattttaggatgattttatattaatattattttatcaaaactatatataggaccgactgtatctttgaatggaatcactttctccattacgtataagaaaccaaagacacgagaagatgatgaaagtattcatccctccaaacagccgtatcattcatcgcttaacgtggatcttaaagaattccaatacattcaagatatggtaaaggagtacaaatctccaccaccaccaccaccaccctcaacaactaaaacaacaaccaccacctcaacaacatctttatcaccaccaataacttctccaagtgcagtttcacctttaattccaaccattccaacattatcatcatcatcatccaagccaatacaattcaactataacaaattgtcggctgatacatcagcaacaagtaataataataatacatatgataaagatttcaaaatggatattgattctcaatctactttggcacatgtgtttccttcacccaagacatcaatggcatcatcttcacaatctagcactaccattcattcaacagcatccactacaaacagtgacagcagtactcattattacaatgatagtgatgaagaattcaatttattggattactaccagtattgtcttgagaataaattggaagatcaggcttttacaacaccatcaaagtcaacactacaaaagaattgtgagagttttttgccagatatatcctttgaactggagaggtcgtctttttccaatagtggctctctctatattccaccaccaccacctattcccgagaaaacttctaaatttgcatttgtaattcccaattcatcatcatcatcaacaaaatcattgatattaccaacatcctcattgtcagcaccatcatcatctaatccctcaccatcaacatctaatcccccaccatctacaacatcaccaacaacaaccatttcatctacaaaaccacaatcatccaataccttaccaaaactattaaaactcaaaccatcagcaacaacaaaatcattgatattaccaacatcttctttatcagcaccatcaccaatctctaattctttatcagcaccatcatcatcttctaattctttatcagcaccatcaccaacctctaattttttatcagcaccatcatcatcttctaattctttatcagcaccatcatcatctaatccctcaccatcaacatctaatcccccaccatctacaacatcaccaacaacaaccatttcatctacaaaaccacaatcatccaataccttaccaaaactattaaaactcaaaccatcagcaacaacgaaatcattgatattaccaacatcttctttatcagcaccatcaccatcctctaattttttatcagcaccatcaccaacctctaatccatcaccatctacaacatctacaacaacaacatccactaccgatagtagccgtagtagaattgaaacatacaatcatgtcgacaagcgaccaagaacgacgaattatattttccaggggaggtagattcgtcaaggaaagagacgaatatagccttcagtccaataacaactccacggctttagaaatggaaatggatatagattatccttcaacaacaacaacaacaacaacgacaacaacaacaacaactactactacaacaactcctaataataataatattaataataaatatatatttggaatcgattgcggaagatcatcacatgtatccatcgatgaacacggtaaaactcactcattctctgtccatgaacattatcttaacttaagaagtcgtttcaactcggaagctcaaaagaaaatgttgggtccagccatgttaaagtttgaaagtctaattccacctagtaagagtaagtaaactatcaccttttatttttaatatagattgatattaatttattatattatttattattttttctttagatatcaatgatatctgtttggatagatcactgattagtaacaggattagttatcttagattacacccaacaacaacaaaaaactatgtcaacattagattagatgagtacaacctaataatgaagaagaataactactacaataagcgtaaatcctacaattcaatggtggacaaactggttccaatcaaaaatagtatagtctttattggttctgccaagttcagccacaacagtcgtggccaatcttctttcatttcttcagccactctctacaagtgggtgaagaaaaaaaaacataaagcattgtggatcaatgaatgctacacctcaaaagtaagtacaacttaaattgtcacaaattataaatatattttttaataattaaataattaatcttttttttttttatatttataatataggttcataatgcatgttggaacaagacggaaaaggaaattcttgctaaacttaacaacaaagttagcaatatgaaagatcctccgccatgtgctctttcaagtggaccatactccaaatcagttagcatcgatagaaatcaagtagctgagtgtcacaagcaactatcaacactacaccagacagtcacaggatacatagatggtacgaataaagtcaatagttctactaataaaagtaatgaacgatttgactatatgaaacaccactctttgtattccaatcaaatgtctggaaacaatgtaaatgttgatggcttggctaaggatcatccgatcctgaaagtattccaagagaaaaaatggaaaaggccactctgtcgctgctgtggtcacttctaccaccgggataagaacgcttctagaaacatcttacttcttgggttactcagtgttcgatatcaattccgaccagtcgtgttccaatacatcaaatttattaacaaatagaattttacattctaacaacaagtaagttaattatttttttttagaaaaaatttttgacactaaccttcaattaaattttttttcacatttttttttcataatttctctgtcattcaaaaaatagtttcatattggaagagataaaataacaattttattatcccctaaagtgtgctaaattcgcgtaactaacaaaagttcattcttgggatttttcccaaaccaaatgttgtgtaaaaaaattaaaaaaaacgttatttctagtcaaaaaaaattgagtatttattaaatgtgttttaaattattaaatttgaataatggattgtggaaatacatattgcaatctttgtgaagagcgatgttgtggcaaaagcatttttgtttggttcttttttctttatagttcgtgttgacgttatttaaacagtaaaaacaatactcttgtcctccttcaatgtctattagatctggtgtgacaatggtgtatcttgtgtttctttcaatgcttgggtttttgagtagaattttgttaaccacttccaaaagatagtttttgaatcttagcgaattctccttttctgacgttgaggagctggtgcaattatgttctaaagattggaatgccacaaatgaattgtatagaattgcatagaaaatatcatttaatacgactcttgaatatgtgcgtgcacgatggatatttcttaacggattgatgatcatctttgttgaatctacataattgtggcagttattatacacccagacgactcttggtgttgttaactgttttgttgtgtaggttacttctccttttactgtttttttagtcctagaaactctcctcaattcatgtgttttatcttggcagattggttttggaatgttggtaaagaaaaatactgttttatctttcttggcctgccatgctattgctgtgtgaaacttattggaaccaaatgacatctctccttcagttgaaaagtcatttttctttcgattgcctccttttcttgacgggatgatttgatccataacctccttgcacttattcttagcaactgagacaatgaatgaataacctttgctttggaggtgcttaatattgtccatactgccaagaataccagcatcaattataatacatgtaccaaagttaacaggacaacctaaatgtttatccagtgcctcttcagttctcttgaggatctcttggtttaaatttactggaatgttctgagacttaatgatgttctttacatagtgctccaattcgaaatggtaaatatatgtaaaagagtccaccagtttccataatatgttgccaacagagtctgctttaccagctatgatctttttgcttccacccttgccagtccacttgtacaagtcatcgtcaaaagaaaaagtatctcctggggtccaattagctttgaatatatcatttacagcatccacaattggttggaaatcggtacttgtcaactttccatctttgtcaatggttccaaagcctttatagtgcaaacaacgatgaatagccttgaatttagagaatgatagaatattgaatactgaatggttgtaaaatgagatgttatcatcttttttccacaactcctccatattcggggtcctaacgaggccagcataaatgaatatagcaaggtattgcttaatatcatttaaactgaagtaggtgtagcgtgtataccatggaggttgctttctgtttctcagagctaccaatttataatgttcttgatattcattagttgatatgtgtagctgtgatagaaactctttaaagtaggtatcaaaaacaatttctattctttcgtggagagaaagggtattgtagttcgcgggaaccttaaacttgacaccttggctattgctagtcttcggaaatggattattcttgaggaaatcgatgttctccatttgttctggtgtaaatctcattccattgggcaagtattcaatattttgctgatagacagagccatcgccatcattacttggcactgcagtggagccaccatcaccatcaccaccatcactaccatcttcttcttcttctttctcctcttcttcttcaccaatgtattcttcgaactccatatccatcaaatgagaatagctctcctcttggtaaactacctcttcttggtttataaattctctaagtataattctacttgatttatttatgtcaaagttctggaatgtcataggttcgggaacgagtttaagtagtttaaataatcgatccaatgccactatatcattccatccatctctgacaaaactgatgatttcgtttagtggtatatcatattttctcacccagtttccaaagttgggatcaaaataaacattgtgatctatctttcctgttgacacatctttgttatgctgtaaagtaattataatatctttaaaacattaacaattttgatagagatttattaattaattgataaattaccttttacttcaacaagtttctgttttttattactactttgattcttttgactatttgattttttagccacagcaactccacctaaaaatgcaattaaaacaagtccaaatataagatataaatcggttatcgtaaaaccattatgattataagtgtagttcattgtgaaaaaaggtcaaaaaaagaacagaaatgatgatttggtaaaaaaaaaacaaatttttgtgttcgcgtgttgaaagatcaaaaatcaaaaaaaaattctcaaatttgtttcaaaagggttgatttaaaaaaattcaatttttttttttatttttccaactggtttcttgacggcaactgtgtctgggataaaaacacggtacacacactttaggggttattggtgaagcaattattttttgaaatttacagaatatccaccagagtttggatctttaatgaattgaaagttatctgtgctcaatccaaatttaccaagaaaagtattaccaagatcttttagtttcgacatcatctcttcacgttcacgatcctctttggctttgattatgggtggtagacgttgtgctgcctgtagagcgggttggaatcgtgggtcgatctccaagcatgctttgtagtcgctgagtgcatccgtcagtttctctgttgcttcgtatgcttgtgcacgacggtgtctcgacttcatttgtatggtattgctaggttgtaactcgagtgattcgctgcagtccgacacaaccaaatcatattgttttaaagccagatgtgatgccgccctattgcaatggtagactgctacctcttcattgcaaagcgaacgactctcttgatgatcttcatcttgatcatcgacaatctctacaatcttctttggttttgttagcaactctattgcttttgtatagatatcgatcgcttctttatattcagttgcaccatacaacatatttccttgtgctttcaaattgtttgctttctctatatcctctttatttgctttatatatctttttctctttgattatctctttcttttcatctttacttgtatttttattatcattatctttattttgattatcatttttttgatcttgactacctatatcatttgtatcattatctgtattacaatttgtatttactttattattatctatatctgactataatgaaaaaaagatagtaagtaaatatttaaaaattgaatttataaaaataaatatcattatttaccatctttattctaatataatatatattatgtttaaataaaattgaaaaactgattaattaaaaaaaaaataagcattaatcaaattaaatactaacacgattataaaaaaaaagataaatctttttttttttttttttttgttgttagattgattttaaaaaaaaagagtcagtgtgattgtattcagacaatcatctaattaatatgagtagtatcgatgaaatagatatctattctgatttagcgggtacttcaaatgtatctttgtcatatgaacaattggaagagaaacttgatcaattacagtcagagtttgataaacttaaacaagattctctaaattcaaatcaattattaaatacaactaaacaacaggtaactagctatcaatctattaataatatttaataaacaagaataactttattaacctttttttttgttcaaaaaagttacaacaaacaacagtacaaagagataatcttcaaaaaataaatgaaattctaatgaagaatatctcatcactctacaaaacagcgttagcagagtcacagagaaaagatagagaaatagaatcactcagagagcaacttgcaaacaacaacagtgcaagaaaacaaccatcattaccaaaaatcaacatcaagataatgaatggaaagtagtacttttctttatttataatcattaaaagatatctaaaatgtacataaatacaaagtaaaattaaaaattaatcttattgttgttttttattttattttatttttaaaagtgaaagtggtatacaatatcatcaaatcgtcataatactttattattataatgttgttattattattatgatttgattatttttatgttattattattgttgttgttatataaagttgtcgaatgatatgctatgttgatttttttaatttaatttgatgtcggctggagcgttgtagaagaaaccagcgttaaccaattcctttacgctactctccaagacgataaccgatttgaaacctttgctttgcaatttcaaagcggcttcacatgcaactgggtaacctttctcctttggaccgagtaagagcaccatcgatgacttgtcgagttgctccgatgatttgtcgaggtgttcgactgggtgactgactgaaccgacaaccgactctgcagcaaactcggcggcaggacggatatcgagcaaatagaaatcgaatcccatcattgcgatacggtggagaccggcagtggccagacgtgggatatgtgcatactgtgggaacgatggtgatttctgcttgtttggacgacgacctctctgtggtgatggtctggcaaccgatgccttgtatacatcctctttggttgcagtggtggtggtggtagtcgatgttgctgttgaatatgacttgattgcactgtagttgttacatttcaacagagatgttggaacaacaactgaattaattgtactgttcaacaaacaattgctatatgatgttctatttaatctaacctataattatattaatgaaaatcattaattttgttgttcaacctatgagcactcaatcaatcaaccaatcacaatcaaatttccaaaaaaaaaaaaaaaaagaggtagtaaatatctattccatctcttgttttaaaatgaaatgaatcaaactgtggtgcatccatttcaatatgtatctattgtttaacattaatattgtctacattttgttgtgtgatttaagattatattattttattgtttattggatatttctgctataataatgttttaatgtgttctatttgtctgtttaagttctctcactaatcaatagttgatttgagattactagtgataatgatgaattcttgaacgtttgctgattgactgattgattgcctgattgattgattgactatattaaaactaaacataccaattgtctaccaaacattttgattattattattaaagttattaaattatataaaaattaaaaagagatgctaatctgatggtatgagtaacaatgatcaaagtcgaatctcattaaaaaaaaaaaaaaaaattaaaaattaaaaattattttttgaaaaaaaaattgtggttttaaaaaacatcacaaacaaataataggtttaaacaccaacttatacaatcacatccaacgtacaccttataaagaaaatcaaatagagattaactttagtagttatctctcattgttattttaattttatttttttgtttttgttttcataacaaattagtttttttttttttttttttggtcaacaaatacattttttttttcaactattttataaaactaaagtacgagggaatcgagtcgatcgattcacattatatatatatatatacaagttcaaaataatatcatatagcataatattcgactattcttattattttaattatatagtatcgatatggatgcattggcatctctgagattgaaggttttgtcttcaaagaagaaaaagaatgatgacgataaagaagatggtgaaatagatgataatactcctttacagcagcaccagcagcaccagcagcaccagcagcaacatcagcaacatcagcaacatcagcaccagcaatttagaaataataataataataataataataataataataataataataataataataataataataataataataataataataatagcaatacatcatttcatccttttcatggtggtggtatgccaccactgccacctcccccacctcctcctttaaatcaatcaaacaacaatattcatagtcatcataatttaaatcatagccataatcatctatttgtaagtttctatgcatcgctagaacaatagtctatcatctccctctagttactaatgataaattgatttttagatacaagatagtatcatcgataaaggacccgttgatatggatttaacgaatgaatctgatatcaatatgttacatcatattcaacaacaacacataatgcaacaacaacaacagcaacaatcaaatcaattctttaatcaaggatttccacagaatatgttgtttaaacaatcaaactttgttacaccactgcctattccaccacctcctttcatcccaccaccactgccatctttccaacctggcaatggaatgtcttcacagtttatttcaccaacaatggtcgacaatttaaatatacagcaacaaattcaacaacaacaacagcaacatcaacatatgaatggttacctaaatggatcgagcaataatattaatagcaataataatatgaatatgaacaacagtaacaatggtatgaatcaagtcgaaaacttacaattacaacagttgttgcaacgacaacaacaattacatttattacagcagattcaacagcagcagcaacaacaacaacaacaacaacaacaacaacaacaacaacaacaacaacaacaacaacaacaacaacaacagcaacaacagcaacaacagcaacaacaacaacagcaacaacagcaacaacagcaaaatcaacaactagttggtgttacaccaaagaaacaaaaattagataacaagcgtgatttaccatcaccaccttctacattgtcggtgtcagctacttctccttcttctgttactccacctacagtttcaactccaccaataacgacgatcacctctgtaaacatgacaaagaaaaaggtaaagaaatcgataaagggatcatctggttctgtaccacctgtattgaacaagacatcagttatcagtacaaacagtattacacaacacagcaagaatatacctagtatgattatcaatgttggtgaggaagatactgacgatgataacgacgacctcaatcatcgacctcaatccaatcaacaaacaaacaatagcatcagcaccgccgatctgcttgaaaatgatgttagcaactatgaggttgaagccgcccaaacaggtcattttgatattgccaccgacgacttggtggacagcctcgctatggcaaagaagaaagagtacaccagcgagatggaggatctgaaacgacagatcgctgccaaggaagaagctctattgcgaaagaagttggaggagagaaagaaatcaaagttatccaccaccaatacaccatcgatgtcatcagtcgccaccgagccaagcgggttgtcgccaatgaatacagcaccaaccaacgcatctgccacccttatgctctcgtcagacgacggttctcagtcctatgacaatcacaacaacaacaacaaccacacaaccaatatagctagcgataacaacatcaataataacagcagcagcaacgatgcaccctttgagagtatagacaacagtcctctgacgaacgacgcattggccgaagaaaagtctgctatgaaaaagttaacaaccgatcttgttgaaaccaatcgaatgatggtcaagagtgaaggtgagatattcagaatcgaactagagttggccggtgtcgagtgtcaccgtaaggagttggagataaagatcaaccaactcaagcagacactcgagatttaccaagctgacttggagtcaacagagaaacaagctgaggaattccaatccaaattggaatcactacgatcaacttctactctgttactcaaagcatacaacaacaagattaagacaatcaatcaaaagaaacgtaaattcgatgaactaagagaatcattcacaatggatccatttttattgtccgtagtagacagaacaaccaactcaatcatcctaactccacacaatcagaaaataatagacgaaatttcaaccaccccaattttatcacattcaagattatctagatttaccaacaacaacaacaataataataataataataataataataataataataataataataataataataatcatcaatctttaataacttcaacttctctaccctccaatacaacaacaactacatcaaccacaacaactacttcaaataataataatgatattaatagtccagagttaaatattgtaagtagaacagctgatgatagtaatagtttgacaaatgtttctagacctaaacgtgttatctcggtggtaatgaatccatctataaagaaatctagtaatgttatagatttattacttcagggcaaaacattggatcaatttatcgatagaatgataaagtatagtgaaatcatagtgctgcctaaagtaccagctggtagcggtgaggctgattcaatggacatagacaatgcactcacagtttatgttgccgagcagccaacctctgtttggtgtagcaatgatggttccacagatttacacaaacccattatgaagagtatactgcatggtgtagttcccgaaaagttagagaccatcttgaatccgatgaccatcaccaatacctacgtcggaaacaagccaatgcccaaagggaaataccagtcgcctcttatgtgtctccgatcctaccgattctcccatacctacaccaagttttgtccatttacactgacctcctctatgtactcgtccaagttgaatccaaagaagaaactctgcatgtatgaacttgatggtgtctgccgtgatcctaaatgtacattccaacatcaacgtgattattcaatgtccagtaagtaactctgaaaagatgagacattatcaactgatcaactaaccctatctatctatttctagataaggaaattattgaggatattatttcctatgccaacgataaggtagtagctgttcgaaaggaatgtatgatgttgttggatcaaaagaaagaggattcattccctcaatcattgaagaaagcattttttaatgtgatcacagagaacaaacaactcattcttcaagttggaccatcacgtcagaaggtattggatcaaagaaatcaacagttcttgtctgaatcgattgccaagagtaaaaagaaaaagaaggaagctgtcgtttatcaaccaatcaatcgtttgcctcaggttcgcactgttgtcagttcaacggtagtagaaaaaccagagacagaagacttcctcaacattgagaaatatgttgagattgtcagacgtgagaagcacaacacttctaattcacataaagatgaaatgagtgatgatgaagcaccgcctccctccgttccgctcagctcaacaactcgatcgatcaccactggcgatgacaaatcagctgaagagcctgtcgattcacat

SEQ ID NO: 111 - DNA, 20504 bp, unidentified
  source 1..20504: mol_type = other DNA
  misc_feature 1..20504: note = Fanzor polypeptide
ttgattgttctgttgattgcactgtagtgttgtgttgaataggagtatggagtggtgtttgggttggagtttggattggtgattgagatggagtttggattggtgtttgggattgtgttggaattggtgtttggattggtgtttgggatggtgtttgaattggtgtttgggatggggattggattggtgtttgactatttacatgagttgatttgtgatgtttttgattgtccattgattcttgattattatcttcttctcttattcttttttttgttgaattgttattattattattgttattgttatttatttggttatttatttggttatttatttttttatgttgactattattgtcacaatcatcctctctttcttttcttttaccactataaatcaagctcgatccgatatcatgatcatcgtcaccaaaatcaatcgattcgatatcaaacaatggtttactttgggtattttgtgtattattatgtgtattattatgtgtattatgtgtattattctgtgtattattctgtgtattaatttgtttattattttgtgtactattttgtatattatcttgtgtattattctgtgtattattttgtgaattagtctgttttgttttctttgttcctctgtagcctcttcttcttttgtttgtaccagagagtgtttggtctggtgtagttgtggtagctggttttggtgaagattgagatgaagtagaagcagcttgtgaatttgaaagtgttggttgagatggtgactgaggtgacgaaacaatttgttgtgttcttgaaggtgtgggttgtggagctaatttagatgttacattggcataagtatttataatatcgctcatctcttttgccttttccttatttgattcgtctacattcttggcaatctcattcatttctatcatggtgtttagataggtggtatgtgccttatctcgagctggtttccaagactgtgcctcctccttggtggtcgattcgtagcctctggaaattgtagtctctttaccaacttgacttttcatagcagaatatttgtagatagtcatttttgtcaacttcatttccacccatgaatttaatgtaatgtttattggcacgcatcttttttttataaaaaaatattgattaataattgttttgaatacaaattatataattgattaacttactgatctattatctaaaaactggaaacgatgatactctgtaaaaccaggaaagatctttatttctttctgtttcaattcctttgggttatgaatttcgactgttactttgatggtaacagcctccttctctgattcagaagtcaatttgtatgttctttgatagttgttgttgtcagtggtactcttgattgcattgataacatcttgatctgtatagattgaatctttgaaactcgacttgtctgctatcgctctagaaaccattgaaaaatgttgatcgcattcactctttccgtgatagggtgcaaaagtattcaattcgacgagatactttcttttggttttgtttggagtgtttggatcagctacttgcaactttgacaatgtatgcatatatgaaagtatttcatttgacttgaagtgtctagcattatcacaccaaaatgtaattttgttgatatttagactggtgaataatggatcattgattaatttgtcgagacatgaaattgcaaatgtcgaacagtgattaagtacttgtgaaagacagtcatagtagtgaatcttcagcttgtcaccttgcttatagaagaggaccattccaaagaaggtacgagcaggttgttggtaaaattcatggcttacttgcactttggatttacctaatgatatattctctttaaaatcacagagaataatacactctcctgactttaactcatttttctaaataaaaaaaaaaaaaaatttcattaataaatcattaactaaatgtattaataaaattataattacacatgtcaaataatcattctttctttgctgaacaaacatcttgtgaatagtcaagatttcaaacagtttatgatcttgatctgaaagttgcccaaacttaattcgttttgactcgagagcctgatactgaacacacattggacacatgtcggttcgattcttcatttctctgacataatctggtacgaaactgtaaaatgcacttctacccatgagtggatacttgacttgatcaacttcactcttcttgaggtaatctgtaaagcaggtatttatgtttcctaaagcaaggttcttgattggcaccaactcgaaagctcgtttaccatctgcgtcgagttctttgctgtacaacctcatgtttttacttgattcttcagttatatctttcatattgaagtaaccttcgacggctgtccttagcatcgtggttctttgttttcttgtcatttgtccattgtgtgtaaatttagatctccaattgctgatctcttctgcattaatcagtctacctgcaccatacttatgtacgtgttgaattgcacgattccacgcattattatctattgtgattccaaactctctgatttccttagaagtgtaaaaaggaactaaacttgataacaatctagattgggtatattagtatcaatgatatacaaaatcacgagcattacaaaacacttaccttgttttttcaaatccatctctatctgtatattggccactctgaagtgatgcaataacatatgacaacgcaacagcatgtgtggttgctccaggtatctcttcatatatctccttatatcgctttctgaatttttctgttgtagtaatactaccatctttctttaattcttcaagaacctgaatatatttatagttaaaatattaacaataatcattcaaaacaacagtttatgatatgtatagttgtcaatagtgtacctgctttccagtggtattctttgttaaccaatctttcattaaatgtgtctgttgatcattcgttactttgttatgtttttttggtgatgctattacatttactgaagttgttattaaatttaaaactttacttttattaccagacctctctgataatttactatagtccttataacgattactcttgactggtttagtgtttggatcactaactgattttattgaattcaacactccttgtgtataattattgaaagagggagccaatgatcgactattattactcttattttgttgtgtagttaatctgcttgccattttaaaataaaacttaattaaaataacgaatcaaaaatcaaatataaataattaaaaagaatcactaactttaaattttttttttttttaaaaaaagcaaaacacaaaaaagcatagccacatgataataagtattagtttgatgcacctcttcaacaatatttctattaatgattaaatctatagattgttttattttttctttattattaaattttaatatatatattgtgttttgttttttaaataactaacttttgatccatgtataaccacattaccaacagtctacctgtttgtagaataataccaaagaggttacgaggggtcataatgttcacgaattgattgaacattatattttctcgatatattttctttgacaatcgaaacaatgttgaattgctctaagcattattagttagctaaaataaaaccattggttttcaccatatcttgacaataattaaaaggttcacgtttctcagctgctcttctcctatagaattctctgaatgatgatgatggtttaaccagtcagttaatagttgtttaaaagtgaaaaaataaaataaatctatacctttataaatattacatccactatcctttttagccaatctatgattacatgtgcttgtttatatgtttattttactttttagttgagcaatagaactaattctgttattaaactcaaactttgtaattgtttctgttattgaaacgcatgctaatcggtcattgtccagtaattaacctttatttactaatttactacatgtatatcttggtgataaatattcaaataataattaaattataactatattttaaaagaatgaattaagatgtctgttttcttttgtttttattgcaaaaaaaaaaccaaaccaaaatataattaaaaaaaaatattattttcaaattcaacattttttttgcaaaacttagttttcatatgatccaaacacaaagtttggaagaaaattataaaaatatcccgatttagaatgtttgctaaatatattggtataatcataccaatcatattagatattagaaaaagattcttttttttttcttgatcctcaattctttgtaaaaaacttttggaattaagttttcaacctttctttgttaatacggagagaatttgcctcaatacaacaaaactatgcttttttgttttgatcaaaaccaaattttttcattttaatttttttactttacaaccttcaaatttaacaacaaatacaatcttcaaatttatataatagttattatttcttttatttttaaaatattattttttatatatttatctatttttattatacttattagatttctttttatttgtttacattttactcttacttatttttttgtttagttttatgaaaaaccttttttttaataattttttattatttttttatataatatttattgtttgtttaaatatgaaatatgaatattccaataatcaacatctatctgaaaatgagatcaaaacggaaacaatcgtttatccgtataatcatttatatagaaatgtcaataataataataatcatctccaaaaaatttttattcaattatcgcaaattagtggattactttcctattgtttttcattaatatatcacgacattgtaaataaaatcgattttgatatgaaaatgtttagtcaaacatttaaaaaatcggatatcccagaggaatgggtggatattaggaaagatgaagcgagcattagtaaatttagattgctttttgcaaaaagtaaaatttcacacaatactgacctttgtgaggtgattcttttgcagttcttctctgacagtaaattgtatgatttgaaagataaggaaaaaaaagtaagatttaaaattttaaattattcttatttctataaactaatcaatttttattatttactctaatttagattattaaagagttaaaagaaagtgaaattgctaaagataaattcattttgaaaccagaagttcaaaagttagttgacaagtaagtttgtttttgtttttcgtattttttaaacaattaaattaataagaaattttttttttttttttaaaaagattttttaattttgtagttgttctaccattactgagagacgaggagaatgagaattacaagtttctaagaaaactttatcaagatgtttatctggcatttctcaaggaacatggtttgggaaagaacagacttggaagtttgaatagagactggttcaacgagatggtcaaccaaatagtacgagaccacatgaagaatcaatccaatttgaatctgttgaatatcgaaaggataagtaaacacattatggagctgaatggttttggtccgatcgtaacatccatcaagaagtaccttcttgcaaagccagaggaaaccgtagactcggccttgagagagccttcaattttaatatggttacgacaacatgacgccacaatcaccaaagaatcgttcgaccgattcaaatctttcaaaaatgattttgaaacatacttggtgccagtgacaaaatctagtgaaacgaattgtacgagtgcattggaattcattcaatctattctgaatcatccaactattatttgtatgtatactttaattttatttaaaattttatttattatttttatttattttctaatttatataattttataaatcactttagtgcacaatcaaagagtacttcaaaatatggaggagaagaagaagaagaaagagaaagagaaagagaaagagaaagagaaagagaaagagaaagagaaagagaaagaggaagaggaggagaagaagaatcaacacaataaagtcaattggaatcaacacacaattaatcaatttcaaaatattgaaaaagaatttggaaaatatcacaatgaagacaattataaaactgaatctcaagcatggatcaactcaatcaaacaaccaacttcaccaattccactcaaaaataataattcgcgatggataaaagccaatgacaactacaacaaactaatcataataaatgaatttataccaaagtttaaattggcaccacgcaactttattttatctacaaagtttctccaacagtttcttcaacaattctataacggttccgatttcaatcaagaaggaagttatctggatcatctgtcattgttaatcaacataccggaacagttcaaacaaaatttttatacgtttaaacatcctcttaccgtttgtcaattcaatttggatcgtgtatcacattgtggacacgtgccaccagtagattcagtcgaccacaccaatgcacacacaatatgtatgtttgcagcatccaacaatttaactctaactgtcccgaagcaaaagaaagttggtgctatgctttgccctgagcactctacactctctaagaagtgcaagctaagtaaatgtgggagccgctgcatttctaaattcaaggagtcggaatggcgtatccagagtatacgatgtggatcactggattccgaacctcatattgaaaagaagaaccaatggattagagacctatcaaagccaaattcaatcatagaggttacgtctcaaaaacaaacgtctatcatttggacatcaaccaacgcttcaaccgcctctgtgaaacccaaccaagaacatttcaattcaccattttttgttggctgtgatataaactatcaaggaatggaatcaattccaccgaattgtgatataggtgtcatattcagcgatccaaccagtaaatggcatgttggacttaccgcagatgacactgatttcaatccatcttttaaaaagctcggtaaaattattaatacggtgtttaaagataaaaaggtgcttccaaaactctttataaccaatagttactcctctacaaattattcaccttttggaattccggagcaatcactacctcatatattggcatggttggatcagataattgaagggaaccacaaagtgattatattggcagattgggaatctcagagcttcatcttacatcttttctcgggcaagccaattcaaaattcactctataacatctcaaatcagaactctggtaatatcgaatcctacatcctttaccactctggacgaccaacaacattgttcatatttgccaaccatccgaccccaggagttatgaagcctgagttggaattggcaagcagactattggcgcagtatgatggagattccaaacatttcatactagatccagccaaggaaaagaaactgaattttaaaaccaaaccatcggatgctaccaacacagtcagttacgattatgatggtaatattaattagaatctattgattttaggatgattttatattaatattattttatcaaaactatatataggaccgactgtatctttgaatggaatcactttctccattacgtataagaaaccaaagacacgagaagatgatgaaagtattcatccctccaaacagccgtatcattcatcgcttaacgtggatcttaaagaattccaatacattcaagatatggtaaaggagtacaaatctccaccaccaccaccaccctcaacaactaaaacaacaaccaccacctcaacaacatctttatcaccaccaataacttctccaagtgcagtttcacctttaattccaaccattccaacattatcatcatcatcatccaagccaatacaattcaactataacaaattgtcggctgatacatcagcaacaagtaataataataatacatatgataaagatttcaaaatggatattgattctcaatctactttggcacatgtgtttccttcacccaagtcatcaatggcatcatcttcacaatctagcactaccattcattcaacagcatccactacaaacagtgacagcagtactcattattacaatgatagtgatgaagaattcaatttattggattactaccagtattgtcttgagaataaattggaagatcaggcttttacaacaccatcaaagtcaacactacaaaagaattgtgagagttttttgccagatatatcctttgaactggagaggtcgtctttttccaatagtggctctctctatattccaccaccaccacctattcccgagaaaacttctaaatttgcattttgtattcccaattcatcatcatcatcaacaaaatcattgatattacccacatcctcattgtcagcaccatcatcatctaatcccccaccatctacaacatcacccccaccatctacaacatcaccaacaacaaccatttcatctacaaaaccacaatcatccaataccttaccaaaactattaaaactcaaaccatcagcaacaacaaaatcattgatattaccaacatcttctttatcagcaccatcaccaatctctaattctttatcagcaccatcatcatcttctaattctttatcagcaccatcaccaacctctaattttttatcagcaccatcatcatcttctaattctttatcagcaccatcatcatctaatccctcaccatcaacatctaatcccccaccatctacaacatcaccaacaacaaccatttcatctacaaaaccacaatcatccaataccttaccaaaactattaaaactcaaaccatcagcaacaacaaaatcattgatattaccaacatcttctttatcagcaccatcaccaatctctaattttttatcagcaccatcaccaacctctaatccatcaccatctacaacatctacaacaacaatatccactaccgatagtagccgtagtagaattgaaacatacaatcatgtcgacaagcgaccaagaacgacgaattatattttccagggaggtagattcgtcaaggaaagagacgaatatagccttcagtccaataacaactccacggctttagaaatggaaatggatatagattatccttcaacaacaacaacaacaacaacgacaacaacaacaacaacaactactacaacaactcctaataataataatattaataataaatatatatttggaatcgattgcggaagatcatcacatgtatccatcgatgaacacggtaaaactcactcattctctgtccatgaacattatcttaacttaagaagtcgtttcaactcggaagctcaaaagaaaatgttgggtccagccatgttaaagtttgaaagtctaattccacctagtaagagtaagtaaactatcaccttttatttttaatatagattgatattaatttattatattatttattattttttctttagatatcaatgatatctgtttggatagatcactgattagtaacaggattagttatcttagattacacccaacaacaacaaaaaactatgtcaacattagattagatgagtacaacctaataatgaagaagaataactactacaataagcgtaaatcctacaattcaatggtggacaaactggttccaatcaaaaatagtatagtctttattggttctgccaagttcagccacaacagtcgtggccaatcttctttcatttcttcagccactctctacaagtgggtgaagaaaaaaaaacataaagcattgtggatcaatgaatgctacacctcaaaagtaagtacaacttaaattgtcacaaattataaatatattttttaataattaaataattaatcttttttttttttatatttataatataggttcataatgcatgttggaacaagacggaaaaggaaattcttgctaaacttaacaacaaagttagcaatatgaaagatcctccgccatgtgctctttcaagtggaccatactccaaatcagttagcatcgatagaaatcaagtagctgagtgtcacaagcaactatcaacactacaccagacagtcacaggatacatagatggtacgaataaagtcaatagttctactaataaaagtaatgaacgatttgactatatgaaacaccactctttgtattccaatcaaatgtctggaaacaatgtaaatgttgatggcttggctaaggatcatccgatcctgaaagtattccaagagaaaaaatggaaaaggccactctgtcgctgctgtggtcacttctaccaccgggataagaacgctgctagaaacatcttacttcttgggttactcagtgttcgatatcaattccgaccagtcgtgttccaatacatcaaatttattaacaaatagaattttacattctaacaacaagtaagttaattatttttttttagaaaaaatttttgacactaaccttcaattaaattttttttcacatttttttttcataatttctctgtcattcaaaaaatagtttcatatctcacttaaactaaaatgggtatagggaactttgtcaatttctcctccctgtcactttttgtgtttttataaattttaaaaaatttaaaaatttttaatattttaaaaataaaagaattagttgattttattataaaaaatttaacgaagaggactttcactgatattgcgattagtaagccatacacatattgaaaaaacctgtatatgtttttcaaaatctgctctgaaagtttgagatacgattttaaaaatttttaatctactaaagaaattctccacaattgctctgtttgaacagatgtacaaattccagagtttttcttctttagataggtcacctgtatctttgcatgaagttaaaatataaccattatattcttctccaacataccctaaatcggcaataatagcttcggtatcttcaagctcttctataatacctgaatcagcaaggattgaataatcatgtttactacccatacacggaccatacactctatatgctaaaccatcttggagaccaattgccacctcgtatttaaaaccatgtgtggcatgttttttactatagagtaacttattgtctggatcatgatagtctggagctgggacagggcacaaagttgtatccaatgctaaatacgcataaacattgtcattgagagtctctgttttattctttttaaatcttcttgagttcgaagaaaggtgctaaattttaaaattgttgtatatacatttactttgaatttatcaatcgagaattgcttaccaaaagatcttttgatattaggttgttcaattttttcgaaacataccaaatcttgtctctaatgtgtttttcacttcgatgaaacttggaacaaaatttcgatattggtatattatttcggaagtaatacagcatccataataaccaatccattttgacgccatgaggactaagcatttcaaaaagaatattggctgtttcgggtgaacatccataatctgatctgaaatgaacttcactatctttatatataaacttctctgaataattcattctctgtttatcagataaacaataaatataataaattaatatttgtttaatgtagcagagtataatagaattatgtgtgttttgagtaaaatgtggtataataatatttgatttattcaccttttataataatttattttaattcaccaatttgttagggtgttttatgtgtggtttaactcattttacagaataaaaaaatttcaaaaatgggaacaaattaatacctacggtggaggataccagatttagagtttctaacaaatgttagcacctatttcccaacattttatattgagtttcatataaaatctagggaaaaggttaggaactaatacttttgatatatctttttcaatctttgagcaatcgaattttaaatttataaaacatcattttcatttcatttcaaatgttttttttttttcctaacattctttagaaacttttaaagtttatagtataatttagtatgggtactttttcatctgaagaaattacaataataaaaaacggtatagaaaataaattatcagataaagtaataatagataaaataaataaaatatcctcaaaaaatcatcatcagtcaacaatagaaaaaaaaataaaagaaatgaagagagcagcaaagaaaactaagggtagtaccgctcttaagaaagtcaaaagttctttagacaagagagataatgatattgatctagaagaggattcagatgaatactcagatgaagaagattatccagtaccaaagaaagaattaaagagtaaatgatattctttgaattttaaaaaggaaataacttacaatattttttaaaacaggacgtcaacctcttattgtacccaccttacctacctaccaacctctagtccctgctaaagagaataaaagtttaatggataattggattcaggattcaaagcaagatttcgaaagctataaggtttttgcccaaccaaaacacataggaaccccattagttattgattgcccaagagctgtgttagtgctctacccagaaataacacaaaaagataagtcattagtggaaccagttagcttcaatattctgtcgtctaacattctagtgataagatggcaacaaatgccaatggagaacttacaacatataattaatattaactccaatgcacttgacattaaaaatactatttatgaagaaaaagtatggtatttattaacaattatatcaaaaataacaatttttctaatgcaatattcttatttaatacaatcttagattcaactcccatttttagaaactggatacatttactcagatcctagaagagtagaacatgactgttttatcaacggattgttctcaaaacaaaaacaaatgaggtgagtcctggaaatccacaacaagcaatcatggcgatgatggctcagtttctcccacaattaaccggtcaagctgtaccacagcaacctcttcaacaacctcctcaacaacctcctcaacaacctcctcaacatatagatgatcaagaagaagaggtattaagaaacaataatgcaactagaggaagaggaggaagaggaggaagaggaggaagaagatccacctcgaggcggaggtagaaggtgaactaagtattaatacaataaaatttgttaatttattactttttaaaatattcatacaattgtaaaagttccctaaacccaatgtgtataggaattagtaagatataaaactatttgttcccaagccatcaaagatctttttgatcattctattattttttgtagaaaagtacacttgcaagttttgattaatcaaacagtttattttaagatcctctttatatgacgtattagaaaaaacacatcatcaatcaagtgacatcctatgttattgagacttaaacaaaagtttacaaattctttgattctgttaatcttttcaacaatttaaacagattaataatgagaaaattaaaagattaggaacattactgttatcgccgaagatcttattatcaaaaagaatgatggaacagtttggtaatttacgactaatctattttttttaattaatttttttagtataaatcaaaggtttgtgaatgtgtgtttaatcatttaaattgttgatagaaaagttaaaaataattatttagatttgtataaaatagaattaatcaaaatgagtgttatcaagttacctattcctccattcgacgatgttacagcacgtgaaaaagtaagattggccgaagatgcatggaattcacgtgatccgacaagagtatcacaagcctacaccgttgacaccaagtggagaaatagatcagagtttatcaatggcagagaacaggtagttgaatttctcactagaaaatggcagaaggaacaagagtatcgactgatcaaagagctgtgggcatacaaggacagccgcattgcagtgcgctttgcatacgagtggagagatcatagcggtcaatggtggcgttcctacggcaatgagaattgggagttctcacccgaaggtttgatgcaagtgcgttacgcttgcatcaacgatcttgccatcaccgaacaacaacgactctaccattggtcacaaggaagaagacctgatgatcataaatcattatctgaattaggattataaataaataagtaaataagtaaataaaagtgtatatgtagatattgatattataattgttttgttttgtttgtttttattaaataaatcttaattattcaatctaaatccattctattattgttgttgttgttgttatttgagttatcactgagttgtttcattataaaagatacagtgtcaaagagttgaaggaattcctctgatccatcaacaagatttctatcgacatcaccaatcttcatggcaataagtgctttttgtttatcggaaaatgatttatgatttgtgacttggtcgaatatctgtacgagtatttgtgatgccggatagccttttgtaaccaactgttgtagattcgattgtagtttatcatatgaattcgatttacatgtattgattaatgtttctattaattttggtggtacagtctgttataacaagaattaacatgaacaataacatagatgtgagatgtgttagtttaactaaagataaagacatctaataataataataataataataataatcaattgataattataacttacacccgatatattataaatgttatctggtgtcaattctcttgaaccgtagaatctataggatgattggaggtaggtgattgcctttctgagatcaccgtcggatacggcgtgaatcgcttggtagacctcgtctttgacgggtggcatcgattccgacgaggcaatgtagcgcagacgttcaatcatggcggtgtcattcagtgatttgaaacggaatttggcgcaacgcgaagagagtggctcgataatacgtgttatatagttgcacagcagacagaaacgtgttgtcttactggtgtactcgatgatacgacgcagtgcagcctgtgcatcgtgtgtcatactgtcggcttcgtccagtacgatcaacttgaaggcagccgctggcttaccgttggtcagtgtattgttctggctgacagagaaactagcaaagttcttaatctttgtacgaacgacttcaatgccacgctcatcggaggcattcaactccaacactctgtctttatacaactctggaccaaacagatccattgcaactgccaatatagtagatgttttacctgtacctggtggaccataaaataataaatgtggtaactatatataacaattgtacagttaatcaagtttagttatctaacaatttgtatatatatgtgaattattaattacatttcctgtttctaatgatctttttaatgctttaacaacttcatcttgatgtgatacttcatcgactgttttaggtctactataatgtttgttttcgaataaaataagttagtttgatgagcttttacttgttaacaatattgaatattacttactatttattaacccatggttctacaggtctatatggtgtgttttgatttgttgattttgacatagttattgttaacttataatataataaatgtgatctttaaatttaattaaaaaaaaaagatggtatgcttatcaagttgtttggcgcctctttttcaaatttttaaaaaataacacagttcgaatatactaagaaaaataaataaagactgatcttgttgattgcaatgaatgactgtttttattgtcaatcaatcaatctcaatcaattagatatatacatatattaattatcattataatgtttaattatttttaaatattaatacaaagtaaaatcaataatggatcaaatattaaaagttttggatttatcgattggtagtagtggaaagggtggtaagcaacagcagcaagcaatgttggcagaggttgagaagcatttcactacactgattaagctactgaaggattcggtagacaaggatgaaccgattccatttctaaagaatgcttccaatgtcagttcattcctcaaggtattcaactactacatctcgtcatcgaacaaccagcaaggcaatgataagctggccatcagttcactacgttcactcggctacttcctattctcacagtctatagtttcgttattgttagacaatcaaattcgagagatttcaacattactggaaaacaccatacaaattacaaagaaaaaggtaatttatttcaactctataatcttaaatttagttagtaataggttgttaatttattttttaaaaaaaatgatagaatatatgtaattatgcaatttggtgtttatcatcacaatcattacctaaaggaccaatcacctcaaagctggcacagacttattgtacgatcttggaaactacaccattcggatcgaaaaccattgaacatgagattattgtatcatttacaaagatcaaccaacagaatccagatttatttgtaccgtcctatcatatctggatacctatactcttgaataaattgttgaatacagatgtcagcataataaaagatagcatagagattgcgtaggtaaatcataaagttgatgtttatgttatttcaaacttactaatattatttgaattttactcttttctagatgctctgaaaaaatagaggacattttaaagtcattgatttcatcaaactccactatcaatcagaatgagcaattaagaaaagcattggtggatggacatgctgaagcaatcgaaaagatgaacaatctgtacgaatcatcaaatcatttgtttgccattagagtatggggatattatgtttatttcttgggcgaaggtttatttacaaatggatcggtaattaactctcttttgaaattaccagaagtaagtaattatataattaaaaaaaaaaagcattatcaattttattaatttttcataatttagaaaacatttgtacataccaatgaagaaattagattccagacattccaatcgtggagatatttaattgatagtgtccagaatgagtcattattgatgccaaagagattgctattaattacaagaccaatcactgctggatttaagcagactgaagttgatcagtcctgttttctgacatggatacatcttctctctgtgattggatcgactaatattgtcaatttattcccatatatattctcaccaattgtaccattggcactagaggacgccaatttctccaattattgctataccattatttgtaagttaaaataataatatcaaattaaaatatttatttatttttttatttaaaatatatattacaggcgcattgttttcaaaggagaattcaagttttaataataaattaaaagttgattttcaaataagtttgaaatcgatgccagagttgagcggacaatggttattggcaaacataaaggtaatcattcaggttctacagtatttccgtgtcgatcacagtggaaagagtttgagttcagaaacacaaaagctgaatgattcaatcaccattgaggatgcagatctactccagaccaatcaactgcgtgagagaatcgagatttggagttcaatgctcgagagagttgcattggtcgataccaaagattgtaattcagtagccctcacccaattggttttgaaatcaatggaagcgatttcaaacagtgctattgaatttaccttggctcaccacaatgaaaccaccaacgaattcattattcatttcatcaagagtgtacataatatagtcattcgaatacttcctaaatcaatcttatattctcaggaatataaaactcaaaagttaccggatagagatgatagtataatgattccatatggtatgttttttttattctatttttttttcaattttgtttacttattaaattatcaatttataactgtagatttcattttagtaaatttaatagaagttggattaattgacaaattaaatattggtttatcattgcttcctattattaatgaaataatacaattttcatgttcaaattctcctgatattgtaagtaatattattttatgaatccaacatatattaattatattaattattatatagtcgtctaaaataaattcaattttagatatattttatccagttttaataaagaaagagttggacattaaagatttaaagtttattattcaattttgggttcaaaattgtatgtacaattttatttaaatttagatttttagataattacaattctaactaatatatatgatagcatctattgtacagaattttatagatagatcacaacagatctcatcgaattccattggaagttctaaatccatcaatattaaatcgattttattatggccattgaaggttgtgtcactctgcgataattgggatactagtaaacaaaaagaagacgatggtgatagtgagttgtctataatttgtgatagtttggttcaaagttggaaatcactattacaatcattccaccgatacagctccatacgaacttcatcgaatcctctggtcgagcaaatcattgacggcattgaatcatcaaccaattggaaacacccatcgaaccttgagatttacgttggcgtagtttcaactcttctctcaattttagatcctacttcatcaacatcatcctcttcctcaaagaaaaagaatgaccaaatggaggcattgtaagttttattacattcacctaattaattagtaagccatcacaaataattaatatttcaaatctctttaaagtttcacacatatattttcatttataaacaagatattcatgttggtcgatggcaataaatatttaccagtattactgagtccgttggtttcctttgtaaagaaaattcagagttcatcactcttaatattatttatcaatgaaatgtcgtccacctaccacattatattaaagtgtattcaatccgaattgaacacctcttcgtcacaacaacaaaaagagcatctggccagtttcaaaaagatatgcaaccaatcatggcactcactactcgacgtttccagtaaagctgtaggtacaaaccacgagcaaggagaccagctactccttgcaatcggtgaacttctcaacacagcattcttgtccaagcaaacacttgtcacagagaaaacattggatttctggaattccacttttggcgatcgtaaacatctcaattactcctccacactttggactacactgagtgccgtcaagcgaaaagttgacattaaacttccaccaagagagaatccgcccgatctagacgatagtttcgacgacaattcaaaccgtatcataccagcagccacactcggatcctttcaaggttcgttacaattgttaccggaaattaagatggcaccaacagattttcaatttgatagagatcatattatgaaaaagaataacaaagataataataataataataaccaaagtaataataagaataataacaaagttaatggaaaagaaaaagaaaaagaaaaagaacaacctcttaaaaggaagaaactttcaccggatcaaaaacaacatgaggagatagatcaaaatgaaaccaaagagattttgtttgtgttggattcaccagttcaagcttcgaaaaagagttcacctcagaatagcagcgccaatagtacaccaaatttacaaatagcattgtgtgatgatagcacaatggagatggacaacatcaatcatcaacactccaacgactatcaaaaggaagagtacatcaagactcaattgactatgatgtcgactctgaactttgaaaactttagcaaccaatcactcttggaatatcaaggacttgcattgttaattgcaaatgaaatcaatggtaccttacagaaaagactcgcaaaataataataaataaagttgaaaatgaaaagagtgttttaatattaaaactatttatataaaatgacatttctttatttgctgttttttttttccagaagaattaaacatattgatattcaaataagactgatccacaatcatatctttcaagtggatcattggataagaatgtataccatctgttgtcttcaattgaatatttgtggttcttatatttgctgccacctaaaaagtagatggcatcggcaccatctaccgctgatttataatatacagcggaaaggaagtgtcgtgttttgaaaggcgacaatgctagattatcgatttgtttggtttctacattgaatcggatgaatcggtgttcatc

SEQ ID NO: 112 - DNA, 20627 bp, Phytophthora sp.
  source 1..20627: mol_type = other DNA
gatcgctgcttttgtgtgtgcactgggtcatttagagtggctcagaatgccctttgggcttaaaaatgcacctatgatctaccaacgaatgctcgacaacgctctgtggggctttgttcagccgaagggtgcctggaagcattatgcgcgtctggtggcagaagctgaagcacgcgaccgtgaactcaccgacgcctcgaccgaacagtcacatgaagagtcgtccgacccggaccagtcgcctacgaagtttgaagcgggacttggactcggatcgaacgaaagctcggtctcggaattaattaacagtcctattgcggacatgttcgcgaatggagagcccgacgagtcttcgttggtgccggttttcgaacggcgttcgtgcgttgacgacatttgctttagcggcgagtctttcgatatatgtctagcgacgctcgatcgactactcgcccggttcgaggaatgtcggatcagcgtgagtttcaccaagagcatttttgcgcagcccaaggtggacttcccgtctcacgaagtgtcccggagtggtattagagtggacccaaagaagttgaaggctatcaccgagctgtccttcccaaggtccaagaagggagtgcaagatttccttggcgctctgaactactacagccgcttcatacaggactttgctgtctacggtgacgcgctataccagctgcgagacgaagacttcgcaccagggggtgacctctctgcagccaagcgaagctttgcggcattgcaacgaaaggtcggtgaggcacctgtcctccgacacttcgaccgtgaccgagaggtccatgtgacgctgtttgcaaatgaatgggcagtgagcaccacgctcatgcaggagcacgatggcctgatgcaccctgtgcgtttctgcggccgagtgctcaaggacgccgagatgaactaccagccggcggaaaaggaggtactggctttgctacagctgttgaaggtgtgttacacccagctggccggtcggaccatacatgtctacacgcggttttcgacgctcgactgggtccacaagtcgaagacactctccggacgtgcaacgcaattttccgtcttactgtctccgtggagtctagtggtgcaacgagtcaaggaaaaggattgcgccttcgcgcagctcttacagtcgacgatcacaagcttcgttgacctcgaagcctcgttggcaccagtgacccctcgagccaaaagctcgccgagtgttcggatggatctgcatttgctttatgcacggttgccacgtacatacagtggctacgtactttcgtttgatggctcggcgaagatcgagaagcatggtggctgtggcaattgcgcctggatactatggcgacttcctgaatggagtgtagtgatcgctgcgagtgcgtatctcgggaccacgactgtaaacctcgctgagtacaccggaatgaacaacggggtctctgccgccctagaacatggggccgaggacttagtcaatgtcggggactcgagactcgcaatccagcaatccctaggggtgatcgcttgccgtaaggagtcgctgatggcacaactgaacaagcacaaggaactgaccgcgagacttcggtccgtgaagtacctacatgctatccgagagttcaatgcagctgcagactctttggcgagcgaaaccttggagaagaaggtgtcgatgacggtgaacagcgaagaccgaaaacgagagttgatggaattaaatcggatccgagaagtgctctatgaaccgtcagccgaagcctctgaagcttctggagaagtcgtaacgcgtcacgtgaactcgatacgtgtgatggatacgcgtgacagtgacagtagtaagatttttttcgattttgtatgggatactgggcatgtagccgcggtaacgaggcaacaagcccgcgcgcgcgcgaaacaagtgcgctttgccgatgaaacttcgggtgatgaaccagaagagggagccgaaggagacgaaggtaataatgtcagcaacgaagagtctaacgaacttccagaccaaccgagacctgacgcaacggtggtccatgaaccgagtgctgacgacatcgacccactagctgtgcaggaagaacggcgcaggcgcattggcacagccaggatgaggagctccggtggtcaaacctcaagacggtgctaaagggagaagaagcgaagcttgcctacaaagctgcacgcgaagcctggaagatggctgacaagttcctgttaagcgaagatggcttgctgtatttccttggtgcgaaccgtcggtggggtcgcgaccgggccgaggagacgacactacgcctagtggtgccaacaacgatggttcaggagatccgacagaactgtcatgactcgttggagggcggccaccaaggtatcgtccgaacctaccaccgagtcaaggctgactactattggattggcttgttcgccgatgtggagaaacacgtacgctcgtgtccagactgtagctcaagcaagagtcgcccgcagctacgtgggtactccccaggcaacattctggccgagcgtccgctacaaattgtctcgatggattttgtgatacccctaccgaagactcggcggggcaataccgcactgctactgtttcagtgtgcgttcactggattcgtcatgggcaaggcgatggcggacacatctgcactctgtgtagcacaagcattcgaagagtgcgtgtaccgaaggttcggagcgccgtctctgatcaggcatgaccgagacccgcgcttcatgagcgaggtcttccaaaccttcgccgagatgatgcagtcgagatctagggctacgttgagctatcggccgcaggctaacggccagcaggaacgctcggtcaagaccgtaatgcaatcggtgcgagtgtacgcggaggacccgctgcaacaagactgggatgaaattgtggagaagttgatctttgcgattaacaactcacagaacgccacgaggaaggacacgcccttttacttggtacacggatgggacgcaaggtccaccctccgagcaatgtcctcatcactgaagcgaggtgtcgggggacagtccgatgcattggcgtggcgccgaggggtcaacaggcaacaggcggttgcgttggaaatggctaaagagtaccaagcagtcgagaaagctcggcgtgcccaaaagcataacgaggctttgagccgagcggaacgtgctgcgcttccaccttccgcgactggtgaaacctcggaaggtgttccgacaggtgcagagggtgagggtgactcaccagaccccgcaccgaagtctctcttccagcctggtgatcgtgcgtggctttacatggaacgcgtcaagccagggttgaccaagaagttggcccatcgatggcatggtccctcccgcatcaaacagaaggttgacgagtatgcgtacgaattggatttgcctgacaagagtggttatcggttctacccggtagtgcatgtgtctcggttgaggcggtgaacgagtttggcgatcgaccgaagactcgactcgccgctgaggttaccgaggagacgcgactagacttcgacgaggagttactcccggaggatagttgggaacccgaccacctggcgggcgagtatgaggttgaagccatcctggatgaccgaattcccctctcgacgagcactgagcgagccgtccaagagttcaaggtgaagtgggtcggctatgacgaaccctcgtgggagcccgcgtcgaatctgtcttgtggcggactgctgtatgactatctacgcgagaaatgacgtgaccgaaggttgcaaatggtccaagtcgctgacgaggactagttgcacccctctcacaatgatgaactgccggcagggctacgcagcctaccccagcagacgaaacatgttactgcgggaagaagattgtatatttgtatgttgaagtggacaagactttacgaagtggagatcacgactggagaaactatggagaacagctgaagaaggacaaacgactactgaattgcatgggcgagctagttatactacgaacgaactgtctgaataccttgatctagctcgacacaaacatgaaggaacgatggagaactggaacgaagtttaggcgcccgaagacgaggcaaccttggccaaaacgcagagacgcgcagccggagaagcgtcggctggcgtcgcagcttgatcagcagcactgggaggcgaacgtggcgcgtcagccagagtcccgctggctggggcctcctcagaagggccctccgtaaccgcgacgcgatcttgaaccgagtcctgcgttgctgttgctgcatcttgagctcctagcgcttgtgtagcttcgaccgaggtctcttgagcatccacggcgcggcgagattcgtcctgaacctcttccgaagactcttcagcaaccggagactcgatctcttcgatcagctcctcgacctcctcctcttccgagatttcgtcttcacccggctgcccggcctcctgcagaccgaaaggaggcccgtgaaagttcgtgaactcacgcacccacggagccgtaacacggcgagggtccagcactgggttgaccgtaatagctgtcgcgacttcacgaacagtcatgccacgcgggacgaagagtggaaccctggggttacacggagcgaaggttgtgttgtacgggtgctcggacggcacatcggtgacgcaccaagtcgaccatcagctgagcgaagtttgcgaagcgtcgttccgaatgttcgcggagctctttgacctcagcctgcacctcgtggtggacgatgtcttcgacagcgtaccactgcgcagaagaacgcggaggaagtccctaagcctcgtgcgcagttgcaggcagcgggtcacccgtgcggcagaagtgtgcagtatttgacgaaggctcgtgcagaggactggagtcgggcgaggacctgaggaccagctgagtacacgcagggtccgacgaagcccagctagcggacggcaaagcgggaggtggcaacgtcggagccactgcactcgaagccgaggtctctccggtgcttgcagccaaagcatggtgcgcgacgaccgaaggtgcggcctggagaccgcccgccaccccgcgtgctcctgcagaggcgggagttggtgacggagcaggtccggcgctgccaccagcaccagacgatggcgctgaagctacagaaactgcagtcgaagcctggagccgtcggggcgccccgcttgctgacgcagaggcgggagttggcaccgccgaggcctccgaggccggctccgacgagtcgatgacctgccccgtggggccacgcaattgagtgtcctgcagcaagatgtagcaagttgaagacggttagacgcgatgaagagatcaaacacagcactcaagcacctcgcacgaagactcacctggacgactggaccgaggtccgggaaggtgaagggcggcgcgctgccaggaccaccggaggactgcatggcgtcggagcgcagaggggcacgaagccaacacggcactcaccacttgggacggctcgggccgagttgggggccgctgtgatatcgagaaatgacctcggccgggcgagttccggccgaggtctaactgccttgagcttgcgagtgatggctgaccgagggctctgattggtcggccacattccccgcgcgttagtgcccagaagattgatagagactacggagtgacaggagggtctcggcgggtcaaaataaaccgcctgccgaggcctccgaagtttcatagtgggtacactttatgcccagtaggagttcggatttaggacgaagtttcgtccggttgtaggatcagctcgaaagctcggtccacgttgatatttgtatagaccttagggattagctataggagaggcctgacagcctctaaaccattaaacagagcagaattcccccccaagctacacaagggtcaagtccgtctacggtaagtcgctaagcttagcatagggtctggatacactcggctgcacggggtatgtctgccggtgagcataaggtgcaatgaccgagtgttcatcctggtaaggccaagagtgagtaggtggccgagtgttgggaggtattagagacctctgtgtgcagttgtacgtttgactgggtgtgaggcaaggaccccccccccccagtgtatttgacttctagccgaggcttcgccccggcgcccctgtaagaggcttcgattggcctggtacccatcctttctgagggaccacagaggtttagtgcgaaagcacgtattacacattgcatcctagccgtggctcgtggctaagggtgctcttatattataacgaagggtaaacctacctgacccgcagcacacagggaggcacattccagcccgtataagggatcggacctggtcttcaggtttattatcccgacaatctatcgccgactcttcggagacggcgtgtgttgttggtagggctcgtcctagagacttcggttgatagggcgaggagtcgtaaactcgtgttttcctagactacataggcgaccagcgccgcctcaatctctggggtgcacttgatgttcgccgcccgagagccgccgcgctgcttcacctccgggctcccgctcatgacgatgcggcgagcagtagtccgggggatgccattgtgcttgacgacaagttcccagtccaccccctgctgatgggcgtcttggacccgcgcgcgagctgcgaggctgtgcttgggctccttaggcatgagccagtcgaggtgagttgaaaagtgacagcactctgagtgctggcgctcgagttctgctctccagtcgttctcgattgctggtgcgtgcacgcggggtctccgcatccagtcgtagtccgtttgaactttagaaattccgctttgacctaaaacttaaagtttaaaatgacatttgaatttccatcgttacaggtatatttgccaaattgaattgcactaagaccaccttgaagtggcaaaggtgtagtacactcacttagttgatgaaacgggtcgatctacttaacagaagaatcgtgagaatgttctggtcgatggcaacatacagttacacatctgtgtgttccagtataatggtacactgatatctttggtagcagcgtggcccacacagtgtgggtacggaagacaagaggcctttggatagcccagaggcgatgttaatagagggttgtcacgctagcggacgggttagggcatctaggagagggtgatagaaggagcgccatgtccatgactggtgttctgggaatgcaccctcaagttcctcattcttcaactccccctgtcaagcaacaatggggaagcgcaagcgcacggacgaagatgtggtcttcatggagtctcgcgtccaggcccgggcctgtctccactaggacataatggagaaaatccagcgatgctgtcaagtcttcaaacagtggtaactggaagcttcacacgtcgccaaccttacgttcttcggtgcctcgagggggggggggggtcccgctgcccaagatcgacggcactttcctcatgtgcaggcatgtccgcagggggcattttgcaaatcatgccccttttggtaatacggggtacacctgggacttttcaaaggggtacccgatcagtattgtatgtctgtgtatacaaaactagaaaggggcactacgaacctgtataagaatgtataggtggtgacctacgctagagtgctcggcttggagggcgacaagcactagacaactgcctacctggacatctcgtctggcatcggctcaaagtattgtcgagattgcgactcaccttccatcgcgtagttgctattcctaccacgatgtaggcccgtcgtacgcttcagcgtgctgtggtcactctccactgcgtgggtctctagcgtcagtatcgagatcttcaacgtggacacgaccgacgccggcatccacggcgccatgccgatctgctgccagtgctagggctactcgaacggctacaactccacctggcgcaacgtcggtcgcggccaccagtactgctgcgagggcgacaatgttatgttcgaccagcgcatgagcacgttgaacgcgtggggcgctgacgcgcgcaccaagatcgctcagcagtccaagcagtccacggccacgtggaagatcgtcaacgcgcactacagcacgcaccaccacttcgtcaagtacaacgtgaagaagtggttcggcctgctgcgcggctcaggcgtgcacatgtggcccaacggccacacacggcgactgtcgctagacatccacctcctcgagaacggcgctggtggcggtttccagaaggattcagccagcggctacccgtcgtacgcggcatgcgtacacaactttgtaacctgctctaggtttccgtacacccaacgctatgacttcagtaacctatgtctacattcgccacgaggcagcagagctatcaccatcacttcactgataaaggttattcatcgtcagaagttagtgggctggaaggtaagcggtaagaacttgttaagcacatcttacggcaacggccctgtgtggtggtctcatttctctgctctccgacggtcgtactgttaaatagcgctatagaattgaatgagcactacttaaggcggttggtcgctttgatcttgtccacattcatagagccgttttccgtgttcctctcgtgtttatactgcatcgttcgcacaaacccacccagagcgagtatcgcgattgcgaaccttgcttcgcgctgtgagcgttgtccaagtagcttaacagacaactatagtaggaaggtttgtatggcggtctatcatgcccatttcagggagtaatctgaagtaggcgaagtaatgacaacgtgccagttctggtgacctatttgctagtacagtcgcatatatgcatgtgctggcgtcctaacttacgctactaggtcgaaaatgtgacgaaacgtacaacatattcccttcatcaccaggatttccttagttaagagggggcactcttggcaactttaaaaggggtatttcgttctttttctgtccacactaccccctccggacatgcctgctcatgtggtgcatcaggggagtgtgcgcggaaggtcttcaagagcgcgatcgcaagtctcaaaagccggaagccgaacgacaacgcgctctgaatcgccccgtcgacccagcggctcgcgagacagtcacgatctaccgcgagatgcgatccgccgttgcagactacatcccccactccagttaccttacagtggacaggggggggtcagtgccatgaccgcggacatggtcggcaacgcggtggtcatggtgcaggagcacttcatgaagcgtctgacggcgtatattcgcctcgagttgtttcgtcggaccggtgcggcaccccgatccgaggtggagcgtcttcgaactgcgtgctttggtcctgatgatggcgactatgcggaagacgaacatgagcttcgagagtggctgggtttccgcccctacaaggacgagctcaagcgaagcatgtctgtgactctgacctgaacttcatgagatccttggccatatcgaggccctacgccgtgagatggcagagttacccgggtcttcaggtggagtcgatctcaatgtgtcaccgcaagacgaagttgctctgggcgacgagcccgaatcggatgaggacttcatccaggagctgcgttcccgaaagggactccgggcattcacgcttttgccagtctcgacctcgtttgtgccgatggacgtggccttcgacggcttcacgttgcaggggttctgcgctcggctttacaacagaacttggtccaaccctgtcgggatccctgtcggagcgcacggggtacttgcaagaccgcaagtcgtcacgcagctggtcgacttttatcttcgcagagcatttgctgtagtttgagaccgagaactgcaagttcgcatatcgcgtcgcgccgaacgggtactcggtttcgatactcttgacaagaccgaagaacgcgattgaggtcgagctcgagcgactcaaagctacacgaacccaagaaatcaatgatcaggcggcgaagcgagcaaggctgcgcaaggctcaaacgcgcaagaaccctcgtggccgtcaatgtacctcgcgctcagaccgccagcaaccgcttcccaacgactggaacattctgccagcggattacgaggccgacaggttggtcgcgattgaccctggaatgcgggccatggctacggcggtgtgtgaagacatcgcaccaatggacgagaccgccatggagcagaggcgtcagcgcaacaggcgtcgcaatcgtcggcgggctgcacgtcgcaaggcactgctacggatcgcccggcggaggaaacggttgtcgaggagaacccgtgctcgaatcaagcgcgcaaagagacaagctcggcgtcctccaacctccccacgcgtgcgtcatgttggtgacgagaccgtcatctccattaagacccgcgagtaccgacatctcgctggcttcaacaaagccatgcactggtttgaagggctgaagtagcgagagcctcggtacgctcaagcaatcaacccggtgccgttctacaaaacggcatcctatgacatttacctggagcgcctacaggtattgctgcatcgcatggactttctacaggagttttcgcggactcacggatttctgaaatggaggttcttccagaagagaacgaaggtgaaggccctggacaccctcgcgtctcgcatcgtacccgttgccagtccgagagggccggtcggctacggcaactggagccggtcgcagggcgtctccagccgcgcaccgggaccagtgaaggcgttaaggaagcactcgctcgcctcgccagtgtcgtgctcgtggacgagttccgcacgagcaagctgtgctctcgatgctatcaacccttgacggaaccctaccttccaacacggaagaacggcagcttcgcagctactatcaagaggaccaagaacgtcttgtgctacttccgcagtcaatgcgagacgttcatctgggaccgtgacgtcaacgctgcgcacaacatcatgacactacccaaggatcgcttcaacggacatcctagacgatcagagtttgcacgcggagtctagatattgcgggatcgtggacgataagggctcgtcgcggtaccaatgtaggtagaatccgatagttttcagaagagcgtcgtacgcttgaggtccgacaaaggaccctctctaatgtaaccttattccccatgcgtcaacgggactcccaacaggtttgccgcatgatatcaaaactgctttgtgaggacacttgtcacggtccagccgtggactgtgggtcatgcgcgagtggcaagagaggaatggagtggaaatgaatgcgctttgctcggctttggcagtcacgcgttcgtgccgagcaatcagattcaacctctttcgtatgactcgccgaaagtgtgtcaatgggtggcttacgcgttttactcgacccgagctcgatcgcgctcctccatgaagcaagtcagaatctgtaacgctcgtctgaatttcaaaatactaatgccgtgcttaccacggggaagctctggattttcttcaacttttgttatttttgtatgtgttgtacacttgatcagtatttttttaatctagctattgcgcaaaaaaggaaaattaagggaaattaagtgcgcattcgagtgttgcaagcaacttggcacctgtggcgcaccaggtactcgcgccgacttctgctttctacaacattcttgaaggatggaaaacacgttgggtgagtagttatcgataaatgttctactaactacaaaatacctacagtttacatactaaatccttgacatccaaatccgatgtgtaagaggaggtagacgctccgtaaacaaaatatttttttaatatacatttagcttcggacgacgttcaatatctataaatccattaggcctgtagtaatttacagatcatgttgtgcaaggcgggttttaaatgttgaagcatcgtactttcgatcgttcattctcgctacaaccttctataacgagtatttcaatgtactataggagagaaactccactagattgggttcgagtatcagttgggttcttaatacaccacgaagatcgaggtccgagttaacggaaaacgtaaatttgtatatcgcttattattgaaatgaccactttaattattagaaagacatacaaataggaggagatatagctccgtgacatacaggtctgaatattttgtagtaagctagttacgtactacaaaaccactttgatgacgtcctggcatgtgcaagtcttcgaaccatggaagcacccaaacgttgcgcagagccggttcacaacgcctttcatgccgttagtgttctccctagcaagcagaacttggaccaaactactttttatctgtcggtacttacggtaattttgcgtaacgtttctaaaaaggcaaacggtattgtgatttgctgttattttgcagaccattttagacgcaaaatatggcaaatcctgctcctaaatatgtgggaaagaagatacacgacctgctaaaattatgcataaatccacctcctcatatatatatcgacttgggagggcctgtcagcagccatgcattggcccagtacaccaccgtccatgatccccagcacatccaccctcttatgcataattgccgtgtgtgtaggtgtttgtgcataaaaaccgacagaattgcagctgcacacccacaattgcactttccaaagtgcaattgtggcgcttttagcgtaattctaggcctccacccatttatgcacctcgatttatcgtaaatctagcaggtggtcgctataaatacagcaaatctcgcctcatattgccaaactctgcaaagcacaataccaaagacaagtgtaattttgaagataaaacgaccggatcctgcttgccgtatttgacaaaatatacatggtgcaaaatgtaaacaaaaatagaaggagtgttttgaagccttgatcatgtgattttcaatgttaagatgtcttttagccagtccgaaatgttaacatgctaaacttaacatcaagtttgctgtttctataaagttatagagtaggcacggtttggttgaggtatacatattggcttaggtacaatagctttgcatattgagctaattatactgagataggaagcaacgttagtgctgctatcgcagaccaaataggattatatccgtggtacatcaagtcaaacgatgacccctcttgacatctaactggtatatttcttgaaaccggtacggctctggtgccgccctgggccctccagggcagattgaaccggtgtaataccgacgacactggtatgaatcagtgcatatattgagcagggtacggatggacgaagagaacgcttggactgtacaatagcactagaggtactcaataagtatttgcattttctacaagctgcaaaacagatctcaaccaaggttcgcatttttaattttgtaaagcattgccggtagacagtttgaactggcaaatatccgggcagatgctgcggctgcgaagcaggcgcaggagatgaccgtagctaataaaaaataatgaaaaataaaaagaagggtttatactaaaattctcctatcccagccttcgcggagccctagtatcagattcgaaaggagatattcaattcgagaagggtacgctatttaccgctatccgttagtttatcgtacttaggtttgggcatcttgcgctagtttgggttttacgtgcaatacgttggagtaagtttaagtcggatttactattaatatccccgttggttgaatacgcagagttcgaatttcgaacttcgaaagccaaacacagcgaagcaatccttctaatgttagatagtgcaaccctctagatgtccaagtcacaccgaaatcacatttggttgcattcgtcgcatccacttgtcagacttttgcccctgacaagtctcggcttgatgggtgatgaaatctaatttctaatcagtttcgaaatatcgtgtatggctccagaagctacgctctacaatgtaataaatgaatgtggttacgtgcgctgttatgatcccaaaataataatcttgcagcatttgaggtgttgctagtttggattgtaaagtaaccaatgatgaccccaggctatgcttcggctagtcatgtcacgctacccactcccatcatgtgcagatactagctagctaacgactaactaggctctgccaccaaaacgccgcgcaaatgttgaagtcgcatacgcctggacagtaccatgtttctcgttaatcgttacatacttcacaatttttgtgcattaaatattaaacgttctccagaatcaagtttcctcaaaataaaggctccgatagattattatgccgttcatcgtctatagttcagtactgcgttagaagttgaatagtacttgtacaggcgcatgcttaagctgggattgtattctcactattgaaggcctcggtatgaccgtacagataaaaccgaagttctcgtgaactcctacgtgtagcaccccatctcttaaatttgtttggtggaggctgtgtgctgtttcgcgcttgcttgttgctttgtagcttgagagtaaatgcaaaactgagattgactagttatgcctcagaatattcgaaccaatcccttcctatgtagtgtttctcctgctactccttgtcgcgcatcttcatcgcgctgtgcgtctccgcgctgcggcaagggtacccgatctgctcccatgcgtctccgcggcgcggcaaccaaagcacgatcggatttttgctgtttccacgctgcggcaaccgcaacggatgtgctctgctgcttctgcactgcgaatcctgacgaatccccacacagcctcccaaggaccccgtcgctaggtgatcagcaagccggagacagaacagcttgcccggttacatgctataggttgttgtaggcaacggaaagacttcatcggcaatcctcgaggtgtagtgagccactttggtcggaacttgatcatcaatggcggtcaatggctcccacgaatcatcttcgtcttggaggccgacgcaagacaccagtagctgccacccaccgcgcgctttgcggtgctccttgatggactccacaccaagaagcattccttggttcccaacctgcgcaagcatcttctcgttcacatcgagactgctgtcgctgtagaatttcagacgcgaaccatgcacttcgaaggtctggttcgtcaccaagtgccagatgacaaacgaatggggccgagtttccatcacctcgaaggttccaactcatctagccagtagtttgttcaccgcaagtctctggtcgatgcgagaccaaagcgcgtagtcaccaaaggtgaagttgcacggcgagtccttggagcgctgcatgttggcgagacgtcgcttctcacgtatgtcgatcacctcacgatgcatcgcagcaaggtcggaacgacggcagtcgagccgtttgtgtggcaactgagtgtcctccgtgatcaagacatgcttcccatccctctccaccacaaccggttcaaacggagtggaccggcgaagacccgtaaacagctctgcaggtgatcgattgcccagcgaggccaccggagtgtggttcaggttgccctgctccagaggttgcagatacatccatgcatgagtgtccagcttgaactccatcaatggtacccacatcacctgcaacaggtggtggttgaccctctccactgtcccgttgatccatggcgagtacgccaccaccagctcctgtagtatttgtagctgtttgcagacttggtcatcattcttgaagtgacttccctcgtcagaaatcagcagcgaaggaacaccgaaccgcttccacaagtccacgagagccgttgctaccatggtgctggtcgcggaatcacacgccacaactcgcagtattgcgagagaccgtccttcagcactaagatgtacttgctggcgcctgcattctgccccatgtagagaaaatcccagtgcagtagttcttttcactccgttgcgttgtaggtggggccccacggacgtgtgatgatgttagcacccttcatgtgcttgcagagcagatagcgactgaggaaccgccggcacaatgataccaaaccgctgatccagaacaccgactggaccgtcgaaaccattggccccaggccacgatggccctgcacactacagtgtctcaccatgagaatatgctggagtagctcaacagcgctcgcaggaactcagatgcggtcaaccaccaacagtaaaccgctttcatcacactcagtaccctgcgtctgaccaccccgagttgtttttgtgcagctcgaactgcatcgagcgaagggacttcaaagtcagctggcatcatgtgaggttgtgatgaagcggctccaggttggtattggtcggcttcagtaggcgcatcaacatccgcctccgtagcttgtgatacaatctagtcgcagcttcggcgagttcgtgagcccgacttctcgtgatgaacttgcactgcaccctaacacccacctccttaacgggaagatcacacctagaaaggagatcggcccacagattatccacaccatcaatgtgctcaacctggaaggccaggccagtgagcgacagcgccgagcgctgtagcttcccgcgtacatggcgtttcacctccttctccggtgcaaagactaaggctatattcttgtggtcgcaataaaggcggaagcctccacggcgagccaacaggtagcccccgcgtagatgattggataagcttccatttcaataatgctccaccgctgctccgtgtcactgaacactccactcttgcaaagcagcaactcatgacgctgttccacaaccggtagggcatcatcccataccctgacttgagatgttactagtccccagcctcgttcagaagcgtcactgaaaacgaagatattcgcagtgtcctccgggaagtgcagcagctgcttggttgcgagaagcggccgagccgtatcaaacgccgacctctcattgactgtccacgtcaacataaattctgcggccaggcgcttcgtgcgatccacttgcttcagcgcggcctctagcatttcatggagtggctgcctggtcctgctgtagaccataattgagtcacgtagccagccggcagcgcagaggaaccacggtaggtcggcggcagtcactggtaatgggaggttccgtagggcgctgacacgagcagggtcatgctcaataacctcgccgctaaacaatcgtccacaccacttcgtcgtcttcttgaagagacagctcttgcgcaggctaagcgtgagccgagcctcctggacgcactaaaatttcacgcagcgcaccaaggaactccgtgggcgagcgagaatagaccaacaggtcgtcgatccaggcgagaagcttcacgtacatgttcctgaaggccacctccatctggttttggaaatggagcgccgaatcagtggcgccctgcggaacacgggtcggagtgtagacagcatcatccgtcacgaacctcatcagctcttgactgtcggggtgaagcggaagttgcgtgaaacctttggtcatgtccaagccctgaagttgcgggcggcagcagccagatccggcgccgtgccagcgatcggcacggtcacagtattgacaggcctgtagtcgatattcaacctgaattcattcggccaaccagccttcggcactgataccgcagcacaagcccaatggctttgctggtttcggcgtattcacaggtcgaagacatgtgcttggccccggcaaaaaacttgtaacattccaaaaccgggtaccaaaccgggtctctctttcttaattgtaatgtttaagctaatatctgccggaatcgggtacccgtcgataaatgctaagatttatgcacactatttaccaaaacctgcattcaagcacttacggacgtccagtacactaatggcttcgctgaaggcgtaccaatttgcgccataatcgaccaagcttagctgaagatgaccaacacgatttatgtaggtgcaggctgcattttttacatgtcaatttgctcaatacccaatcactcttagccgaagatgcccaacctcgtttctgtcgccaaaccaatcagctcaactcgacagtgacacgagcatcgttcgtttgaataagacttttttccctgcgttgaagcatccacttccaaggaattggcccattagcgtatttctcattccgcaatttaccccaagccctcaagttaaaagtttgtttgtttgtttgttttgttattgaattgaggatcattattgtcacttagctaacatcctcaagttaaaaggtcaagatcagcgcaccatgcgcctctccttcgttccgctactgttgctctctcgtctgatcgttagcacacaacctagttcaaaaatgagcacagtataccttacctgcaaagtgaatgaaatagctctctcgttgctggggccaacgcagccattggacgctgaccagggtgttatgtgacataacactctggtcagtgttcgaaggcataacatatgtcaccgatggcctcatcagaccaggcaacctcaattggcgactttcggttcctgagaacccaccacgataaagaagagcggggcttgctggttaccagcctcacaaaggtttggctgaaacatcatttccgtatcgatacacttcgacgtgcgcaactatttgttcaattacgcattctcgggaagatgatgcaactatttgttcaattacgcattctcgggaagatgctgcggggcgcagtagatgcccacgttagaatcaactagagagttgggctggtagtgcttttaaggattaaaaagaaaacaactttaggatttactcaattattatccattatcatcgtccatgaaactattcgtcgacctgtgtaccctcccggggcaacgctccgggttgcctataaactccatgtccagtagctgctgcgtgtgatcgcgaaggaaatcactctgcgcagcagcatagcaccgaggccgtgttcgatatggctgagcaccttcgcgaatcgtgatatgcagcgcctcgacgttggccgggggatcatcccccagatcaatgcggaaaacgtcttcgtactccagcactagatcgagcagtgcaggacgtactcgaccgggaacccttcatcaccagccgtaaccaccatggtcttaagtaggtcatgcacttcagccagagcattggctcaaggttcatcaacttcaaaagagccatggtcctccatgactcgacctccagccaagtgagatagctgtgcgctcacatcaatgccgagatagacagtcatgccgttgcccaaaatgaaatcttcctcgtcaccttcaaacatgaggcaggtcacttcagtgaggtggactggaccagcaattgtctgcagcatcaagtccaacttcaccgaatcgcggcgcccccagcaacagtgacatcgacgatagtacgaaaatgcatatttttgtcatttctgtgtactgaaatgctattttttgtcatcagaatatgttgtcctcacacttcaattatgtcatgtgttttctatgataattatacttctaatttgtatgatgcagctaaaaaatacagtagttaagtaaacattttgaaaattctgtcttttgtcaaacaactggacatttttattgtcacgaaaatgacctacttttgtcatcacaattcgatacgtttacggcgggtgtgctttttatcatctacggtaagttcgggtcgaatcgcgtcgctggagaaactctggatctaaagtccagagaactggagacaatgtcaaggatcctaacagcctccaacacggagcaggagcttctcgccgttgctaaagggctgggtagctcaagtttcacggcacgcgacgcgcgcgagtaccacttgcgtcgggacgctatcgtccgagttacagaagaaatcgaccgtcgcgtggtttcgtggaattcagcagatattttccagcacggggaagttggtggggtcgttttggtaaagtccgaggatgatgttcccactgagtgggtcgacatgctgatctctggaattggtttgtgccaagtccaacgcagtagtctcgtagtgtgcgaccacgcgaggatctcggaaatgaacccgatctggaactaaagctcaaaccctgggatatctcgagtagcgaatgtcttacgaggttattgcaactgattgggggccatctgcgcagcctttggcttgattttccttcgtggagtcttggcgtcgatgttgctgtaattttgtagtcgtgtccacacctacaggaactagcgatccgtaataatcaggtctctattaggacctctgctttggttcgggcatgtgaacagcacaacacgacactgagac

SEQ ID NO: 113 - DNA, 20627 bp, Phytophthora sp.; identical to SEQ ID NO: 112
  source 1..20627: mol_type = other DNA

SEQ ID NO: 114 - DNA, 21077 bp, unidentified
  variation 1815: note = n is a, c, g, or t
  variation 16788..16938: note = n is a, c, g, or t
  variation 10052: note = n is a, c, g, or t
  misc_feature 1..21077: note = Fanzor polypeptide
  source 1..21077: mol_type = other DNA
ctcaacgtcgtctcgaggatccatggcttctccaacctcgtcgtggatgatggggcggccgtcggtggcgctctctcagtaacttccacaatcaaggggtcctccaatttaagcatcgcgtcgcaggcggatgtcggcggtgccctcaatgtggcgtcaacaatcaaggggtactctaatctcttcattgcgtctcaagcggatgtgggaggttccatgacggtggcctcaacgatcaaggggtactctgacctcatcatcgcatctcaagcggatgtgggcggtgccctctcggttgcgtccacaatcaaagggtcatctaacttagtcattgcgtcccaagcggatgtgggcggttccatgacggtggcctcaaccatccaggggtcatctaacttaataatcgcgtcgcaagcggatgtgggcggttccctcaatgtggcctccacgatccaggggtcctctaatctcatcattgcgtcggaagctgaagtgggcggtgccctcaacgtgacctccacaatccaggggtcctctaacctcatcatcgcatttcaagcagatgtcggcgggtccctcacggtggcgtcaacgatccaggggtcgtctaaccttctcatcgcatctcaagcggatgtgggcgatgccctcaatgtggcctcaacgatcaaggggtactccaatttgatcgtcgcatctcaagcggatgtgggcggtgccctcacggtggcgtcaacgatccaggggtcgtctaaccttctcatcgcatctcaagcggatgtgggcggtgccctcacggtggcatcaacgatccaggggtcgtctaaccttctcatcgcgtctcaagcggatgtgggcggtgccctcacggtggcgtcaacgatcaaggggtcctctaaccttctcatcgcatctcaagcggatgtgggcggtgccctcacggtggcgtcaacgatccaggggtcgtctaaccttctcatcgcatctcaagcggatgtgggcggtgccctcacggtggcatcaaccatcaaggggtcctctaacctcatcgtcgcgtcacaagcggatgtgggcggtgccctcaatgtggcgtcgacgatccacggttcgtctaacttgcttgtcgacaacgacgttcacattggtgggtcactagctgtggatggaccctcacactttgcgactctgacggtcgatgccatacaagcgcttcaaatttcaacttcgaatttctcggcgtctgggaacgccaccttcgatgggaccgtcaagatcaaacacttggaagtggacggagtgaccttttcggggtcgaataatatcgcaggtagcgtgtccaacctcaatgtgaccggcaatctggcctgctcgaatgcttacatcaaggcactcgtgtgcgagaccattgccgggtcgaacggcttgctcgaggtcctgggcagagtcgacatggtgcaagggcaggtgcacatcaaggatctcctcgtggacaacatcatcttctcgacgacgtgcaacatcttcacgcatccgcatcgttgccgaatccccagcgattcgaacacgtgcgtggacgagatcgtcggggacctcatcgtggacggcgtcctttgcgccaggggcggcttctgcggggtcatcaagttcccgcagggggtcatcctgggcgacatgacgaccgccagcaacctcaacgtcactggcaacctcaacgtcagcggcaccagcacgctatccaatgtcattatcagggagctcgtgagcgagtccattgcgagctcgaacgcttacatcaaggcgctcgtgagtgaaacnccctcacggtggcatcaaccatcaaggggtcctctaacctcatcgtcgcgtcacaagcggatgtgggcggtgccctcaatgtggcgtcaacgatcacgggggcctccaatttgatcatcgcgtctcaagcgtacgtcggcggtgccctcaatgtggcgtcaacgatccaggggtcgtctaatctaatcatcgcatctcaagcggatgtgggcggtgccctctcggttgcgtccacaatcaaagggtcatctaacttagtcattgcgtcccaagcggatgtgggcggttccatgacggtggcctcaaccatccaggggtcatctaacttaataatcgcgtcgcaagcggatgtgggcggttccctcaatgtggcctccacgatccaggggtcctctaatctcatgattgcgtcggaagcggaagtgggcggtgccctcaacgtgacctccacaatccaggggtcctctaacctcatcatcgcatctcaagcagatgtcggcgggtccctcacggtggcgtcaacgatccaggggtcgtctaaccttctcatcgcatctcaagcggatgtgggcggtgccctcacggtggcgtcaacgatccaggggtactccaatttgatcgtcgcatctcaagcggatgtgggcggtgccttgacggtggcgtcaacgatcctgggatcctccaatttgatcatcgcgtcgcaggcggacgtgggcggtgccttgacggtggcgtcaacgatcaagggatcatctaacctcatcatcgcgtctcaggcagatgtgggcggtgccctcacggtggcgtcaacgatccaggggtcgtctaaccttctcatcgcgtctcaagcggatgtgggcggtgccctcacggtggcgtcaacgatccaggggtcgtctaaccttctcatcgcgtctcaagcggatgtgggcggtgccctcaaggtggcgtccacgatccacgggtcgtctaacttgcttgtcgacaacgacgttcacattggtgggtcactagctgtggatggaccctcacactttgcgactctgacggtcgatgccatacaagcgcttcaaatttcaacttcgaatttctcggcgtctgggaacgccaccttcgatgggaccgtcaagatcaaacacttggaagtggacggagtgaccttttcggggtcgaataatatcgcaggtagcgtgtccaacctcaatgtgaccggcaatctggcctgctcgaatgcttacatcaaggcactcgtgtgcgagaccattgccgggtcgaacggcttgctcgaggtcctgggcagagtcgacatggtgcaagggcaggtgcacatcaaggatctcctcgtggacaacatcatcttctcgacgacgtgcaacatcttcacgcatccgcatcgttgccgaatccccagcgattcgaacacgtgcgtggacgagatcgtcggggacctcatcgtggacggcgtcctttgcgccaggggcggcttctgcggggtcatcaagttcccgcagggggtcatcctgggcgacatgacgaccgccagcaacctcaacgtcactggcaacctcaacgtcagcggcaccagcacgctatccaatgtcattatcagggagctcgtgagcgagtccattgcgagctcgaacgcttacatcaaggcgctcgtgagtgaaaccattgccgggtcgaacggcttgctcgaggtcctgggcagggtcgacatggtgcaagggcaggtgcacatcaaggatctcctcgtggacaacatcatcttctcgacgacgtgcaacatcttcacgcatccgcatcgttgccgaatccccagcgattcgaacacgtgcgtggacgagatcgtcggggacctcatcgtggacggcgtcctttgcgccaggggcggcttctgcggggtcatcaagttcccgcagggggtcatcctgggcgacatgacgaccgccagcaacctcaacgtcactggcaacctcaacgtcagcggcacaatccacggctcctccaacctggagattgatgataaggcagcagtgggcggtgccctctcggtggcctccacgatccaggggtcatctaatctaatcatcgcgtctcaggcggatgtgggcggtgccttgaaggtagcctcaacgatccagggatcgtctaatttaatcattgcttcgcaagcggatatcggcggcgcattgaaggtagcctcaacaatccagggatcgtctaatttaatcatcgcgtctcaggcggatgtgggcggtgccttgaaggtagcctcaacaatccagggatcgtctaatttaatcatcgcttctcaagcggatatcggcggcgcattgaaggtagcctcaacaatccagggatcgtctaatttaatcatcgcgtctcaggcggatgtgggcggtgccttgaaggtagcctcaacgatccagggatcgtctaatttaatcatcgcgtcgcaagcggatgtgggcggtgccttgaaggtagcctcaacaatccagggatcgtctaatttaatcatcgcgtctcaggcggatgtgggcggtgccttgaaggtaacctcaacaatccagggatcgtctaatttaatcatcgcgtcgcaagcagatatcggcggcgccctcaaggtcacctcgaccatccatggcttctccaatctcatcgtggatcgtgaggcagcggtgggtggctctctctcggtggcctcaatgatccaggggtcatcaaatttaatcattgcatctcaagcggatatcggcggcgccctcaacgtcgcctcgaccatccatggcttctccaacctcatcgtggaggatcacgtggatataggcggggcactcaccgtggcgtgcaccgtccattgttcttccaacctcgtcgtggatggaaatgccgatgtcatctcaagtatccacgggttcgccgacctcatcatcgacgacgaagcggtcatcaagggttgtctcaacggtcgtgtcgagcatccacgggttcggcgttctcaccatcgatgatgacgcggtgatccagggttcactgaacgtcaggtcgactatctacggcttcgacgatctcatcatcgatagcgacgcggtcatcaagggtgctctcaacgtcaagtcgacattgcatggcttctgcaatctcgtcgtggatgaccaggtggatgtgggcgctgcactcaacgtcatgtcgaccatgcacggcttctccaacctcgtcgtcgaggaagccgtggaggtagggggggcgctctcggtggcatccatcatccacgggttttcaaacctcatcgtggaggggcacgctgatgttgggtgtaccctgaccgttgcgtcgagcatccacgggttcgccaacctcatcatcgaggaagacgcgctcatcaagggttctctcaacgtcgtgtcgagcatccacgggttcggcgacctcatcgtcgacgacgacgcgctcatcaagggtacgatccacggatcctccaacctcataatcgacgacgacgcggtcatcaagggttctctcaacgtcgcggggagtagcacactttcgaacgtgcatgccgcggcggggtgcatccgggcgcttgggtgcgcgacaatgggcatcgggggcacgtgcgcggacccggcctggatgctcgcgagcagcagcagcagcaatgataatgagctcacattccgctcgaaaaacggaacgattgtgaccttcacggacgacttcatcccaggcgtgctgaacttcacaggcaagcacaggtgcgtgaccaccgaggacgttacgagcctgcgactgggcatgatcgttgtggcagcggggacgtaccattccctcaacgggaaggcgggcattaccatcgacgaagccgttccggtcatggaggtatcgacccggcccatggatcgccgagtcttcggggtcgtcggcggtgtggaccgcggacagggcgtgttccacctgggaaacttgaacttcaagaaggatcttagcggccctccgcgcgtcatcgtgcaatcggacggcgaagggtgcatcctagtgtgcaatgagaatgggccgctctggaacggagacctcatcacgagcagctcgcagaggggcatcggtatgcgacaggcggacgactttgtgaggagttgcaccgtcgcgaagattacatgcgactgtttcttcgccgagggggaagaggatcggttggtcgggtgcgtttataaatagagtggagacggcgagtagccgttcaagacatctcctcctcttcgacgggcacgcaaaatgaaacgagcgccccgagcatgcccgtggtgccgcagaactcgtccatgtggcggctgcccatggagcgattgcaggtcgtgcagatgggtcgcaggttcgagatggcgtccgacccccctttgcaggctgcgagaatgtgtccgcactcgtagttctgctgcgtgatctcgcggcggcagcagtagcacgcgcccaccccagcccattcaccgaagaacctattccagaccgcgcatcgcgacgccctgggcaggggccgtcggcttgccttttcctccgcctgggggttgcttcgtgtctgttgcggaggttgaggtgggaccttgatgcagaaggagggaagccattccaagacccactcaaaggtcgcatcgtttgacaggaacaacggcatcaccgtcggggcttggcggaccttgtccagggcggcgagtgtggcgtgcgtcgccgggtgcagctcgtgcagccgggtgttggcgtggtcgacgaaggcggccagctcgagagcggtgatcgggaaggcgtcggggcatcgccgcgcgccggtcgccagagcagctgcgagagcgctcatggacacgttcggccggcgcgggttcgtcgcggtgctccaaaagggccggtaccgcttcttgaggatgctctggacgtccgtgatcgcgcacttgtggatggccgagatcgttccctggacgatccactcgggcaccggcaccgacttgttgactagcgtgaacacgtccttgagggtcagtgacgcggacactgtcacgatcagcacggacaccggctgctccgaaagctcatgcacgaggctccgcgccgcggcgaggcggtgctgcccatccacgatccagtagcgcccctgtgcgccggccgccaacagcgcaacgtccccgatgaagaggaaggccccgtgcttctcacggtgcgcccgctgaaactcgacgatcgtctgcacgcgctcgtcatcgacggaccgctgcagctcgggcacttggacattgaactcgacgagcttccgcagggagcagtaccatcgctcctgcgcggctgaaagtgtgacctttttcatgtactcgggtactcgggtactcgggtacacaagatactttatgtgtggggcagcttccgatctcaggcctgagcgcaagcccgccagcgcgggctccaccttttttggattcaggtgtgccccggggaaggcgcgcgcttcggaaatagtttagagatgggtaagaggattttcaccaccacggccagcatcacaacatttgcgagccagcaccacatcgttccccatgtttcgtaacgggtgaagtaatacaagctcagcaacaacgcgccgagagtcagcccaaagatcaagtattcttctgcaaggatcatcggtcccaaaaagaagatcatgtacgctgcgaacacgaaccaatttatggttttgaaggtcagccagttccagacgagatgcccgttttccccggcgtacgatctgaaacggtcaagaggcttcgacagcatcacgagcagtgtcccaactaaaattgcgccgtagatgcacaagagaactttcatcagatccttatccttctcgcggaggaggaagatggacgcaataggttgcgcaaggataagtagcatgccacagatggaagcgaccgtatttattgtttggttgtcgtagtacttccacacgaaatactcaacaagctgcacgctcacgaaggaaccgaagaggagcagctttgccacatcatagttgttcaaggcagccaaaaatataccaaagcttccgaacagaaacgtgttcaacgacaccgtttgatcccaacacatggtttacctttacatcttcagatgttttcggatgtgaacatgaaggactgccttttaaatgcccattggttttagcggtcgacctcatgtagcagatgtcaatgtcaatgtcaattttcccatcaatgtatatacactcaatgccacctccgaagtcatcggctggatctagagtaaaaaatagagtcaagaatagagtcatcgttacagtccgccaaatgaattgtgttacacctagatatggaaatcaattttcatgtatccgctggaccgtcggcagcttgctcgacacgtctattcattatttgagagtttgcgaaagtccgctgctattctcagggtaagccactctactgtggcaaggtggttgaaggctcccgtgcagaaaccctacatgtccgcagttcgccaagaccgtagcaaggcgttgctggtcaaggaaacaattcgagttgcgatccgaaacgacccgttgttgtcctgtcggcagctccgtgacatcgtgaagaccgtgttgcgggtggacatttcccgcgagctggctagagtcgtcctgctgaaacaggggttgacccgaaagaaagcgaggttctacggggctcccgcggatcttccagggaagaccactgcgtttttgaagtcccgagcagacctggtcgatgccgggtttcaattctggtccctggacgaaaccagctttggtcgacatggggcacctgtacatggcttctcgacacggggggtgccccttcggatcatgaaacgaagcgctcgtgtcaccacggtgtccgcaatggtcatcgcgaatgcatcgggcacggtgatccacgaggaacgaaagggttcctttgcaactgcatcgtttgtagagttccttggtcgcttgacgattcctgaacattccatcattctacttgacaacgtcgcgttccaccgttcaaaagcggcccgagaggtggcttcgcggcgcaactggacgcttctcttcgtccccccgtactccccgtggttcaacccgatagaagggattttctcgattgtgaagcggcgctggtacagtggatcgacgatcgaggaagccttcgcagcggtgacgcccgcacacaatgccgcgttttttcgcaactccatggcgcataaagggttcgagccgtaaccaaagtatcctcatacacgccatgctatggaagcgaccaaggaaacgaagaggaagcgtccggatagggcccttaaacttgaagaacgcagagtctccacggaaaccgtagtgaagtgctcgctgcgtagcgtcctcctagggtcaccagcccaggtcgacgcaatggtcaacgccatccgctcccgggtcgtcgccgcgtcccgacgggtcgtcctcgcctccatcgccctgaatctactcgtccgagaagtcttcgaccgccagcccgacgccaccctcgacatccgagacgagacaaccctgcggcagttcatgcttgggacagcgagcgcgaataaacccgatgcaagggtggccgatatcttcctgcgcaaccctgggctcctgcacgaggtctccgatcgacacctttccgatcgcaacatctactcagcagccgccaaaaagctggggaccaatctccgcaaccacctcgtcgtcaacctgaggcgggtggtcaacaaggcgctcgcggatgtcccaaacgatgcggagagggttctgatgctctacacgctttacggatggaagggagggccgcgcaagaaaatcaagccgcccaagaaggcgaagacctcctcctctgtcgcaccgacggcagagatcgccccggagccgccaccactgctgtcagcaccccagctcgacttcatccgggagtgccgacgcattcttgggttcaccgacgacaccgaggagctgaccgaacgctggatggacaagcctgcgaacctgcctcggatactggcattcttcgtccacgtgaaccgcctgctggagcaccgtggggagcttgaggacgacccgctaaaccggggccccacctgcttcgcgctcctcccgatctgcaagatcaaacgccacttcgtgacgctcgacacccactccatccacggggttgcgcgcgacgctgagatcgtgnaagggggggcgcttcaccggaaccatcgagacggatggagtggctgtctgcatccattacgtgcgccccaaggtgagctcggaaggtggcgttgccggcgagaagggcgcgatcgagacggaggagtccagggcggcgaagaaacccaagtcgaccgccgctcagggagaggaggcggaggagaaggtggcgaagaaacccaactcaagcccgccgcggcccacggcggagcagctcgcgcggtgcaggatcgtggtgatcgaccccggccgcaccaacatcatctacgcggtggaggtgacgtcgtcgggcgtgaaggtctaccggctgacacgtgcgcagtactaccaggagtcgggagtagcgcgggggaagcagcaagccacgagctggctccgaggggtgaaggatgagctggcgcagctctccacggtgagccccaagggagcggatctccccgcgttcctgctcttcgtggcgacgcacctggcgacgagcgaggcgaggtgggaggaggccatgaaaccgaggtgggcgcagatgcgcctgcgcttgtacgggggcaagaaacgcgtcctgtcgaggtttttcaacgagatcgctcgagggcaagggggcgcagattcccgtcctgtcgtcatcgcgtatggagccgccaagttcgctccgggcgggaagggcgagttgtcggtgccgacaagcggagtcttcaaggcatgccaggagcggttccctacgtacctggtggacgagttccggacgaccaagatacaccacgtggacgacagcctcttgcagggcgtcggggagaggagatggaaaggagacaacgtgaagacggtgcgaggcttgctatggtgtggttccaccaacgagaagaaaagcaagttcatcaaccgagacttcaacggagccatgaacatccggagatgcttcgtgtcggcggagcggcctgcaatcctggacagatccaagtgccaggggcggctgcagttcgtgcggacggggcgcgtgatccggatgaagtaaatgttgcgaggtgtgggagctattcgcttcgttcgcgaagcaactgcgcgacctcaggggaggtcaccacgcgtgaaggtcgcagcgttggaaggttcgcttagcttgcggttaatgccgatgtgagcgtcgaacaaggggaagagaaatcgacccgccttctatacatgaagaaggcgggtgtaccacaattcacttgctggagtgtagtatcattgtcattgtcattgcagtcgcatgcctgatcctggcttccctgtgcgcctgcatgtggaaaatgaatacgtttggagggggtccagtcgaaggtttaatggatgcaggagaaggtttaatggatacaggagatggagatggagaagcagaagtgatctacatgttgcgcacacatgtctgcgatgatggcacaatggacatgctggcacggatgcagcaggatgtgggcgttgaccgagtatgggtcctgtatgatgacacgaaggagagcctcacaccgacgatggtcgacgctgcaacgaacagactcatcgtccacacagaagacggttgcagatcgcaaaacccgtttcacgataacatatggagcaatgtggatgcaccgctggccattgcgtacaatgtgcttcggcatgtcggcttcgattttgtgtggctcattgagaacgacgtctactgcgacggctcctttaaaaatgcatttgacaaggcacgcggccatggccacgatttcctggcggacaacctggaggaatataatgaagccaatcgtgactggtgctggttcccaagccttgttggcgagatcagcacagcggtccccgtgcatgagagagtcaagtcgtacttccccatcacacgctacagcaagcgcatgctgcagtgcatcgcagacaaccttggcaggtcaggggggttctgcgagtgctacattccaacgctggcacgctggcaggggctgacctatgccacgcttcctgagcccatgattggagatctgacaacagagcaccgaggctggaagctgacgccgcaaacactaccccatgagacgaacgatgtgttctggcacaagtactactactgagagctagagcttgacatcggccgggtcttaggtctgttcaccgacttgcggcggcgaagcagccagtcgaaccgacctcggctgtcgcgcgacaggaggatggcgaggcgctcgtgcgtcgagaggtcgccgacagcgcatgccatcgcaaagccgatgtcttcgaggtccccgatgtccttgctttctttatcaaagtcaaactcagactcaaactctgaacgcagccgagcacactcctggacgtcccagtagtcccagggaccatcacggtcgcggagcacttcaacgttcacgaggacgttcgcggattgactcacgaggacgttcgcggattgagattgagattgagtttcgttaagcgagcaccggtgcagaccttgcagggtcacgagatgatggccgtggtcgtaccctcgcgtcatgcgagcgatgaccccaacggaattttggggcagtgctgggggcaggtaggcgggatggagcgccgcggcgatgatgacgtgcgggcgggatgccaacaacgatcgaactctgccgtcgtcctccgcgtcgctgatcacgaactgtcgagtctccaatggcagcaggggcacggagcccgacgggtagtacaagggtagcttactgagcttactgagcttacggagcttactgagtcttttggacgttggagattggaaagccatccttgttctggttgtcttattcttagtcttattcttcttgttcgtcttctttcatgaagaaggaaacgtaaaaccacagaacggcggcgcaggaatgtgtccagaacccccagccagggagctggccctgcacccaccgaaccgcgcgctggaacggcgccgtctgcgtgcgccacgtttcgtgagcatgccacatgcgaaccccctgccagaacgtcgcggcggtcaaagggcagccgagacgcttgagacagcacatcatttcaatgttgccgtgcttcgcagcactcgcatacgccgtgccgtccatgggacagccgtgcgccgcgaggaattccaggagctcctcgctcccatgggtcaccgccgcacgaaaggtccgctcgtcccaggggcagccgcgttcgtggagccagacggtagccgccatgctgccgccctcggccgcctgctcgaagatcgcctcgtccaggtccccgtccttcaagagccacgccatcgccggcaagttacccgcgcgcgcggattggcgtaaggccccgggcctgctggcgacaaagccggctgtgtggatgaaatttaaaatttcgggcgtcatgctccctggaaaccggaaagtccaccaacatgtgggtccagtcagcacctggctcatcacgtactgcaccagctccaggttgcccgtgcctatgacctggtccagcaccccccagttcaagcggtagccacgcgagacgagccacgtaagacgaggaagcgcatcgggcatcgtcatcgcctccccgcatgtcgacatgcatttttcgcacccctgtgactccagccagacaatcttctcatggaagtcggtcaaaaggacactgcgcgctgcagcagggatgacgcaggacgacgccatgacgaagccgagttcatactttgataccagtacctgcagcgtggccaggtcgcaaccgcgagccgccgccctgaccaacatgtactctcggaactggtcgttactactttctggaacttctggacgagattgagtgagtctcaaaaagtaatccatcaggacgacgtggcctccccgcgcggcatgagtcgccgccatccaaaagtcgtgatagcaagctcggctgttgcggacgatccaatcgcaaacgaacggcggctggcccgcgtccgctgctgagcatcacactccgcaggacccctcgggcagtagaaggtcatgaggaagcggcagacgtccaggcgacccgcgccagccgctgcatcccagacctcgaattcccatgcatgggcctcggacctcctgaggagggccctgaggttctcgaccgagccgctacgcgccgtcagcttcgccagggtcatccgctggacggtgttcagtgtcctcatcttgttcgagatgaaccacctgaattccctgggcgggacaggcttcgagagcgtaaccgattttgaattcgaaaagtgtgctgccgtggccttgtcgaccaggcgcaggaagggtagacagttgtccgggaggtgcccagcgatgctggtgaggatgtccgggaaccagattcggtatgttgttgacgtcatgttcgttctctgttctctgtccctatcatcaaaaccctaaatcaagcgtaatcaatggcacaaacagattcagttgatcatcggtctttgagagtcgcacgggtctctgagtatcgcacgggtcttggagagtcgcacgggtcttcgagagtcgcacgggtccttcagggtccgggtccttcagtcattccggtctataatccgagtgtcccattttattttggcaccgactgtatgatcggtatggtgccgatgcgcatgcggaaggactccctggaagaggtcaccttgccgagaacggctgtaatgccaccgattctccgagaggcccccaggctcaccagagcacttatcccagcatgacttcagcttttgcctagaaggtttgcctagaggctgcacttatcagtgctcgggactagtggtctgcggaggcgtattccgtcacaggaactcgacctcagtccatcagggttatccccggagccccgtgtttctaacgggaaatactttggggtttattcatgacccctttcacccccccctgcgtcatttacccagacacgtttcttgtgttccgggtgtcccaaaataaatgacgccaactgtattatcgcggatggttgcggatcgttgggctctagatgcatctccagatacatgtatgatgtatttcagatgtatttcaacagcgtcacggacgagtcaaaactcaaaccatcgtgccatcatgtgaccttgattgtgacctgctcaccacttcactggaacaatcctcactgggtgttcgaccttggccagagctgcagtgaaggccagaatcggaactgccgtgaaatagtaagtgagatgggtgcatccaggatcggaatcgttttctatgtgacacaggccacggacaacgtcaaacttgtcatggatgacaccctcgtaaaatgcttccagcgtgacgccccctaatatgcatgtccgtgatttctccctctctcgcgtccgtaatcgcgacccgatccgaacacagatccgaacacagtctgtcagccactctcaacctagacctcaacccagtttcgccagcagctgccccagtgcgtccgcggaggccgactgcgtttctacccatcgctgcttcagcccggccagctcgagcgccttccgcgcggccgtttcggcaacctgtgcttccgccagctgctccttcgcccattttagctcgatcccttcatgcgccgctgccgcgcagaccgcattcgcggcggccagcttcatccggacctccttgagctcgaccgcctgctgccgtacggtctcaccgtcgacctgcgcgacggccagcatgtgccttgtccatttgagctcccccccctgctgcgcggcggccgcgccagccgcattggcggcggccagcttcatccggacctccctgagctcgtccacctgctgtgccacggaggacaggtcggcctgcgcggcggccagctgctccctcaccctctcgagctcgccctccaccagcaccgttgccgcgcggtcggcctgcgcggcggccagctgctccctcaccctctcgagctcgccctccaccagcaccgctgtcgcacggtcggcctgcgcggcgaccagctgccccctcgccctctcgagctcgccctcgcgctccaccagcaccgctgccgcgcggtcggcctgcgcggcggccagctgctccctcaccctctcgagctcgccctccaccagcaccgctgccgcgcggtcggcctgcgcggcggccagctgccccctcgccctctcgagctcgccctcgcgctccaccagcaccgctgccgcgcggtcggcctgcgcggcggccagctgccccctcgccctctcgagctcgcgctccaccagcaccgctgccgcgcggtcggcctgcgcggcggccagctgccccctcgccctctcgagctcgccctccaccagcaccgctgccgcgcggtcggcctgcgcggcggccagctgccccctcaccctctcgagctcgccctccaccagcaccgctgccgcgcggtcggcctgcgcggcggccagctgccccctcgccctctcgagctcgccctcgcgctccaccagcaccgctgccgcgcggtcggcctgcgcggcggccagctgccccctcgccctctcgagctcgccctcgcgctccaccagcaccgctgccgcgcggtcggcctgcgcggcggccagctgctcgagctcgccctcgcgctccaccagcaccgctgccgcgcggtcggcctgcgcggcggccagctgccccctcgccctctcgagctcgccctcgcgctccaccagcaccgctgccgcgcggtcggcnnnnnnnnnnnnnnnnnnnnnnnnnnnnnnnnnnnnnnnnnnnnnnnnnnnnnnnnnnnnnnnnnnnnnnnnnnnnnnnnnnnnnnnnnnnnnnnnnnnnnnnnnnnnnnnnnnnnnnnnnnnnnnnnnnnnnnnnnnnnnnnnnnnnnnntctccgcctccgcctccgcctccgcctccgcgtccgcctccgcctccgcctccgcctccgcctccgccctctgaccgcttgacacttggcgtcggtacgtattcgtcgtcatcgggtacgtattcgtcgtcaacctgctgctgcaccagacgcttcaagttcttgcgtagatttcttagtttgttcctcggaatgaatccacaattcacccatgcgaagtcggggttgggctgcaaggacgagtcgccgagcggaacgagccaggtggaaataaactgcatgcagcggtcggcttcgcgcggtcggcggcgcgcggtcggcttcgcgtggacgtggtcgaccagctcgggccacgcctcgagtagaggcaggaatgcctccgccgtgtgatcgcagacggcgcgcttgtcccgcaaattgcagaagaagaccagtggcttgtcgctcgcgatggctgcgcaggtcgcatggcagtaccggttgcagcgcgtgttggtcgatagagaatggtaggagcactgcaggagctcggcttcagcgggagctaggcatttgccaatgagctgcgccatgcacacggggtcgtcggccatatcgagattcgggagagagtttgagagagtttgagagagtttgagagagagttgagagcgattacatgtatttattacagctgtgcacgtacggcgcctttttcgtggaccataatcaaaacagtctcattgaatcttttgcacggtccgagaaaaagaataatcaggcctccctggagtccacgcgcgataaaaaagttccctactatgcatatgattgtgtaacgtctttgaaagtattatttggtcggtcaagaggtcacgtcgatttccagaaagaaagtttcctactcgtcttcgcgaatgaaggactttgaacgctcttggcgcaagctcagcagatccatcatcattgctgggacgagcggctgctgcttcgagcttgcttacagaaaggtgtacaatgacatcgtttctctgaaaaggaaggccggcaagctgaacaagctgatcaagctgatcaagctgcgcgatgacatcgtcgaccagtgctgggaggtcgctttggatcggtggatcccgcccgagacttgcaacgaacgtgtgcgtctcatcggagatgtgttcctgtacctcgatgcggcggtgctgaagccaaacggcgcgacgaccctggtggaggcgctccgggcccgcttcatgggcttcgctgcggcggtccggcagcggaaatcgcagcgcatgctggccttggccgctctccttcgccaggggctgaagaaggagatcgtgatggcacggtgaaaaaggcggcggtagatgatgcgacgacggggtggccagagaggcccgcgaagccgagtccgtcgagtgagcctaaggtcgtggtgcaccccctttccatcgcctccgccgccacgttgcgcgccccatctggcttggctcgctggggcgggctaggatggccggacggtgaggagttgcgtggattaattctttttacagtgttgtttactaccggacactacttggtcaccttgtacgacttgaccttcttgagcagctccatggcctcctcgctgttctcaaagtggtcacgaaccggctgcaggatcgcgttcaggtggcgcgagagtccggcctgcgttgcgcgtcaagacaaagctcaagaagagatccaacaagttcacaaacaagtccgacctttaggtctcccgggtgcagcgccccctcctcgtagtccgccgccagctccaccacactgacgtagcgcttgtcgccgccgtggtccgcgggccgtaacacgtcaaagtgaccgacccaggggagcacgatgaagcgcgcgtactcgaagcaggggttgcccgtcgtgaccttgggaccttcttgatcttggtcgagcgcaagtcctcttccccgatctccaaaccgaggacggcgtccggggggcgcatggaagataagttcttgagcatcaaatctgcaggaagccggagggtttatcattggtacgtttccttcctgcctttgctacctttactgcctctgcctctactgacttttctgacttttctgacttttctggctttgctgcctctgctgcctctgctgcctctgctgcctctgctgcctctgctgactctgctgcctctgctgactttgcgggctttgggtttggaccgcatcccccccccggcccttgacgctgggaaactgaggtgtatttcagatggtgcgactttgttgcctctgcgtatacttgcgttccaaaatgtatcgtcgggtggtcgtgcggtccgtgtgttcatcgtttcggttgcgtcatacggtacgaccgttgccgaccgcctgtttgtctgtcttgcgcttgtttggagcatgttttctatgtgcacgtacacatagcaatgctttcgccgtaatttaccgctaacatcccaccaccacacgctatagtccttaacatgttggtcgtatgacagcatatatttcactgtcggatccgtactttcccacacaacttcgctggtcttgttgaactcctccgggaactcatattcttcggaactcagattcgtcgttgggaagacaatgcctttcttgcgatgtcgcaagttcttgacctcattgatagggtacacacctaatcgtgcgacggcaataaccgcatccgagaagggctcacccgccgtgtaaggtttaacgattggcataatgaatactttcacattatcagtcgcattacccgactcattgaggaagaatcgttccagtcttcttactcgttccaagcgattaccccgccacaaattgaatgcgtggcttggatctattttaagtccttcactatcagatagtatgtttgatgcatcattgctatctgatacgatgaacacgtatactttatcccgtaacacatacttatttcctgcttgttggaggggttcaaatataccatacttctttcctgcttgttggcggggctcaaataatctaaatgtaccattcgcatatgacagcagcatgacagcgccatccaccttcgtagtacattcccacgcgtctcttatcggtagctcagaagtcgaactcgtattttgtgttgggaaccacaagcaaccttcagggtttcgcttaccaagctgcgactttggcataatgaatacagttacatcgctaccaggatcaaaacgataatcgagaatgaaatggtccgatctttttggtttctttaggagttgcttccattcatccttgtgcaactcctcgtcgttggtctcaaattttgtccgtcttgtctcgtggtttgtctggtttgtgtggtttgtgtggtttgtgtggtttgtctggtggtttgtctggtggtttgtctggtggtttgtctggtggtttgtctggtggtttgtctggtggtttgtctggtggtttgtctcgtggtttgtctcgtggtttgtctggccccgcaaggacatcctttatctacatttatgtaatttgagcggaggccagaaccaacaatgaacaacacaacacaaacacacctccgcctccgagtcctccatgaaaatggccgagttggggtcgctcttgctcatcttctcctgtccctcgagcagccccggcatcatcttgtgcgagagcacgatgggcttgcgctttgagtcgcagtactcgcgcgccagcatgttgacctgaatagaaggttaggttaggaagcacggtcatgatcttcgtgagcgtcaagttaccttgcgctggcccatgccaagctggcagatgtcagccttcaagaagaagatgtcggcgcactgcatgcaggggtagaatatctgcgcggcagtcaggtcatccgcctcggagcggcccatgatctgggagcacctgcgcggatcaggaacagggaactcgatcgggaaccaggaatacgggactcgggaaccaggaaccggacctgacgatgcgcttgaggctgttcttgcgcacaatgtccatcaccagcgtccagtactcctccggccgcttgttgatctcctcgctgctcgacaagaactccaccttcagcgtcaagtaagtaagaataagcgtctggttttttcgtgggtacgc

SEQ ID NO: 115 - DNA, 21188 bp, unidentified
  misc_feature 1..21188: note = Fanzor polypeptide
  variation 3094..5243: note = n is any nucleotide
  source 1..21188: mol_type = other DNA
  variation 9574: note = n is any nucleotide
tttgtcagaaacctgcctggctggctgctctcacccaagctgcttatcccaacagaactgtcagagcttccgaccaaatgcctgcccaacacacgacgatgcattggcgcccctgggatgcagtgtggtgcatcccaggggcagcccagcaggtatttttgccgtccacacgccttcaccataacccagcgtctcgcaagccacaacataccaccttcgcatcctccgggacacgtgcagcttggacgccgctcagccaatcttggacgccgctcaccagcccgcacactcattacccgctttcagccgcctgccccttgcctacctcgttgcccccttgcggctgagggccccgccttaccccgagctgtgcagccggccccgctcccgccgccgccacacgccctgctcgctggctgcgcccgctgccaaccccgcgccctgacctcccctgaccagaagccgcagcccctacccttttggggctgagcccccgccgcgaagcggcatcgggggggcgaagccccccgggattggtgccgtgtgcctgcgtccgtccgtccgccatgaacttgaataccaggcccatctggcttcgccacgaccttgccatgaccttcctctatccatccccccgggtctcgtgcccccaataaatcgggtgcgctctggaaaagtcggcgaacatctcgggcggaaactcaaacttgcgcctcgcggccagctcgcaacggctttggacatgcctatcactcctgtatccatcgtgcccggtcctgggccttcaagcccaactcggccgggcccgtcggccgggcccgtcgcgaattgcatggtcgggccgcgggcgcgctatctagagctcgccaccatagcatcctgcccttgccgacacaatgctggctgctcaagtgcattcgatgcgcctgtgctagctgtggggcacacatgtgtgtgcgttttgttttggcctgcttggtgatttggcgcggctagtaacacccacggtgctaatgattctcgtctgtggggttgggactggctggggcttgcggttgggctgtgcggtgaggacggcaggggagtctaggggcaggacatactgcaggatgggagggtggggaggggcttccatgcacaacggaaccggcccgtcctctcgggctcagccctttttccaagctttcttaaagcttagccccccttgtcacggctgaaggccatcaggcaggacgtgtctggacgtgttatgggcttctcctcctcgatctcgctctctcgctcactgttactgaagattggtatccactccaagagacagaacacttcctgactccgtggcccacacaatcccgctgtggcagcaagggggctaacgcgcatccagggggctcgagtcggattggtgccatttgagtgcagggtagaggctctgcgaccccaggattttctggaggtaagacattgaatcgctggccaacgtgtatctgtatatgaatcgacggctatctgtgtatgaatcgacggctcccttgtacgatagtacgacagcaagcttacatgttactggcaggggtcacctggttgagtccagtcctcagctcgtcccgtgccgggttccactgcaataagcacagcagtgcggggaactctacgagacaaccccgggctctatccttcatacggcaaagcagacacccgaggaacacccgtttctggtgttcctcctgctcgcggcaagccgacgcaaactgtatcaaggcttccataaccatgaccaccagcctataacccagcatagctctgctgccgccaatcgcgacgagccagcccgtgaggacgacgattttgatggcgatgatggtgtagcgcacacccccccacgtcaggtcctgcatagggcaggacagggccacccacacgaccgcggcaacaacagcccacgcccggccggagcatttctgcaagcagaaaacacgagtaagtcctacagaacgaccaaaaactcaacacacagctaggtgcagaacatgtccagccgggtgcacgcctccggacttcctgggaagcagtgggcgcccggttgctcttgagcagtgcggcgccaagaaggacgtcctgctcgcaaaccacgtcctccagcgcctcctctcgttgctgctgttgcatcagcggcggtggcggcatgcttgcgctgctcctctgttgagcggccgcagaggtgctgcttgcacggcagtccggcaggcggcagcctgaggctgcggacgatgtcgccttgtccatacgtacctgcgggggtgcagcagggggttgcagcagggagcctgcgtttgcttgcctctctgtgcggccgtgacgccaagatgcgcaatgttgacacgcgtgcggctggcagcgggcatgaggccaccagggtgtgagcaagcagagcaattacagcctggacagcacttctgggggcggattggatgtacgatggcggaacgggagagagctgtcagtgtccctacgattgcctgtctgcgacgcaccttgggctgcccctgcgcaggctgcggaggctgcccctgcgcaggctgcggcggctgctcctgcgcaggctgtgccggctgcccctgcgcaggctgcgcaggctgcccctgcgcaggctgcgcaggctgcggaggctgcccctgcgcaggctgcggcggctgctcctgcgcaggctgtgccggctgcccctgcgcaggctgcgcaggctgcccctgcgcaggctgcgcaggctgcggaggctgcccctgcgcaggctgcggcggctgctcctgcgcaggctgtgccggctgcccctgcgcaggctgcgcaggctgcccctgcgcaggctgcgcaggctgcggaggctgcccctgcgcaggctgcgcaggctgcccctgcgcaggctgcgcaggctgcggaggctgcccctgcgcaggctgcggcggctgctcctgcgcaggctgtgccggctgcccctgcgcaggctgcgcaggctgcggaggctgcccctgcgcaggctgcggcggctgctcctgcgcaggctgtgccggctgcccctgcgcaggctgcgcaggctgcnnnnnnnnnnnnnnnnnnnnnnnnnnnnnnnnnnnnnnnnnnnnnnnnnnnnnnnnnnnnnnnnnnnnnnnnnnnnnnnnnnnnnnnnnnnnnnnnnnnnnnnnnnnnnnnnnnnnnnnnnnnnnnnnnnnnnnnnnnnnnnnnnnnnnnnnnnnnnnnnnnnnnnnnnnnnnnnnnnnnnnnnnnnnnnnnnnnnnnnnnnnnnnnnnnnnnnnnnnnnnnnnnnnnnnnnnnnnnnnnnnnnnnnnnnnnnnnnnnnnnnnnnnnnnnnnnnnnnnnnnnnnnnnnnnnnnnnnnnnnnnnnnnnnnnnnnnnnnnnnnnnnnnnnnnnnnnnnnnnnnnnnnnnnnnnnnnnnnnnnnnnnnnnnnnnnnnnnnnnnnnnnnnnnnnnnnnnnnnnnnnnnnnnnnnnnnnnnnnnnnnnnnnnnnnnnnnnnnnnnnnnnnnnnnnnnnnnnnnnnnnnnnnnnnnnnnnnnnnnnnnnnnnnnnnnnnnnnnnnnnnnnnnnnnnnnnnnnnnnnnnnnnnnnnnnnnnnnnnnnnnnnnnnnnnnnnnnnnnnnnnnnnnnnnnnnnnnnnnnnnnnnnnnnnnnnnnnnnnnnnnnnnnnnnnnnnnnnnnnnnnnnnnnnnnnnnnnnnnnnnnnnnnnnnnnnnnnnnnnnnnnnnnnnnnnnnnnnnnnnnnnnnnnnnnnnnnnnnnnnnnnnnnnnnnnnnnnnnnnnnnnnnnnnnnnnnnnnnnnnnnnnnnnnnnnnnnnnnnnnnnnnnnnnnnnnnnnnnnnnnnnnnnnnnnnnnnnnnnnnnnnnnnnnnnnnnnnnnnnnnnnnnnnnnnnnnnnnnnnnnnnnnnnnnnnnnnnnnnnnnnnnnnnnnnnnnnnnnnnnnnnnnnnnnnnnnnnnnnnnnnnnnnnnnnnnnnnnnnnnnnnnnnnnnnnnnnnnnnnnnnnnnnnnnnnnnnnnnnnnnnnnnnnnnnnnnnnnnnnnnnnnnnnnnnnnnnnnnnnnnnnnnnnnnnnnnnnnnnnnnnnnnnnnnnnnnnnnnnnnnnnnnnnnnnnnnnnnnnnnnnnnnnnnnnnnnnnnnnnnnnnnnnnnnnnnnnnnnnnnnnnnnnnnnnnnnnnnnnnnnnnnnnnnnnnnnnnnnnnnnnnnnnnnnnnnnnnnnnnnnnnnnnnnnnnnnnnnnnnnnnnnnnnnnnnnnnnnnnnnnnnnnnnnnnnnnnnnnnnnnnnnnnnnnnnnnnnnnnnnnnnnnnnnnnnnnnnnnnnnnnnnnnnnnnnnnnnnnnnnnnnnnnnnnnnnnnnnnnnnnnnnnnnnnnnnnnnnnnnnnnnnnnnnnnnnnnnnnnnnnnnnnnnnnnnnnnnnnnnnnnnnnnnnnnnnnnnnnnnnnnnnnnnnnnnnnnnnnnnnnnnnnnnnnnnnnnnnnnnnnnnnnnnnnnnnnnnnnnnnnnnnnnnnnnnnnnnnnnnnnnnnnnnnnnnnnnnnnnnnnnnnnnnnnnnnnnnnnnnnnnnnnnnnnnnnnnnnnnnnnnnnnnnnnnnnnnnnnnnnnnnnnnnnnnnnnnnnnnnnnnnnnnnnnnnnnnnnnnnnnnnnnnnnnnnnnnnnnnnnnnnnnnnnnnnnnnnnnnnnnnnnnnnnnnnnnnnnnnnnnnnnnnnnnnnnnnnnnnnnnnnnnnnnnnnnnnnnnnnnnnnnnnnnnnnnnnnnnnnnnnnnnnnnnnnnnnnnnnnnnnnnnnnnnnnnnnnnnnnnnnnnnnnnnnnnnnnnnnnnnnnnnnnnnnnnnnnnnnnnnnnnnnnnnnnnnnnnnnnnnnnnnnnnnnnnnnnnnnnnnnnnnnnnnnnnnnnnnnnnnnnnnnnnnnnnnnnnnnnnnnnnnnnnnnnnnnnnnnnnnnnnnnnnnnnnnnnnnnnnnnnnnnnnnnnnnnnnnnnnnnnnnnnnnnnnnnnnnnnnnnnnnnnnnnnnnnnnnnnnnnnnnnnnnnnnnnnnnnnnnnnnnnnnnnnnnnnnnnnnnnnnnnnnnnnnnnnnnnnnnnnnnnnnnnnnnnnnnnnnnnnnnnnnnnnnnnnnnnnnnnnnnnnnnnnnnnnnnnnnnnnnnnnnnnnnnnnnnnnnnnnnnnnnnnnnnnnnnnnnnnnnnnnnnnnnnnnnnnnnnnnnnnnnnnccgcatccccaagacccccgcccagcagccccgccgccgcccctgccccaatcccgcggtattgcgccgccccgggcagcgatccgtgcccgatcgtgccgcgaacggtcgccgacaccggccgacacgcctactgctcgaacatcttggcaatctctcggggactctcgggtccgctcggggtccgctttcgcctcggcgttgagtgcccaggtgcgtctgcgagctcaagctttgcgttcggcaccgttcgacctgcgaggtctactcgatgcagcgtccctgatgcgcccgatgcgcaatgtcgccttgtcgctcaccgctcgttctcctcgccacaggacttcccccattttagttcgaccttcatcagcctcatccaggatggagtcgtcgagtaggttgtccgctcacgtcggtgttcgcctttcgttgaagcttgactgcgccacaggttctcgccccaccatgttctatttctacaacttgacacgcgggaggcttcgtgtctacacttccagtgacgcagtcattgccaagtacactgtgtcacccacagaggccgaccacaaactgtccatggagggcaacagaatcaccatcgctgctgagtcgcccggcaacgagttcaagaccgatgtgcaccgtggacggaccatggacggacagaaccttgtcgtctacgagggccgcgcgcactacgagtgcaactggttcaaggacgaggacatcgatcgcgagctggactccatcctgcgaagggtcgtctacgcggaccgcgaggactggtccaaggacgagtacgagaaccgcggggacgggttcaaggtcgatggcaagctggacatcctgccaagggatgagtcgaaacgggaacgcttcgcgaagctcatcatgcgtcgggctggcaggcctgctatgctcgatctcataaagtcgtccactctgatacagtggtccagctacttgcgtctcagcgacgactcaccaacgattcggggcaagatcgtggcggccatagggatcaatgatcaggtaggatcaagtaggatcaggtagttgttgtttctggtctgtgttggtgttgtactcccctaagcaggtgttgtactcccctacctaccctgctgcacagaccttgaaggactactcaggggagatctacctcgagaacctcggcgacatcgacctcacctgcaaggagctgcccacgtgcatcaagcgcattcagaaggccacgctcgtgctcggcgacacactgcacatcaactcgcatgtcgtattcgacgacgtcagggtcaagtacaagttcagcgacaagagtgtgatcgtggtcaaggggggcgccggcaccgaagacacgcccgtcaccatgaaaaatgtgcgttttcggttcgacaaggagagtagcagcgtctcgacttccccaagcgagtccttccttctcgacgtcgagagtcatgtcaccctcgacacctgcaagctgtcgcgcagcacaggcggcggcgctcgcgtgcacgacggcgggcatctgagggcgactggcacgacgttcagcggcaacaagtccaccggtgtgacggtcagaggcgccggcagcacggccgtcctcgaggagggctgcacgctgtcggacaacgtctccggcgcggtcgtggagagtggcgggcacctggaggcgactggcacgacgttcatcggaaacaaagaagacggcgcgatcgtgcaagacggcgggcacctggaggcgactgccacgacgttcatcggcaacaagggagacggcgtgattgtcagtggcgccggcagcacggccgtcctcgaggagggctgcacgttcagcgacaaccgaatcggcgtgtttgtcgtaaaggccggcagcaaggccgtcctcaaggagcgctgcacgctgtcggacaacgtggaggcctgcgcgtacgtgcaagacggcgggcacctggaggcgactggcacgacgttcagcggcaactggagctacggtttgaggatccttgccgacagcacggccgtcctcaaggagggctgcacgctgtggaagaacaaggtacacggcgcgttcgtttttttcggcgggaacctggaggcgactggcacgacgttcagcggcaacgtgtcatacggcgtggaggttgaaggctatggcagcaaggccgtcctcaaggagggctgcatgctgttggacaacgagtccggtgcgcacgtacaagacggcgggggcctggaggcgactggcacgacgttcagcggcaacaaggaagtcggcgtgaaggttagtggcaacacggccgacttatatgaggacaaagaagacggtgtgaaggttattggcactcccagcaaggccgtcctcaagggctgcacgctgtcgaagaagaaggttggcggcgcgttcgtttccaagggcgggagcctggaggcgacttgcacgacgttcagcggcaacgatgaaggcggcgtgaattttaatgtcaccgacaattccaccggcttgtctgtcactggcccccgcagcacggccgtcctcaaggaggactgcaagctgttggacaacgaggacaccggcgcgttcgtggagttgggcgggagcctggaggcgactggcacgacgttcagcggcaacacgttaactggcgtgtatgtcactggcactggcagcacggccgtcctcaaggagggctgcatggtgtcggagtcgcactccggcggcgcgatcgtgagtggcggcgggctcctgaaggcgactcgcacgacgttcagcggcaacttcaaccacggtatgaacgttacagtccgccaaatgaattgtgttacacctagatatggaaatcaattttcatgtatccgctggaccgtcggcagcttgctcgacacgtctattcattatttgagagtttgcgaaagtccgctgctattctcagggtaagccactctactgtggcaaggtggttgaaggctcccgtgcagaaaccctacatgtccgcagttcgccaagaccgtagcaaggcgttgctggtcaaggaaacaattcgagttgcgatccgaaacgacccgttgttgtcctgtcggcagctccgtgacatcgtgaagaccgtgttgcgggtggacatttcccgcgagctggctagagtcgtcctgctgaaacagacctggtcgatgccgggtttcaattctggtccctggacgaaaccagctttggtcgacatggggcacctgtacatggcttctcgacacggggggtgccccttcggatcatgaaacgaagcgctcgtgtcaccacggtgtccgcaatggtcatcgcgaatgcatcgggcacggtgatccacgaggaacgaaagggttcctttgcaactgcatcgtttgtagagttccttggtcgcttgacgattcctgaacattccatcattctacttgacaacgtcgcgttccaccgttcaaaagcggcccgagaggtggcttcgcggcgcaactggacgcttctcttcgtccccccgtactccccgtggttcaacccgattgaagggattttctcgattgtgaagcggcgctggtacagtggatcgacgatcgaggaagccttcgcagcggtgacgcccgcacacaatgccgcgttttttcgcaactccatggcgcataaagggttcgagccgtaaccaaagtatcctcatacacgccatgctatggaagcgaccaaggaaacgaagaggaagcgtccggatagggcccttaaacttgaagaacgcagagtctccacggaaaccgtagtgaagtgctcgctgcgtagcgtcctcctagggtcaccagcccaggtcgacgcaatggtcaacgccatccgctcccgggtcgtcgccgcgtcccgacgggtcgtcctcgcctccatcgccctgaatctactcgtccgagaagtcttcgaccgccagcccgacgccaccctcgacatccgagacgagacaaccctgcggcagttcatgcttgggacagcgagcgcgaataaacccgatgcaagggtggccgatatcttcctgcgcaaccctgggctcctgcacgaggtctccgatcgacacctttccgatcgcaacatctactcagcagccgccaaaaagctggggaccaatctccgcaaccacctcgtcgtcagcctgaggcgggtggtcaacaaggcgctcgcggatgtcccaaacgatgcggagagggttctgatgctctacacgctttacggatggaagggagggccgcgcaagaaaatcaagccgcccaagaaggcgaagacctcctcctctgtcgcaccgacggcagagatcgccccggagccnaaaccctacatgtccgcagttcgccaagaccgtagcaaggcgttgctggtcaaggaaacaattcgagttgcgatccgaaacgacccgttgttgtcctgtcggcagctccgtgacatcgtgaagaccgtgttgcgggtggacatttcccgcgagctggctagagtcgtcctgctgaaacagacctggtcgatgccgggtttcaattctggtccctggacgaaaccagctttggtcgacatggggcacctgtacatggcttctcgacacggggggtgccccttcggatcatgaaacgaagcgctcgtgtcaccacggtgtccgcaatggtcatcgcgaatgcatcgggcacggtgatccacgaggaacgaaagggttcctttgcaactgcatcgtttgtagagttccttggtcgcttgacaattcctgagcattccatcattctactcgacaacgttgcgttccatcgttccaaggcagcccgggaggtggcctcccagcgcaattggactcttctctttgtccctccgtattccccatggttcaacccaatcgaaggaatcttctccactccaaacacctgccccagggggggcgcttcaccggcaccatcgagacggatggagtggctgtctgcatccattacgtgcgccccaaggtgagctcggaaggtggcgttgccggcgagaagggcgcgatcgagacggaggagtccagggcggcgaagaaacccaagtcgaccgccgctcagggagaggaggcggaggcggaggagaaggtggcgaagaaacccaactcaagcccgccgcggcccacggcggagcagctcgcgcggtgcaggatcgtggtgatcgaccccggccgcaccaacatcatctacgcggtggaggtgacgtcgtcgggcgtgaaggtctaccggctgacacgtgcgcagtactaccaggagtcgggagtagcgcgggggaagcagcaagccacgagctggctccgaggggtgaaggatgagctggcgcagctctccacggtgagccccaagggagcggatctccccgcgttcctgctcttcgtggcgacgcacctggcgacgagcgaggcgaggtgggaggaggccatgaaaccgaggtgggcgcagatgcgcctgcgcttgtacgggggcaagaaacgcgtcctgtcgaggtttttcaacgagatcgctcgagggcaagggggcgcagattcccgtcctgtcgtcatcgcgtatggagccgccaagttcgctccgggcgggaagggcgagttgtcggtgccgacaagcggagtcttcaaggcatgccaggagcggttccctacgtacctggtggacgagttccggacgaccaagatacaccacgtggacgacagcctcttgcagggcgtcggggagaggagatggaaaggagacaacgtgaagacggtgcgaggcttgctatggtgtggttccaccaacgagacgaagagcaagtttgtcaaccgagacttcaacggagccatgaacatccggagatgcttcgtgtcggcggagcggcctgcaatcctggacagatccaagtgccaggggcggctgcagttcgtgcggacggggcgcgtgatccggatgaagtaaatgttgcgaggtgtgggagctattcgcttcgttcgcgaagcaactgcgcgacctcaggggaggtcaccacgcgtgaaggtcgcagcgttggaaggttcgcttagcttgcggttaatgccgatgtgagcgtcgaacaaggggaagagaaatcgacccgccttctatacatgaagaaggcgggtgtaccacaattcacttgctggagtgtaaagacactggcagcaatgccgtccttgagaactgcatgctggaggagaactacacgtatggcgcgttcgtggacgacggcgggagcctggaggcgactggcacgacgttcagcggcaacgaacaagtcggcgtgaaggtcagcggcaccggcagcacggccgacctcaaggagcgctgcaagctgttggagaacaaggaatacggcgcgctcgtggccagcggcgggagcctgaaggcgactggcacgacggtcagcggcaacaaaaaagtcggcgtgcttgccatgggcgacggcagcacggccgtcctccaggagggttgcacgttcagcaacaacccaatgcccgtgtgggaggaggacaacggaaagttaattgcgcagtagaaaaaatagctgagggggagaggtagttccgggctttcaactggactgtgggcctcttgtggggtgaaatgctgattcggagtgtagagtggagatgcgccagggtgacgtctcttcatgatggaacccgacgagaggagaacggctttcaacgacgcgctgggctcttgtggttgctggttccgggcgctgatgggcctgacggggccgtgaagggacgatcatgggccgcgaggggacgatcgacgggcctgctgggtccgcgagggggcgctgacgggccgtgaggggacgataaggtcgcgagggggacgctgacggggccgtgaggggatgtggaccatcaggggctgcttctatcttcattcgagatctgacctacataaacctacatgcacttgtaaactatgattcccgactctcaatgtccgtccgactcctagagagccagcgggtgcctcgcaagggtctcgctgtagatgcttcgccaaagagaggtccatcgacgatgccctcgcactcctcgccgtccccaatggggtgccaacggggaaccaagggggcaaagggtggggccgatggggtgccaagggtggggcgacgcagggctgatggagccaaggggcgccaaggggtcacgaagggggcccattgggggggcaaaggggacacgaaggggccgatggggtccacttggggcgccaaggggacatttccgctcgcaataagtagcgccgtgagtacaattggctcgagccccagctccggccgagctcgagccgagctaccgagccgagccgagcgacggttgtaggtcctgggaggaagttgaagtatttttaacgcactgtgtggggcgtcttaaaagagatcgccggccttccctggagtgttgagcacacgccatgttcgcgtgccttctcgctgcatcttatagcctaaatcttaatctacatcgcaatcttaaagagcagcacacggtcgctgaccttcactgtcgggattctgcttcgtcgctcgctgccacgatcgaccatctccacgagccctactgctcgaacatagtggcgaactctcgggggctctcggggtccgcttttcgcctcggcgttgagtccccaggtgcgtctgcgagctcaagctttgcgtttggcatcgttgaggtctacggagtctttgcagcgtccctgatgcgcccgatgcgcgatgtcgcaccgctcgttctcctcgccacaggacttcccccattttagttcgaccttagaccttcatccgcctcatccaggctggagtcgtcgagtaggttgtccgctgctcacctcggtttcgcctttcgttgaagcttgactgcgccacaggttctcgccgcaccatgttctatttctacaacttgacacgcgggaagcttcgtgtctctacttctagtgacgcagtcgaggccacgcacactgtgtcgaccacagaggccgacctcaaactgtccatggagggcaacacaatcaccatcgctgctgagtcgcccggcaccgagttcatgaccaatgtgcaaaccatggacggacagaaccttgtcgtctacaagaagggaggggactacacgtggaactgggtcgaagcggagagaattgaggacttcctggactccatcctcgaggagtcggatcgggaacacttcgcggagctcatcatgaagagggctgacaggctggctatgctcgaactcgtaaagtcgtcctcaaaaaaaatacagtggtccagctacttgcacctcagcgactcaccaacgattcggggcaagatcgtggcggccatagggatcaatgatcaggtaggatcgggtaggatcaggtaggatcaggtagttgttgtactcccctgagcgtcccctaccctgctgcacagatcttaatggactactcaggggagatctacctcgagaacctcgaggacctcggcgacatcgacctcacctgcaaggagctgcccacgtgcatcaagcgcattcagaaggccacgctcgtgctcggcgacacactgcacatcaactcgcatgtcgcattcgacaacgtcacggtcaagtacaatttcagcaacaagagcgtgatcgtggtcaaggggggcgccggcaccgaagacatgcccgtcaccatgaaaaaagtgcgttttcagctcgacatcaacgtctcgacttcacgcgacccaagcgacgtcgaccttctcgacgtcgagagtcatgtcaccctggacacctgcgagctgtcgcgcagcacaggcggcggcgctctcgtgcacgacggcgggcagctgaaggcgactggcacgatgttcagcggcaataataagcacggtgtgacggtcagaggcgccggcagcaaggccgtcctcgaggagggctgcacgctgtcggagaacgagatgcgcggcgcgagcgtggaagacggcgggtgcctggcggcgactggcacgacgttcagcggcaacaagcgagacggcgtggatgtttgcggcagtgacagcaaggccgttctcgaggagggctgcaagctgttggacaattcgtttggcgcactcgtgctcagcggcgggcgcctagaggcgactggcacgacgttcagcggcaacaaggaagacggcgtgtgtgtcagtggcaaaggcagcacggccgtcctcgagaaggactgcaagctgtcggacaacaagtatggcgcgttcgtggacgacggcgggcacctggaggcgactggcacgacgttcagcggcaacaagctcgacggcacgtatgtcactggcgacggcagcacggccgtcctcaaggagggctgcaatctgtcggacaccaaggaggtcaacggcgcgttcgtggaagacggcgggcgcctggaggcgactggcacgacgttcagcggcaacaagattaacggtgtgacggtcagtggcactggcagcacggccgtcctcaaggagagctgcacgctgtcggagaacaagatgcgcggcgcgagcgtggaagacggcgggcacctggaggcgactggcatgacgttcagcggcaacaagttaaacggcgtgttttgcggcagtgacagcacggccgtcctcgggaaggactgcaagctgtcgaagaacaaggaacacggtgcggtcgtggtcagcggcgggcagctgaatgcgactggcacgacgttcagcggcaatgagaagcacggtgtgacagtcagtggcactgacagcaaggccgttctcgagaaggactgcacgctgtcggacaacgtcgtccacggcgctcgcgtgaaagacggcgggcgcctgcaggcgactggcacgacgttcagcggcaacaaagtattcggcgtggcggtcaagcacgccggcagcacggccgttctcgagaaggactgcacgctgtcggacaacgtcctccacggcgcttgcgtgaaagacggcgggcgcctgcaggcgaccggcacgacgttcagcggcaacaaagtattcggcgtggcggtcaagcacgccggcagcacggccgtccttagtggctgcacgctgtcggacaacgtcgtccacggcgctcgcgtgaaaaacggcgggcgcctgcaggcgactggcacgacgttcagcggcggtcaaggtttagtggtggccaaggacgccggcagcacgttcgtccttactggctgcatgggacgcaacgggacgattctcgcagacgcaactatggaggtagctgcgtcctaccaactggtgggtgacatgctgattccgagtgagagtggagatgcgccaaggtgacagatgaggtcgtgatggaacacgaggagcggagaacggctttcaacgacgcgctgggttcttgtggttgctctggttccgggcgctgacgggcctgacggggccgtgaggggacgatcgacggccctgatggggccgcgagggggcgctgacgggccgtgaggcgacgtggacgatcagggcctgatggggccgcgaggggacgatcaggggtcgcgaggggggcgctgacgggccgtgaggggacgatcaggggccgcgaggggacgatcaggggctgcgagtgccctcctatcttcattcgacaatgacctgacctacataaacctacatgcacccggtgcatgacttgtaaactgtcattcccgactctcaatgtccgtccgactcctagagagccagcgggtgcctcgcaagggtcttgccgtagatgacttcgccaaagagaggtccatcgacgatgccctcgcactcctcgccgtccccgggcacacgcgccacgagttcttgaactcacgagttcatactcggttgtacctcgattacgatgaggtccttgaaacgccgctgacaccggagatcctgaaggacaggaaggagaaggtcgtcgccatgctcgacgcgctcctcggacccttcgtcgcagaaaacactcaagtatcgtattccatcgccagccgacacggcttctccccgcgccacggcaagttcaaggtctccttccggccgttcgtccgcggcctctccatcccgtacacggagatcccgcggctcctccgatccactcagacctccgatcttccgagcttccaagacttctgggacatgtccatctacaaggacggcgagcagctcctcgccgcgatcaacggcatcaaggatcgcgacgacccgcgtgtcctgaccaaggaacatgcagacgacccggacgcctggtacgtcgcgcagatcctcgatgacgacgcgctgcccttccgcatgccagtcgaggagtctcaacgcccagagtctcaacgccgagaatctcaacgccgagagtcaaacgtcgacatcgtcctggtgcgcgacgtgctgacgtgcttgtcctccgaccgcttccgcgactacgagtcctggaggaccgtcggcttcgccctgaagtcattgggggactctacgcgggactacgcgggactcttccaggagttctcacgtattccagagtacgatagtaccgaggctcagggagcgtgccgcgagctcttcgaacgcgcctctacgaacggagtgactttcgggacgctgcggcactgggccaaggaggacgacgctgcgggctacgagcgggcgtgcgcggcgtacaagcaaagagaagtcacgtcacacgtcaagagagtccccgatgataaaatcatggacgccgcgcggatcctctacacgaagctcacttttagaccagcaccgatcgccagcgtcctgcgtcacgacgtcacaaaggccgtgttcgacgtccacgtcctcctcgacgacgtgaccgaggggcacctgaccatggccctggacacgctgcacgtcaggggagtcttccacggcgagacctttgagaaatacctgaacgacagcgaggccacggcgatcccggtcgtgggggtcgaaatagcgtcggttcacaaggatctgctacccgacctgcaatggcgcatcatgcgcccgacgggcacgcgagcagtcttctcgacagagaataacggagccatgatcgaggtcctgaacgtcaacagccctggcaaggaaacggccaacgtcaagttcgatctcaagaccgccgccatcaagaagggacagatgtccctcctgaacgatgcctacaagaaggccatccagaactcggtggtcaacgacatgaacatgggctgggccatcaacatcgccatcaacgggaccgtcaacatctacaacggtcaacccgaggagaaggaatcagcattcgacatcctccgacccatcttcctcaatcgggcccaggagcagcgcctgcggaagctcgatggcatcatctaccgacccgtccctcattgcccgtgtgcgtacgtatccttgtcgacgtatgctgacttcatcaatgactccctctcgggtcacgctgtctacgtctcgaatcccaagaggttcgaggaggcaatgaagtatctcacgaactaccgcgacgataaactgcccctcctcgtgcgcgacacgcacttgctttccttctcaaatggcgtcctcaacatccagacgcgagagttcatcgagtactcccttatctcgggcgactcttccggccagctctctggcaaagttgcgcggcatcacatcgacgctcgctacagtggcacaacggacacgcccctcctcgacatcatattggacgcgcagtttggcaaggaggtcgccgaggtcctctgcgcgttgttcgggcgggccatgttccgggtccgcgagctcgacaactgggaggtcatgccttacatcgtcggtgtgggaggcaccggcaagtcgctgctcctcaacgtcctccagcacatgttcgccccggaggctgtcggcagcctcgccgctaaacgcgaggtcatcttcggcatggccaacctcgtcgacaaggaggtcgtcatcggccgagatatgccagccaagctgtccgagagcctgccgcaggagatcatgcagtgcatgacaacgggcgagcagatggagatccctcggaagaccacgacggccctccacgttccctggagtgcccccgtcgtcatggccagcaaccacatgccggactatctgaataccgggaacaacgtggggcgccggctggtcgcgctctgcttcaacaacgtcgtcgccaacccccaggaagacctccagtcggcgatccttgcaggagagctcccgtcaatcatcgcgcggtccctggcctcctatgggaacctgcgcgcgagggtcaaggccgcggggtcgttctggaaggccatgccgccagaggttctcgagtggaggggcaaactctcggcggccacgaacacgctctacgagttcctcgccatggaggacgacgaacggacctcaccgtcgaccttcaagacttactcaatctccaacgttccgggacacgtcacatgggtgtcggacctcaagcacgccttcgaggactgcatgtcctccaaactccttctcgacgcagccacgctcgggacattcgggtaccgggcgtccggaggacgcgaacacgtctgcaagagctgcaagggaatcgcaaaggcccgtgggggacgctgctgcgatgcatatgatgtcaagaaccgcatcaagaaggaggttatcttcgacatgcgaattgtcaccatgtaaaactagggtgttgtaacaagtttcgttccaactctcatccgtcagctggcggaaaccccccttggtggtcgttttttgctccgcccgaaagcggagcaaaaacatgagcaccggggtggctccaacaaggagcacatcctcctgacgatccacggcttcaagcagctgtgcatgtcagccaacaccgagaaggggcgcagggtgcgcgagtactacatcagcatggaggaaatcttgtttgagtacacacggtgcaacgctgtgaaggagcgtgagcggttcaatgcgacgatcgaggaggctaagaaggaggccgaggaatccaacgcacttgcagcagccaaggaggcggagctcgcaaagatccgcaccaagatctacaaggagctccccaagctggacaacgtctacgtgaacaaggaggtggttgcgcctcaatggcgcctggccaagggccaagccgagctggccactgacgcgcacaaggtcggcaaggccattgatccgaagaagcgggaggttcgcgcacaagcgcgctcacgaagtgaagcgcagctcaacactggcagatgttggtatagcaccccaccctgatatctcatggaacaacgtaacatggaacaagctggggtgcctctcgcatttttaacgcataaaggatctgtaagttgtcggtaggaacatcatggatcctgtccgccccctcaagagtcacatttccgtgaagaggctggaggatatcaaggtcgctctgtcttgcaaggggtacacggcggcgcaagtcctcgaagtcgaggccgtcatctgccaggcgctcaactttgatccgaatgacaagcgattacttcaataccaacgcgaaaaggtccgcgagaaggcgaaacgcctgggcgtgagcactttcatcgcttctgggcacaagccaaccactcagaagcgacataaaggcagctctactcatatcgagtagacacgacaagacgatggaagtcacaggatggaagttgcagcggtgcaagatcgtaatcacgtgtccgccccttccaagttaggcaaagatgcggccacatgcatggccgtagggaccagactccatcgacaccaccagctgagcaccaaggcctgtcatacacacacaccgttccagctggatctggacgatccttacgaacacacaccgttccagcttccaggtgcgcgcacagagcccagaccgtgcaaggcttcgccagtcaatgtcaacggtcatggcaaccactgcaaagctgccgtttaccgctcaacaacctcgagagagcgctctgccccacgacaagccgagtcctgaccttgccttcccaatccccccgtaccaagcaggcaagagcacgctccaagatgcaatccactaggtgcataatgagtacgccaccatttgatggacatacacgctccaagacaaccttattcgtttctccaacgtgcccgtgccacacaacagagagggccgacccgcgcctcagccgcggcaaggaggctccgaactcagcacacctgctcaatcatcgctccctcgatgaccgttgcctgcagcggacgaggcggggttgggtcaagaaagactagacaattgcgcagaagcccggggttggacggggttgggtgatgtgttcccgagcactggtgcctggtgagctctgaggcaccgtttgctgtccgggtgtcctggtcttagaagtaaggttgccagcagcggttcatggcccatggcccatggatgcaggatccaacaccgtccctagcgagccgcgctgacgtctcgcttcctgcagcatcagcacccctccgtgcagccttgcttggggagcagccgctcagatgcggacgcaatggggccaagcgcttgctctgcagccaccacctcgtcacggcagaaggccgcacccctcggctgcacctgatccaccagccgaggccgacacccgcaatgagcgccacccccaacaggtgtagcatcctcctcctgcacctttgcgctggttctctcccccgtcttcttccaccgccccggcgcttgcacgcacgtcgcacacctgcccccttggcattacatagcggtgtggactggcgctgatattgctcatcgtttgtgttgcgcagtacaaggcgtcggtgcgtccttccgggcggggcggctagctacccaacgccctggcagcctttgacagccgccatcgccatcacacctctgccgccagcagcccctcagc

SEQ ID NO: 116 - DNA, 21986 bp, unidentified
  misc_feature 1..21986: note = Fanzor polypeptide
  source 1..21986: mol_type = other DNA
tgccagtaagtttcatttattctctgatattatcatgttctttgttacatctacaatcaaccaaacaaacaattccgcaacaaacttgcaatgacgcgaagaaaaacatcggcaaaacaacaccgtagacaacccacgacgcaaccaaccaaccaagtctcatgtacaaaccagtacacgagctattacttaaacaacttgctcaagtaatgtcagcgaccagttcactttcagcgccgcagccactgccttggcgccctcgtcgccgatattgttgcccgaaagactgtcgatttgattgaatgatggcaagcaatacattacacgttacatattacaatagatgcacgcatgcatgcatagacgtgagtgatctaggttgactttcagcatttatctttgttgtgttgtcattttgttctttgttcgatggatgtatactcactcaaacagacaactcatccatccatcaaacaaacaagcgattacataaacttgcaaaacaacaccgacccacccaccaaacaactaaccaagcctcgtgtacaaacaagtccacgagctgcggtgttgcgtagacaacttactatagtgatgccagcgaccggttctctttcagcgccgcagccactgccttgccgccctctgagccgatattgttgcttccaagactgtccatttgattgaatgatagcaagtaatacattacacgttacatattacaatagatgcacgcatgcatgcatggatgtgagtgatctaggttggctgtcaggatttatctttgttgtgttgacattttgctgtttgttggatggatgtgtactcactcaaacagacaaatcatccatccatcaaacaaacaagcgattgcataaacttgcaaaacaacaccgacccacccaccaaacaacaaaccaagcatcatgtacaaacaagtccacgagctgcggtgttgcgtagacaacttactcgagtgatgtcagcgaccggttctctttcagcgccgcagccactgccatggcgccctctgagccgatcttgttgtaggaaagactgtcgattcgattgaatatacattacacgttacatattacaatagatgcacgcatgcatgcatggacgtgagtgatctaggttggctttcagcatttatctttgttgtgttgtcattttactctttgttcgatggatgtatactcactcaaacagacaacccatccatccatcaaacaaacaagcgattgcataaacttgcaaaacaacaccgacccacccaccaaacaacaaaccaagcatcatgtacaaacaagtccacgagctgcggtgttgcgtagacaacttactcgagtgatgtcagcgaccggttctctttcagcgccgcagccactgccttggcgccctctgagccgatttggttgccttgaagactgtcgatttgattgaatgatggcaagcaatacattacacgttacatattacaatagatgcacgcatgcatgcatggacgtgagtgatctaggttggctttcagcatttatctttgttgtgttgtcattttgctctttgttcgatggatgtatactcactcaaacagacaactcatccatccatcacaacaaacacagcgattgcataaacttgcaaaacaacaccgacccacccaccaaacaacaaaccaagcatcatgtacaaacaaagtccacgagctgcggtgttgcgtagacaacttaccgaagtgatgtcagcgaccggttctctttcagcgccgcagccactgccttggcgccctctgagccgatatagttgccataaagactgttgatttgattgaatgatggcaagcaatacattacacgttacatattacaatagatgcacgcatgcatgcatagacgtgagtgatctaggttggcattcagcatttatctttgttgtgttgtcattttgctctttgttcgatggatgtatactcactcaaacagacaaatcatccatccatcaaacaaacaagcgattgcataaacttgcaaaacaacaccgacccacccaccaaacaacaaaccaagcatcatgtacaaacaagtccacgagctgcggtgttgcgtagacaacttactcgagtgatgtcagcgaccggttctctttcagcgccgcagccactgccttggcgccctctgagccgatttggttgcttccaagactgtcgatttgattgaatgatggcaagcaatacattacacgttacatattacaatagatgcacgcatgcatgcatggacgtgagtgatctagattggctttcagcatttatctttgttgtgttatcattttgctctttgttcgatgcatgtatactcactcaaacagacaacccatccatccatcaaacaaacaagcgattgcataaacttgcaaaacaacaccgacccacccaccaaacaacaaaccaagcatcatgtacaaacaagtccacgagctgcggtgttgcgtagacaacttactcgagtgatgtcagcgaccggttctctttcagcgccgcagccactgccttggcgccctctgagccgatttggttgccttgaagactgtcgatttgattgaatgatggcaagcaatacattacacgttacatattacaatagatgcacgcatgcatgcatggacgtgagtgatctaggttggctttcagcatttatctttgttgtgttgtcattttgctctttgttcgatggatgtatactcactcaaacagacaactcatccatccatcaaacaacaaacaaacaagcgattgcataaacttgcaaaacaacaccgacccacccaccaaacaacaaaccaagcatcatgtacaaacaagtccacgagctgcggtgttgcgtagacaacttactcgagtgatgtcagcgaccggttctctttcagcgccgcagccactgccttggcgccctctgagccgatttggttgccttgaagactgtcgatttgattgaatgatggcaagcaatacattacacgttacatattacaatagatgcacgcatgcatgcatggacgtgagtgatctaggttggctttcagcatttatctttgttgtgttatcattttgctctttgttcgatgcatgtatactcactcaaacagacaaatcatccatccatcaaacaaacaaacaaacaaacaaacaagcgattgcataaatttgcaaaacaacaccgacccacccaccaaacaacaaaccaagcatcatgtacaaacaagtccacgagctgcggtgttgcgtagacaacttacttgagtgatgtcagcgaccggttctctttcagcgccgcagccactgccttggcgccctctgagccgatattgttgcttccaagactgtcgatttgattgaatggtggcaagcaatacattacacgttacacattacaatagatgcacgcatgcatgcatggacgtgagtgatctaggttggatttcagcatttatctttgttgtgttgacattttgctctttgttcgatggatgtatactcactcaaacagacaacccatccatccatcaaacaaacaagcgattgcataaacttgcaaaacaacaccgacccacccaccaaacaacaaaccaagcatcatgtacaaacaagtccacgagctgcgatgttgcgtagacaacttacgatagtgatgtcagcgaccggttctctttcagcgccgcagccactgccttggcgccctctgagccgatcttgttgtaggaaagactgtcgattcgattgaatgatggcaagcaatacattacacgttacacattacaatagatgcacgcatgcatgcatggacgtgagtgatctaggttggatttcagcatttatctttgttgtgttgacattttgctctttgttcgatggatgtatactcactcaaacagacaacccatccatccatcaaacaaacaagcgattgcataaacttgcaaaccaacaccgacccacccaccaaacaacaaaccaagcatcatgtacaaacaagtccacgagctgcggtgttgcgtacacaacttacttgagtgatgtcagcgaccggttctctttcagcgccgcagccactgccttggcgccctctgagccgatcttgttgtaggaaagactgtcgattcgattgaatatacattacacgttacatattacaatagatgcacgcatgcatgcatggacgtgagtgatctaggttggctttcagcatttatctttgttgtgttgtcattttactctttgttcgatggatgtatactcactcaaacagacaacccatccatccatcaaacaaacaagcgattgcataaacttgcaaaacaacaccgacccacccaccaaacaacaaaccaagcatcatgtacaaacaagtccacgagctgcggtgttgcgtacacaacttacttgagtgatgtcagcgaccggttctctttcagcgccgcagccactgccttggcgccctctgagccgatattgttgcgttcaagactgtcgatttgattgaatgatggcaagcaatacattacacgttacatattacaatagatgcacgcatgcatgcatggatgtgagtgatctaggttggctttcagcatttatctttgttgtgttgtcattttgctctttgttcgatggatgtatactcactcaaacagacaactcatccatccatcaaacaaacaagcgattgcataaacttgcaaaacaacaccgacccacccaccaaacaacaaaccaagcatcatgttcaaacaagtccacgagctgcggtgttgcgtagacaacttactcaagtgatgtcagcgaccggttctctttcagcgccgcacccactgccttggcgccctctgagccgattttgttgcttccaagactgtcgatttgattgaatgatagcaagcaatacattacacgttacatattacaatagatgcacgcatgcatgcatggacgtgagtgatctagattggctttcagcatttatctttgttgtgttgtcattttgctctttgttcgatggatgtatactcactcaaacagacaacccatccatccatcaaacaaacaagcgattgcataaacttgcaaacaacaccgacccacccaccaaacaacaaaccaagcatcatgtacaaacaagtccacgagctgcggtgttgcgtagacaacttactcaagtgatgtcagcgaccggttctctttcagcgccgcagccactgcctcggcgccctctgagccgatattgttgccgtcaagactgtcgattcgattgaatgatggcaagcaatacattacacgttacatattacaatagatgcacgcatgcatgcatggacgtgagtgatctaggttggctttcagcatttatctttgttgtgttgtcattttgctctttgttcgatggatgtatactcactcaaacagacaactcatccatccatcaaacaaacaagcgattgcataaacttgcaaaacaacaccgacccacccaccaaacaacaaaccaagcatcatgtacaaacaagtccatgcgctgcgatgttgcgtagacaacttactcaagtgatgtcagcgaccggttctctttcagcgccgcagccactgccttggcgccctctgagccgacattgttgcttctaagactgtcgatttgattgaatgatggcaagcaatacgttacacgttacatattacaatagatgcacgcatgcattcatggacgtgagtgatctaggttggctttcattatttatctttgttgtgttgtcattttgctctttgttcgatggatatatactcactcaaacatacaactcatccatccatcaaacaaacaagcgattgcataaacttgcaaaacaacaccgacccacccaccaaacaacaaatcaagcatcatgtacaaacaagtccacgagctgcggtgttgcatagacaacttaccgaagtgatatcagcgaccggttctctttcagcgccgcagccactgccttggcgccctctgagccgattttgttgttaccaagactgtcgatttgattgaatgatggcaagcaatacattacacgttacatattacaatagatgcacgcatgcatgcatggacgtgagtgatctaggttggctttcagcatttatctttgttgtgttgtcattttgctctttgttcgatggatgtatactcactcaaacagacaactcatccatccatcaaacaaacaagcgattgcataaacttgcaaaacaacaccgacccacccaccaaacaacaaaccaagcatcatgtacaaacaagtccacgagctgcggtgttgcgtagacaacttactcaagtgatgtcagcgaccggttctctttcagcgccgcagccactgccttggcgccctcgtcgccgatattgttgccgtcaagactgtcgatttgattgaatgatggcaagcaatacattacacgttacatattacaatagatgcacgcatgcattcatggacgtgagtgatctaagttggctttcagcatttatctttgttgtgttgtcatttgctctttgttcgatagatgtatactcactcaaacagacaacccatccatccatcaaacaaacaagcgattgtataaacttgcaaaacaacaccgacccacccactaaacaacaaaccaagcatcatgtacaaacaagtccacgaactgcggtgttgcgtagacaacttacttgagtgatgtcagcgaccggttctctttcagcgccgcagccactgccttgccgccctctgagccgatatagttgtaggaaagactgtcggtttgattgaatgatggcaagcaatacattacacgttacacattacaatagatgcacgcatgcatgcatggacgtgagtgatctaggttggctttcagcatttatctttgttgtgttgtcattttgctctttgttcagagcataatcaagcaagcaagcaagcaagcaagcaagcaagcaagcaagcaagcaagcaagcaagcaagcaagcaagcaagcaagcaagcaagcaagcaagcaagcaagcaagcaagcaagcaagcaagcaagcaagcaagcaagcaagcaagcaagcaagcaagcaagcaagcaagcaagcaagcaagcaagcaagcaagcaagcaagcaagcaagcaagcaagcaagcaagcaagcaagcaagcaagcaagcaagcaagcaagcaagcaagcaagcaagcaagcaagcaagcaagcaagcaagcaagcaagcgagcaagcaagcaagcaagcaagcaagcaagcaagcaagcaagcaagcaagcaagcaagcaagcaagcaagcgagcaagcaagcaagcaagcaagcaagcaagcaagcgagcgagcaagcaagcaagcaagcaagcaagcaagcaagcaagcaagcaagcaagcaagcaagcaagcaagcaagcaagcaagcaagcaagcaagcaagcaagcgagcaagcaagcaagcaagcaagcaagcaagcaaacaagcaagcgaacgagcgaacgagagtaccatgttaacttactccattgttgtagcgcgctgttcaagagcggcaacaattcttgggtagtctgacatcgtgcagtaaggaaagatctagacttcaaccagcgggcgcgtgcgtgtacgttctcagctaagctcgtggcgcaggcccagtcgttgcagaaggtttcgaacctgctagatgtgaagctgcaaggccatgacagggttgcaaggtagcgtgcacacgtgctggcttaatgagttgctatggttttccctaagatacagatgttacttagtgctcttgaaataaaaaggtattttactaacttgatcctaactctacctaacaagccatgctggcgtccttccttgcaagtcctattatcacttgttcgataggctaagcactagaagatcttttccagtaatgtttgctccagaggttccactaccaccatctcataggactacctagtcatagaactaactagtatctgacaatcaaactaatatttataaaggcatcatatatcctttccaaagcactttcgaccataccacgcaggtaacacctcatttgcactgagtgtcaactgaccttcatacccactgctagcccatgcttaggctttattgacgtaatatacacttaacttaagttgacctaaatcttctatccgacactccactggattcaacatgatacattcatcctgcctgtatccgaaagatccgaaatttcaataacataaatatcatcattgttgaactacctctgcgcgctaagctaatctgcaataggcttaattaataattggccaaaaattcacttttgttcggtctgacggtgggtaacctataagtacaagttcaattttgtcaggagaaattactcttcaaaggcctgtcagctgatattagagaacttaaatcacaagaaagacctaattttagtctttcgaggttgctgctctcttagggcctgtcgattgacacgcatgcaaaagtaggattttgagccactctctaagagggtctgtcaaatggcaggccttcagtgataaggcagattatataaaagtacttgaggaaggtttggccctaagataagaaaaacgttgggcagattggccctgagaggtctagaaaggttttgtaaaaaagctcctgaatgaggttaggccctaagagaagaaagaatttatgcaagtcggccttaagagatctagaaaagtcatgcagcttacttctcagcaagctttggcctggggggactcaaaaatgttaaagctaagaaactttcctcggcgaatacaaattttgtgtagtttgtgataaaaggtttttaaacaacctatccccgtatgcaagatctgcaactccgtgtttaaagcaccaccctgtcctaattgtttaaaacgcgcagacgcttgggttgtaaagactgtggaaagcttatgaacgaaatatgcgaagcatgtggtattgactgagaagcttctcctagatgcgtcgaaataactaccgaacttgtccatttaaatgaataacaagtagattttttgtcctgtattgtattatttgttccaactttatcctatgatgagagggttgatttgaaaacaatatcccgctacgtgtagctactttgtatgtgtgattattgctactttaactaatgcgtagttttccttcttcaagtacaccctcactgatcaattttttctgtatagggctcggtgccatgtaaactagctccaatcacagtttttaaagtcacccagcccttagatacgcctcttcttcttcatattattattattattatttctttaaaaatagatataattttaaaaaaacgtataaaattctcctacgcggaatcgaaccacggttgtcagagtcagagtctgacatgctgccattacatcacaggagaattaacttcgatctgggtggattacagagtatatttatttccaaacttagaaacgataccctcaattacatttttttaaaaagaagaaaaagaccacaacatctaggttgagcgagttgaatctttttccgaatcatcttctacaacccaagaatcatttcataacctatcaatacacagatacccacgaaactcatcattatttcgttgattttgtgaagaaaaagtaagcattgaaaatggcttttaagtttaaaaagctactgtgagtgggactcgaacccacgccctttcggaccacggccttaacgtggcaccttaaccgctcggtcatcacagcttgatggatgaggtacgaagtgagtacaatataaaaactgcacataactttaatctgggaacttcagtatgacaaaaaccgttaaaatttcgataacttatatttcgatgtgcttgtttcatattaattatatattatacttagttagatctttaataagaagtggaggttaggtaagaaaatggggaggccaaggaaccgccaagctccaaacactgcaagtggagcaaacctcgaatacaaaccagcaaagttctttcaccggaagtttggggtctcagcaagcgcccttcggggctgggccgatggcggacgcgtgcgctgcgcgcgcttccccggaggcaagcgcatctacgcctgcgacgatgttgagcgcatctttgattgcggttccaccggccgcgagcaacgcagctctggatgtaccgttatctacgccagagtgtcctcggccaagcaaaaggaggacctcgaacgccaggttggcgatctccagcgcgcctacccagatgcttccgccgtctacaaagacatcggtagcggggtcaatttcaaacgccaaggcctgtgctccctactggacgcctgtgaccgcggcggaatcggccaagttgtggtcatgcaccgcgaccgacttgcgcgaatcgcagtcgacctcctggaacaccttttcgaaagaaaaaatgtcaaagtcgtggtacacggccaagatgcacatgccggagacgcagacaccttcaccaaagacctcctcggaatcatcaccgtctttgtggcatcgcatcacggaaaacgagcagcgcaaaatagacggcgacgacgcagcgaggaagaagcgagctcgcacgaaggcgcgcaagaccatcaagaaagaatatgaccttgtccgtgccaaaaaggtcagggtataccctactaaagatcagcgtacacagttgcttaaatggtttggtgtcactagaagagcctacaatactggcgttgcgtttcaccgagacgtggcgaagggcgagaaagaagccatcaaattgcatcaagaagcgtgcatcaaaaaggattccaagacgaagcaggttttagtagatgaagatgggaatccccaaacgtatggtgccctctatggagaaaagaaagccgttcgatctaaagaaaggcatgatgctcctgaatgggttctcgaggtcccacaggttatccgtgattccgggattctggatttcttcaaggctcttaactctggacgagccaaaaacgaagaactcgctgtacaaaagaaagttcatgagcaatctttttataagtttcggaccaagcgtgatgaatcacagattttcgaagtgaacgcacgtatctggaatacggagaaatcaaagaccaccagctttctaaaagagtttcgtacgcacaaagaaaagttccccagtcagattaagaacgccatgcgtgtgcaaatgaatcgccttgggcatgtgtacttctgcttcttacgagaagaagaaaagcgtccaatggaccaggcacccaaggcgcaccacagtgtcattgctctagatccaggtgttcgctcgtttcagacgatgtatgatgctgatggccgcgccattgaatggggcacagggaaagattttagaaccatattctatctctgtcgccgcgttgataagatccaaagcaggattgataaagctcaagaaaataaaaagaaaactgcatacgatttcaacacccccttgaagcgcgccttctatcgcgcccaactcaagatcaagaacaagatcactgagattcaccgcaagctcgcgctttggctttgtgaaaactatcgtgttattctcttgcctaaattcgaaacctctaagatgagcaggaggatggagcgacggatatccaagaagtctgttcgaatgatgtgtcgttggtcccattttgggttccgccaggctctcattcataaggctgagatgttcccgtggtgcaagcttgttctttgccaagagagctacacttcaaaaacatgcaatgagtgcggtaccctccaccataaactcggggcatccaaggttttccaatgccctaatctcaagtgcaaccatgtagcagaccgtgatgtccatgccgcaagaggcatccttttacgctacctatccaaggacatgatttaaaaaaaatcatttcattgagtcgcgggttagtctaactagtccgtgatggagtcttagctccttctatgaaatgcaagttttgcaaattttgtagtttaacatctaagagtcacaaaagcctgctgcaataattttcagtaggcacaatcgctaacgattttcgatattattttcttcctttttatttcactgctgtttttttaattttaagtttttaatgaaggttcttgaaaaagtaagacagcaaggccagtaatctatcatccaaaacctcaaaggaatatctcggattctaaaacaagacttgccgcttagttcgccttccccaaagttccaaaccctgcgcaacctcctacactcctccaacatgaacctgcgtcagaggtagtgttttcgagttgaaattgttcaaattagggtaaggtttgtatttaaaaaaagaaaaattctaaatgaaaaaattagttcccaatgaggggatcgaaccctcgaccatttgattaagagtcaaacgctctaccgctgagctaaccgggattcctaagagaggacactggagatttgatgctcctatttcccaatacaatctctgatgggttgtttgcatatataaacacttatacaagtaactattttctcaaataaaaaacttttaagagaacataacttttatgagccacacagaaaaccaaggagtttaagtgtgaaggaactcccggtcttgcatggacagggttaattaatcgaccaagttcgccttgagagaagtcgtttgccggtgtcttggtggctgaaaagtacgcacaagttgatttggtagctggcacatagaatatattttgaagctgtaaaggagtgaagggtcaactaattgatactcctgttaaatgggattatgcgtgcattaatgataatcatagagaaagagagaaagaagcttcattctcgatgtgatagaagtagaaggttaatgtatataggttgactatgtctgtcaaaatattgtatgattgaaaaataatcataacgtcattatataccacgttcgttgcaaacaaaattaaggttaagcttataagcgcaccatcagctgcttaaatgcacctttaattcttacaaagatcttgtctatcaacttctgaagatttaagcaaactcttctgggggtataatccacaaccttaggtattctccgtttgattcatctagaaatgtgaaattttagctatagatagctgctgatcccaacactcataatggttttcgaattttcatgatagagtgcgttttgaacgacaaatcataagttaacagtggatgagactataatattcgcagtttatatgagctgaaatgccctgttgctgggaaaagggctagtatgcaactgttatctctcttatgaatcctagtggtcatttcttagaaagtcttcttattggtggttctttagttcaatacataatttgcaccttgcaaaataagatttcgaaaataacatacagggttattactccgttaagtttatctctaaagtaacatcagacggcatcaatggtctgaaaagcaaacaaatacagattccaaggtcttggcttacgttataagaaagtgctggccgttaaagtagattttgcaagtagtggagcgggcaagacatacatgataattggctacttcccatgaatacaagtagataaatatgaaccaaaaattcaaactgtatcagctgtacaatccatccatttttagaatgttctgctagtctcacactcgttgaattcacatatatacttcaaaatccgatcaataatttgctctgccatactgaaaatagccatcatactaagcaagctcaatgatacgctattttacatgccaaataaatcattatgacaacttatgaactcaattaacatttagatgttttacagaggggtttctcatagacaactatctgcttggtttattgaaggataaatctaacctaatacaacgtattgacttcattttacagctgcgaggtcctttactattattattttttatatatctaagaacgatctcagaaagggctcgcttaactcgacgaggacacatggtgcgagtgcggttcaaagttattcagggttttgcgctcgatataactgttgagtacgggaacagacttgacggaataatccctagataatcgactcagcttaaagctcaactccctttgtgagattctatcatttgttacctcaagagagcatcattttaataaaacaatcccctaatacttcaattttggaaatcaagttgaaaggaaagtatcttcactgtccttactgtttcctccactctaagctctcattaattatgacttgttaatatcaacaagatcacttgcaagtttgggatttcctctaattgtcgtcaggagttactgagtccaaggtttatgctaaaattacaaaagtagtacctctaacaaataaaaacgggagtcccggaatttgttcaataaataagctggactgcatgctgacttgcgaagtcttacttcactcgtgcttagaatgactttgagttaatagatgaaatgttctagaaaagtgttctcttccaaatctaaatcaagcaagagtcaaacatgtaatttctgcaaagcaattgaacttggtattttggcctctttatcctggctagtttactcaaatatgaatatgctaataaacgattgagctctatctcactttacttcacggaactggagatttgtatttaaaattaacaagccaaattctagcacgtctcaaattgtaatttctctagactctgaattatttagaagagtgatgcatacgagccttagttcatgtcatcttagtggttgctaaagatggattttcgtcttttgaactcttcaggcgaggatctgtactattgatgccccagctactcagattgcagataagctcaaaggggggctaggacttcattatattcgtatcagctaaaattcagaagctgctgtgagaggttgctcaaattggttgctttccttgaataattattcatttatgaagcatctaagtctctaggccaatagctgaaaaccaggaaatacttctatatccaaaatccctctgatttacttgtctaatatggcgttatttcgattgtccaagcgcagaaacctaattgctaaggttcgcaaaaattgttgagaacagtctggtattactttcaatgttattgtaaatttaaaattggaatcatactaatgtgcaactattaaacattattgtatataccttgtgaggaggcccagtggtagtagacttaattattttcagtggaagtagaggaaagtcatcactgtgtgttcttgctaaaaccagtaacagatttcataaagcgttttagctttaaagctaaatgtcatttcacgcccccacagttcaatccaaaatacatatcagaaaattcgccaacacaataattttgtgaggagaagtagaattttaccccaaatctctctgcctgtttccctctcccttctgcaagagcatggaagatttgccgctactacaactagtaatatgataagtaggaatcactcagtgtgggaacgtggcgcttttaaagcatggtttcgtcactttgcacttctttctgacgtgatgagcagcttgttttctcgagattgggacgtccaagagcgacgaggaacaagagcacgcctgtttgggagtcatggaataacgatgcgaggaggtcgtatgtacagagaaacgcggtggagagcgacagagcgggttggggcagcaaaactcaatcaacaacgagcaagtgaggtaggtgaaagagggaggaaagagggacaaggagaagtaaaacgatgatgcgaggactcggaatacaggccgggccagtctgcgtgggcgagctgacctcgaaactgtctctgctgacaaacctgccaaaaccacgcatggcaaggaacgaggtgcttattaaggtgcagtgtgttgggattggcattgacgaaattcatgctgcggaaggctcgttccttggaattatcagcagccagccccgacgaatctctgtagaaagccctctaattcctggtcttgagtgttgcggcatcattgaggatcgcggatccgacgtcccggcacaatttaaggttggagatgctgtcttggggtttcaaaaaccaatggatcgtctccaaggaacgtgggccgaatatgctataatcccggcggatttttgtttgatgcataagccagaagagcaaacagcgcaagaagccttggcaagtttcttctctggtcttgttgcatgcgcagcgttagacgtatcccggcctgtaatggagcgtgctgagcgtccacgcatccttgtttgtggggcatcgggtagtatcggaacgcttgccttgcagggtgttcggcacctttggccaaactgcgcagacgtctttggggtttgtagctctcgtagcgcatcgcttgccactactgctggtgcctctgaggtcgttgcatatgaccaggtgcctgaatggggcatggatccccgcgtgcgtggaaaagttgatgttgtgattgatctcgttggtggcgatcagtccgagactcaggcgggccacgcattacgtcgcggcggcaagtttgtcacaatggttggacccgttcaattcctaggagacaagaaatcttccatgtgggagtttttcatgtgggcttgtaaagtaggtctcaaatttgtaccacgtttatctcgccattacgaatacaatctgagtgatgtaggtagtcatatgcctggagctttgacgacatggcgagcacttgcgcatgaaaatgtatttcatccgcgtattcaagaagcaatctccatgaatgacgttgatgccgtctgtgcagcgattcagcgtgtacgtaaacacggaaaccagggaaaagtcatcatcaacgtagtggaataaagcatactactgtttgaggaccaatatatatctggctcggttgataaaataccacatggatataatctcaataccacaaaaagtctgttccatgagcttgcgcatataagcgctagataatccctttccctttaaaattatgtttttacttgctgctttctctcatatttccggggattcggtgaatatcaggatttttacacatgcatattgctggaagtctccttcaatcaagttggtttcattatttggacgcctccacacgttctggtaagtcagtgagttgactgtttagatgaagtattttttaagatgaacatttggattccctgggaaagaaattataggttggactgcttcatggtataattagataattaaggcagacttgatcagagtaacacacaattgaggagattaagttaactcagttcctcaaccactaattcatgtcatccatattcattcttttatacatatataaataaatcgtttatagttttttatcttaattattaaggatctgcaataatgcgccagagactctgacatgtttagcccacatagtcctttaatcggggatctctgcatctatgttgctaaaacaaaacgaaacccaaggctatagataatgaccaggcaaaacaggtggaggtgaaaacctaaaaatggaaactgacttatcgcttttaaaatccctagatttacaatttcgacaatcaagtgatggtgttagtactttatatcatggtcaatatacgattaaagtcgtttagtagatcggtggctatgctatggtgcttgttgcgactgttgagtgatgcttcagatggagacacgaatgtattggcttgtttttagcgcttgcttcaaacaatttaaagtcttacttatgttgtagtaacaaatagaactgactggagaagatgcactgtatgaatcgtcttctctcccgtgattcgacaaattcattgtgcgtgcaaatagttcatttgattctttttttaaaatctcccatgataagaataagaatacaaaaacaaataaagagagagacaaagaaaaagggagagaacaacctaaaacaaaatctagcagtgactatgcctcggagaagaagagatctccagatcggggcatttctttgattcacaagcaatccttgaacagcaggtattttggagaaataaatgcatgataactaacgaaagcataagctagccgtcaagcttaactatgagactggtgctcccttgcacgcatgcttctcaaggctatgcccttcgttattttggcactcttcgtgtggatactcattgtgccgatgctgcgcaaagagcatgtaaatggaggaagaaaggccaaatttggtctcgctaatttctctggattccgagccttaatagacactgtgaatagttacaagccattgcaatgcccggtcacctttaaatcgatcctgagatttcagccatacagtaaactagaatgttgtcacagacatattcacattctcaaagacctcctctatttacactacctactgtgttggtgtaagagagggttactgtaagagccgagtacgaagatacaaaaaaagagacattaccgcaaacatagaataggaaagtccgtgaatccaacattcttggttaggtacactcctaaatttgtgtttgtgtacatgtcgcgctcctacgaactctcgcgtgtaggattgcacttcattcgccttagaaactcccgcgttctgtaggcacgatgctgctgtaattcctcctttgtatttattcttcttgcgcccatagtaaggtcaatgaagggcgtttttgattgataagagtgcacgataatgaaaaggcattttgttcaagacaatgaagctttagtgtctcacgtatggtcttttggtttccactgtccggttcccttttccctgcctgctattctcccccccccgccactcaacttccaaagctacctatcaaagtgaatcagcagacagaagaccctaatgtggccaattgagtttcaaaagaagtggatcctcttgataaagaaaccaccgatcgaaagattatcccttcaacgagaaggacttccatgttgcccacaaatttgccagagaactccgcatctaataagtccattcctcatcagaaagatacgtcttcaaggaacgctaagctcgcggaaaggaggagaacatacgtaagcagctgttgtttcaggcttggatgatctgagacaacaccgcagagcagagaacagctcagctcacagccgtgagattagtgctggtgacaaatatattccagagggtgttgaccaccccacacagagaacgacaacaataatcattatagccacagaaagacaaacttgaggagatcgaaccatgcgaagacgttcttctttttctccttttgtatcggtcgccattgtgctccagtggcggagttccttaaggagccatctctcgttaattatagtaaatgttgttgttgccatcaacagcagcaggcttccaaagagcaccaacagaaagatgaatcgcaaagaggatgcatctctcactagcagcatcaaaaattacgttgcaactaatgaaaacacacgtcgaatttctacagagaaagtcaaatgttaatgttgattggctgctcctccacgtaggcagtctaccaaggttgggtttgggcattgcgcactcaaccaatcgattatagaactagtgtagaacatagctctacagaatgaattcgatgctcaggtatgtttgttgttaattgtcaatttcaagagggacaaattaaacaaagaagggcaatgtcaaatgttcacatacatatacatacatccaaaggacagcatgatttattaagcaactgatcgactcccttgtctgattcagtcttttgtgcttttcagtatctgcaaagtatcttgctcacacaacttatcctgttgtttatgtatgtggtacttgcttgcttctggtttatcccttttcatttcataccaatatagctctactagtccggaattccgactctgcctatctatctctctatcgatcaacttgactatcgagctacttttagtaccaccctatatattttgatgagcagcagataactagtacctaggcatttaactagaagatctggtaggacagcgacgaattgttacggagattcgggagaggtttgttctgttctgttctgtcgcggacctcccttggcccacggcaggcagtctgccgccttggttcgccctgtaagcgactctaacatgggtacactttcaaggccttattggcttcgatttttttgtagtatctgttctatagctaatgaaatagctatttccctccaaaaggagggaaagtatttcatagtacttttcacccttgctgcgagggcgccagcttgctggtccccgcagcctggatggccgtggcctcacacaactagccgcgagacgtccttccgccacttccacaagggtagggttagggttccatggaatccggcgcgtctggggcgccggcatggcgcttgagcagcttggtcaagttagacctagagatatggtagtccccgacgaagagagtggcctcgttgttggcatgatggttgttagcaatgtggacttgggtaaatccggatctttcgaggtgaaagagtgcgcgggccatcagcgcggaccagatacaggagcggtctgccttggcgcgtatagatccttggtaattttccacaagtatcttggacaactcgtgaatgatccagcgctgcgggtctctgtcgcagaaagggtcattctggtccagctggaaccgtttgtggtagtgcacgatgaagtccagatcctcgtggaagaggatggcagcgcgatgtttgacgcgggagcgcagcgtcgactcattgatggcgttgcgatctgagttggataccttggccatttggtagttctcgagactctccaagaaccatgccgcatccttaagcggcaaaattccgttgatgtcatcttgtcccagcgagtctgccatgtcgctgatttctggttcggcattcatgaaccaggcacgatcaacctttgacaacaggtcgtctggatcttgttcgtcctcctcgcgtcgtgacgtcggcgatccatgtgtggcaggacccattgagtcggtgggactgagttggttttgttgctggatttgctgctgctggtgcatttgctggatttgctggagatgctgctgctggatttgctgaagctggtgttgttggtgcatttgttgcaaaagaagctgttgctggtgcgcggccatcacagcattcatgtccaggtacggtggagtcgcgcctgttcgtacgctcgaaaatcccgctggtcccgactggctgcctctgttggtattcttgtcattgttcttgacacttccagcatccttgtccttgttcttgcttctttcatcctcaacgcgttcatcttgttcttcctcctcgctcttgttcttgcccttttggcctgcactaccgtcgctgtttccacgaaagaggccgctgtgcgttgtgacctcccgaaagagcgctgtctcctctcgctgcggttgatgatgcggcatgtgctggggcatcagagcgtgcatggcggccgccatttgcgcgctgtttacaagctccggtgacgctcgatgcggatgctgctgccgctgcagagacgaggtcgatgaagatcggcgtcctggttgaaaaagcattgcaggaaatgtaggggtggcatttgcaccaggacccaccggcggcatggtgaaaccttgcgtagaggcttgaatagatctcaacgtaggagtggaggaggacgtcgacgacgaagaagacgaacttgacagagatgttgaggatgccgatgccggtgcaaggccagttgctgacgacgaaggcgacgaggactttgacttcgctgcagctgccacggcagccgcaagccagccctcgtgtgctgcgacac

SEQ ID NO: 117 - DNA, 21845 bp, unidentified
  misc_feature 1..21845: note = Fanzor polypeptide
  source 1..21845: mol_type = other DNA
tgccacccccaccatacccttcaactcgagcagcctgtgagctgtgtcgataagtcagccagtcagcaatctaagaacgacacggcgaacactgcctcgagcacgacttggcctttctttatacaggcgacacagaattgcagtcagagtcactcccagcgccattccatctcacgttgcatcacctgcacccacgacagtctagtgaagaagcggcgagctggcagtaggcttaggcaacaagtcgagcaggcgagtggcggcctagctcgcggtggccaagaagaattcgtacaccttcctgccgcgacgctcttggtgcctgagatcgctgcgttgcgcgttcattaacttgaaaagaagagcgaaagagcaaaagaaagctctatcaaaaagaacaaacaccaaaaaacaatcaaatccaatcccaatcccaattccagctctgggaggatacgaagttggtccttaaaaggcacagaactggcgaaacggtgcggagcgaggtctgtctgcggcaggcagcctgtgggactttgtgggctgtgagttgtattctgcaaagaaggacagatacaacaagcgagggagggagctcatcctttgtacgacgtggacaaaatagcttgaggaccacgaaggtggataccttgtttggagacaagtttgcgcacaggaactgcctgctggaggtgactaagaagagcaaacctctgcattgacttgggcaagactgtgctgcgtgagcgacctgtgcagcgaaaagcaatagcttcaagattaagtggagctgggcctgaactggcctcgatcgatcgatcgatcgtgctcagaaaatagaaccgccagtctctctgcctgctcttgtggcatcaccggcgccctgagttgctgccggtcttcttcagtcctgatttatctccgtctttgttggacttcgctgtcgtcgctcctcgttatctttgtgacgagcttgggaccgaacacctggaggggctgactgtaaaatcaggtccgaagctgtcagaatccgcagttcttttgcaagtacgtaaggccactcttctccgttaagaaaagaggacagcagtcatagggagcgagtctttggcagtctgtacctgtgcccattcaccacacccgatctttagatctcctcctgagttgattcattccttgatttcgttgaattacattcgctccacttcatttagccattctaccaaattgattgtcagtattacctgagcgatagctaggtaccttggtagtcgaatcaataggagtccggtaattggagcaagccacggaggtgtcgaggtaggagtactactacgtctacatagaggtaaacagatataggagccaacaccatctaagtaaaataggctagttcggatcgatctggttacagggaagacgtcaagagcactggcgaaggtcgcggagcggacctggacatcaagattcgaaagcatatctagggaaacctcttttcagtcgattagtgttgatcttctggctgagcagaactggtttgtgtgcagaaaatcgttcaagtggaagacattggggacttgtgtgggagaaggactggcgtgaacggttactctgaagtggtaccgattgaagtatcgccgcctcaagtgtgtgctgctgtttataaaaaagggagaatcgctggacctggtggaggttttgacttcttactgcgtgcggaaaagagtcgcggtgaaagcaaacgcgtggcgttgtgatttgcacgtggacaggcgcgagtgagcgtgcctctaaagcgtgacgctttaccgggagcttatcaagttcgccccaatccatgtgccaccgcacgtgtaatatcgaggaaagagcattgatatggcgcaacagataatgcgagaaacacaatcttgcggtgtgaacctgcaagataaagtcgaccaagagcaagataatcctaactgcaaagaaagggacaagggaacttgcaagtatcatagccaccgggacaaggtaaaaggaatttcagaccaaaccgttcaagacggccaagcttttgaacaaaaccgagcggtgcgcaagcagccagtgctgcagcgccgtcttggatcagaaaaccaagagccaaagaagaaaatgggtaggaaaaggttctctacaccacgttggcgtcgtgctgtgccacggcatttgcagagcgtcacgagccaagactcagaagacggcagcgatgttcttttgcctgggccctcgcgactcgaggaaattatgcgtgcatcaacgtccatgagagatttactcttatgtgcactcgctccagagaatggactcacggaaaatgaaagtcaagaagtcatcaacaccctgctcttcaccacgcgacctattacgatggttgcctggctcattgaactagcgcactcacatccgtgggaggataatgctacaattttcgtccatggaactcgcgaactagagtcccctcaacaggttgctctcttcattctcattgaatggcttgatcattgggatgctgctaccgagttggaaatattccctgcattatatgcacaagccatcgaggttattgattcttgtgaccacgatcgtaccacagtgcttgggcagtctgttgcaacaaagctcgatgaggctgccagaagggttgttacatccttaccttctcaagaagaaggcgctgaaggtactctcggacaaccacaagatgaccccttttttgcagacgaagaagatccaggcccatatctcatgcctgcaggatcctcagagaattgcgaggctgagctgatgggatttttggatgaagaagtcgcacgccgaaatagtgcttgctggtttggtttatcaagcgcggaatttgcagcacagcgcctcactgcagagcgtagagggtcggttgcttcatgggcgtcggcacaatccttggaatcagcacattctaacacatcgtcagtctcccaccgacgtcttaaatcttttcgctcattgctgtcaatttttcgctctcgtgccgatagcaacaatagcctgcaagttgaacttatggcacatgattttcgacaaggtcttgtatctcgactcttcaaattatcgcccaatgaggtggcgatccaactaacattgctggtgcatgactgcatattcacggaagtaaaactctacgagcttggcagagccgtacgagccggtcgcatacgcgctaccatgtgcccaaatttacaacgcatggtcagtgtttttgaggtgattgcttcctgggttgaactcgaagttttagcacatgcaaaccggagttcgtcgagtcggatccgggccatatcattctttctccgcattgctgctgcctgccgtgaacaacggagttttcatctactttttgcaatcgtggcgggacttgggcagacaacgttgtcgtgggtttggcagcatacgcctgctcgagagcgtgctgctttcgaaaagttgcaacgcgccgtttcccctcggcagaattacctcgtttatcgtgccgatttgtccaaaagccctgtgccgcgtgtacaaccgtgtggcacaggctgcatgccatttcttggcatttggctcaaagatgccagtgtcatgctagaaattcgaggtggagatggcagtcgagacgcattgtccctgtattctgcttattccctggccaaggagctcttagcatgtcagcactccttcacaagttgtcaccgtgatgactcgattcgagaacttttaagttctctccttcaatcgaccaccattaataacgaattccgtaaccaactatcattcactgagcatcgtcgatctagtcctcgtctcacaacgatgctttctcgccgtggattttccactcctgaggcagccttgccctagtagaaaatcggaggaagccacaatctacttggctctgtgttgtgagtgagtgcacaccttttcctcaggtgcgttttggaggaactaaagtgaataggatcgttgaatcccaaatttgtatttcaacaatgtgtttataacaagcatttaagcatggtttctgatcaggcatgctagaagccaccagcaaagggaactaagtatctacgtacttccatcaaatacgtgctgacgccaaaatattttggcttgttggtactcacctacctaggtaattgcattatttgtactagtagatacagtaggatacagacgctaggcaagtatcagtttggctcttttgaacgtcctttgccttgccttctgcggtggaagtttgagagaaaaggtggtgcaataacaacacgaaaaatcgaggatatgagcctggaaaacactctttggagggccaagagtggtaactttttagccgattctgtattatattttttttactcctctgatacacccagagcttgttgcattacctttttttaatcatgcacgacaatgattaaaacagaaaagaagcaacagccttgtcttttattttgtttcttcaaaaataaactaaaatccacagtccattttctatttctatatttttgagataaggtcgcatcgaacttcatgattctcggtcttacaactgaataaatatcattttttaactattcaatcgaataggaagatttaaaacaattgaatcgatagatttttaatttctccggactgaccagcctcgtttgcacaacatagtaggtgtggtcgtgcgactttataagtaagtagtagaggtctttgttgggttctacatgtatcatcttacaagatgagacgccgtggccgccatcagcaaagctgaagaggcgggcaggcacaggcaagcaagcgaacatgtaagccttacctcgtagtccgacaaaataggcactccactccgcgcgcacacctgatcaacgcatcatttcagctaccattgaaaacttttggtcgacgaaaaccaaaacacttgttccacctcaccacacaatattcaatagacgcgttatcgaaatcatagttcgctcttcctattcgagagttagtacgtgcctcattatggaactcaaaagctacataatttagtttgactgttgcatacgtgcctcacgctcgcacgctggccctcttctgctggtgaagttcttgttcattgatatgtatgatcatggcaaggatgcatcaatccacagaatgagcacttacatctttcaaaaacacgtccagctgtctcaaatggtggagaaacactaatatatttgtagccaaggaaacgtaaccgctcaagaatcgacgagtttgggtgtacttgccggagtaaatcctgtgatttgacgcccgggggggggggggggggggggctcaagcgtttcaaagcaaaataaatgcttttcttgtcagaccaatctcgaatatgaatcgagacggtcacattcttgactatctaaaaaaaaactcttccagccactcgggcttcacgcaatcgaaagattacatatatatcgtacttatcaggaaaatgaaactgcaccttccttgtagcagtaacgcgtggtggagactcttgcaggctctgcgtaagtgcatttgtcacattcagaccgtcttaattctttctcatttcaacgtcctctcccatctctacaaacttacaaattctattgatgtagataattgtccgttgagataggcgagaaaggtgtagaaaagggaggtaaattcgtgatgttggcaagcaggaatgaacaattattaggctttacaattacttgtcgaaatttacgctcagctctaattaggagctttgatcatgccgcttcagccaggaaagagaacacaaaggcagggaatagtgcgctttatggaatgagcaagctataggtagatcggatctgcagaatcatggtgttccataccataaagcacgcttgagtgcgcaccccacttagcagacgcactctacctatgagcctagtcttttgcgcggactctataggacaatgttagcacgaaagcgaagacactgagagaaagaatgcatctgtgttattaccacggggctaccagtacttcctcataacgggaacccgtattttcaacggataaaagttcgtttgttgacccactagccactccctagaacctgctacaggaaatgtaagttcgtaaatcattgcgaaggacctttacatgcggagacgccactgatgaggacggaaaggtgcgagattttgcagaccatcaagtcacgggtcggtactgctacctcttcatgcgcactccatagctggtttcttattgatgtttgctggaggcacccgatataatagttattactatgtaagttctttcgacttacataaaacgcggaattactttgcaataatttttacgagatgacatttaccaagtaataacatctgagcactcacattttaacatttagcgcagtgatccttcaagacacgtttgatcatcggcagctgcatcgtaaagtacagtgctagcggtcgcgcagtggtgaccgccgcgtcaaaagcagcaaaacatcgcgtgcgctagagcttctgaaactctaagaggccggcgcctcaacacgtgcagcgactataaagcatatctggctagcaagcactccactctgtatcaataatttagggcatagaacaacgaaagcgccgacaaaaccaccaacgaagcgtaaatttacaattctgatcacgccaggagctgtcaaaaactagtcactatctcttcggtgatcatccgggctctacgtgagctatcgctacagccaactccttgctaaattcaactgtttatcggaggcagactgcgatcgtcaagagctctggcactgatcacatcctctgtgtatagttttgaagaagtagaccttggtacacgtgtgcgacaactcgcacacgtggttcacaatgaatattctcaaccaagttgtggaggatcaacgctttcttgatgcacaatgtgcaatatccaagtttgctgtgcacaaaaccaagcggcagctgacctattcaaatcttcagaacctgctcgcacgattccgcaccaacctcaaagctgacgctattctttccagtggggtcaaacgatctctgttctggaggtaccttcgtgatgaaaatcttttgcagctacttctctgttacgaagattgcgatcaagcgcaggcaattccacctggcattaagttgttatcttatttgcgacatattggactcacttatttaacaccaggcaaaccatacttcgttggcgatgaaggggccgagtcagttactcagcttgaccaggatattgctggcttcattaacgccggtatagtatctaaaatcccgaactctttgaaaatggttatggcatatcttctcgatcgtctgaacgatcacgttggaagttttattgatgggccgtatggctatgcactggcgagtttcgagaattacgccttgaaaccccgtgtaatgcgtgattttgaacgtcttcgtttgcttggcgagggaggtttcggcaaagttcatgccgttcgagtagtgtaagttgatgataaggtggcagaaaaccgaagcatttcgtatatttcgaggggagtttaaccacgcctctgtaagatatggtaaggttagattttggataggagggaagcaaaagctaacgtgaaatgtatttgtgggataaatttgacctaatgaacatacgtctgcatacatgctcatctgcaaaatgggcgaatactgaatttcattgcgatgcacagtgatacaaacgctgtatgggccttgaaagaaatgaataaagttcgcattattacgaagaaacgacttaatacagttgtggctgaagctaccattctacgaaaagttgattacccattcgtagcaagggttcatcaagtttttcaagatgatgtaaatatctactttttgcttgatattcttccaggtggagaactcaaattccatttacgacgtatgccagtagtccctcacgaggtagcacaattttggatggcgtgccttgtgttgggtatcggatatctacattccaaacatatcattcatcgagatctcaaaccaagtaattgtcttttagacactagtggctatgttgttatcagtgactttggtcttagtgtcactgctgaatcagcacaagatcttcgtcatgaccagtgttgtggtactccaggttacattgcgccagagatgtatctcggtccctgttgggaccgaaggagaccgacggaggttaaaaaacgcagcagcacaacgcgaagaacaacttggctttcaacgttccaatcatctctccgagcactcacctctaagtccgcacgagttgatgcttttgaccctagtaacgcgcaacttgcacgaggtgcagcaaattcttcaaaagttgaaactacgaatacaactcgaaggaaagctggaggaacagcctcattaggagatacaaataacaacatgcgggcaaccgcaaatatgcttgacgttcagagtgacaagacaactcgacaatttctgcgtgtggacactaataaggtgttcccacctccagagaatcaacctgttgagacattctccccagttaacccattactgagcccaggttcaccgggctcaccttcgccaacctctccaggttatattgcctcaccattatcaccaaatgtagcaattggtggaaatgctaaccagctccaagctagctttaagtcgccaaatattcctgtagttccattgctcaatggtgataatgaaaacgatgatggtggggagaatgtcgatggactcggacgcttggaagacactgaaaactctgttcgaaggctctccgcagacccagatcgcttgccccgttatcctaactatggtgtttctgtagattggtttgcactcggggtgattttgcaccaattttattgcttaggaaggatgcctttcactcgtggcccaaagcggtctcatcgcacgttgttaagaaatatggttcttggtaaagtacggtggtctgagtcagcattacaatgcgcggagagaaatcgtaacgaattacatcgtcgtttaaaggagccgggtagagctgaaaagcccatcgtcggtctcacctacgaagcacaagatcttgtgcacaaattattacaccatgatccggaagcccgacttgggtgcggtacacgtggtgtcagggagattatggagcatcccttctttgatggcatcgattgggataaactagagaaacgtcatattgttccaccatttattcccagttcgactacggtcaatgcagagttccagccaaatgattatgatggtggtgaaccgacaaagaaagaaaaacgtaaatcagcaatgcttactgatgagcatcaccgtgcctctttcaaagctttagagtacgtgcgctccgagactttgtttgaggagctcgttggatgccaagttgactttgaggccaatcatgctgacaatggtcgtcagtcacaggtggcttgctgcattatgtgaattatgaacatataaatctaattggctttgtagttactactccaaagtctttttgatttttttcatgtactccgtcaccgtgatatcagaacaacttgattgtcacaactgttttgaggttgttactgtgtgagatagtttctgctgttttatttacatttgaagaagggtactttcttctttttgagaaacagcaaatttgggatatatgtgcactatttaacgccaaaggatatacacagcgcgcatttgacctttttctgattttcataactagatgaacaacaaattcctctttgatttacacgcattcgtaagcaccaaatttaacttgcaaaatcctcaacaacgctttccaaattagcagagcattctccgctactcaacacggctatctatttccgcctagatattttcgtgccctgcattatagtcttgtgcatctcaacctaacatcaaacgaacgttgatctcacctgtaaaaaaacctgcaaatcacaagtctcattgttcaatctgtgcagcctgcgacgatgttgagcgcatctttgattgcggttccaccggccgcgagcaacgcagctctggatgtaccgttatctacgccagagtgtcctcggccaagcaaaaggaggacctcgaacgccaggttggcgatctccagcgcgcctacccagatgcttccgccgtctacaaagacatcggtagcggggtcaatttcaaacgccaaggcctgtgctccctactggacgcctgtgaccgcggcggaatcggccaagttgtggtcatgcaccgcgaccgacttgcgcgaatcgcagtcgacctcctggaacaccttttcgaaagaaaaaatgtcaaaatcgtggtacacggccaagatgcacatgccggagacgcagacaccttcaccaaagacctcctcggaatcatcaccgtctttgtggcatcgcatcacggaaaacgagcagcgcaaaatagacggcgacgacgcagcgaggaagaagcgagctcgcacgaaggcgcgcaagaccatcaagaaagaatatgaccttgtccgtgccaaaaaggtcagggtataccctactaaagatcagcgtacacagttgcttaaatggtttggtgtcactagaagagcctacaatactggcgttgcgtttcaccgagacgtggcgaagggcgaggaagaagccatcaaattgcatcaagaagcgtgcatcaaaaaggattccaagacgaagcaggttttagtagatgaagatgggaatccccaaacgtatggtgccctctatggagaaaagaaagccgttcgatctaaagaaaggcatgatgctcctgaatgggttctcgaggtcccacaggctatccgtgattccgggattctggatttcttcaaggctcttaactctggacgagccaaaaacgaagaactcgctgtacaaaagaaagtccatgagcaatctttttataagtttcggaccaagcgtgatgaatcacagattttcgaagtgaatgcacgtacctggaatgcgaagaaatcaaagacctccaactttctaaaagaattccgaacacgtaaagaaaagttccccagtcagattaagaacgccatgcgtgtgcaaatgaatcgccttgggcatgtgtacttctgcttcttacgagaagaagaaaagcgtccaatggaccaggcacccaaggcgcaccacagtgtcattgctctagatccaggtgttcgctcgtttcagacgatgtatgatgctgatggccgcgccattgaatggggcacagggaaagattttagaaccatattctatctctgtcgccgcgttgataagatccaaagcaggattgataaagctcaagaaaataaaaagaaaactgcatacgatttcaacacccccttgaagcgcgccttctatcgcgcccaactcaagatcaagaacaagatcactgagattcaccgcaagctcgcgctttggctttgtgaaaactatcgtgttattctcttgcctaaattcgaaacctctaagatgagcaggaggatggagcgacggatatccaagaagtctgttcgaatgatgtgtcgttggtcccattttgggttccgccaggctctcattcataaggctgagatgttcccgtggtgcaagcttgttctttgccaagagagctacacttcaaaaacatgcaatgagtgcggtaccctccaccataaactcggggcatccaaggttttccaatgccctaatcccaagtgcaaccatgtagcagaccgtgatgtccatgccgcaagaggcatccttttacgctacctatccaaggacatgatttaaaaaaaatcatttcattgagtcgcgggttagtctaactagtccgtgatggagtcttagctccttctatgaaatgcaagttttgcaaattttgtagtttaaaatctaagagatcgaccttcaactatacaacctaaaagagcactacttcacttcattacctagcacattatctattactatctgctaacatcacctttcacttcttcgcgaacattgctgttttttccctcccccccaaaccactttcggcgcttgtttgcgccctttttctatgtccctaacctcgttaggtatcgccgctccagcttagtaatttatagcaccttaaacacactggtatcatatgcactgcagctatactatttaaggcggatgggacatttcggcctccgagagaaaaggaaaaaagaaaatgcggaagtaactttaaaaaaaacgaaataaaaaccacaaaagaaaaccatcataaaaaaaaaatagttgaaaagcaggattcgcagatatggatatcgatcgagttggtacgcctatgcctttatcgcagccacatcctggtcaaaatagctgcactccgcccttgatttccaacgcacagctagctctccaaattaatggcacaggttggttttttcatttgcttcgcaaatgttatgtttgttaacgttgaccatcgacgttttaaggatccccctcttaggactttaccctaagtgaaccctatcagcgtctccatacagtggaaataaggtgcgatttcaagattgcaaacatcttcagatttcatctccaaattgctcccgagaatcgctgcgctgcgtaaaccttggccaaatcgtggccatcgtccacccagtcgaagttggagcattttaggagcagctcttgagctctgccgtcctgagcatcgagcttgacgccgagatggagctgcgtgttttttgtctcccattaaatgcggcggtagactcatctcatccatccatccatccatgagttacctatgctttcctaccactcatagcgcgggaccttagcagggcgtatgtgactcttaacacgctgcgccagctgtactctttgtcgttgaagagaaagagagaaagagagaaagagagaaagagagagagagaaagagagagagagaaagagtgaaagagagagagagagaaagagagagagagaaagataacggtgactctctctaagagaggtttgttttgaaattgagaatgaaaatatctttaaatgaaacttagaggcgctattctgtagtagtgctttattacgtgtaatgagacattcattctgtttctctgattctctgatactctgtgtctctgttttggatggttgggaggacttggcgtttaaggtgggacgcactagcgtggcctccgtgtgcatgataagggactgagggtgcgtgaaataatgaatgaatgaatgaatgaatgaatgagtgatgaatgggaatgaatgagaatgaatcattcgctaattcgcttactcgaagggagtgcagatagcttctcagagcactgcagaccgaccattcacgcaacgaccaatcgttgttgcgaggaagcggcattcgcgagaggcggggcggcagcagttccataatgggcaagaagaaagcggtggccaaaaaggcccctgccgccgcaccggcggcgccagcagccgctggcgcgaacacgcaggtcttgcccaagaaggaggatgggctcttcaaagagctcatcagacttcaggagagcaagcagtacaagaaggccatcaagactgcagacacagtcttgaagaagtttcccgaacatggcgagaccaatgccatgaagggcctcgtgtacaacagcatgggcgagaaggacaaggcctatgagcttgccaagctcggcgtgcgctacaacatcaaaagcgccgtctgctggcacgtctacggaatgatcaaccgtagcgacaaaaactacaaggaagccatcaagtgtttccagatggctgtcaggttcaacccgaacaaccttcagatcgtccgcgagctgtctgttcttcagattcagattcgcgatatgccaggtttcacagcttgccgccttgaccttgttcgtcaacaaggcggtctccgcagcaactggctcggatacaggtacgtaatttcaactctttcacaccctttagatgttttgtggaaacgtgtttttacttcacgaatctgtactcaaagtccaaaggcatcccaaaacacggttttaaataggcttgatcgaagctggttgcagggcactttttcactctggaccagtcaaaacatagccaacaatactgttctctgaacacagtgcatataaggtcgctggcgagatttcatcagtaatccccactcacgtccgcatcacccaatgcacggtcatccaatacttttcttgccgtgacactccccgactgtctatgcgtcatttttctatggcctgatttgaactcggtaaactaactatactacctcatgattggttaaaacatttcgcagtcttggtcagcatctcagtggaaacctcaaaatggccatcacaatcctcgatcaatacctcaccacgcttcctgcagagcgcgacgcttcgtacgaagagagtgagattcttatgtacaagttacaaattcttgaagagatcggtgataagcaggctgctcttgaccacttagaccgtcacttctatgatattttagatcgaaatgcctggcttgaaaagaaggttgagcttcttctcgctcttggtcgctctgatgaagcccgtcagcttctaactctcctgattaagcgcaatcctgaaaactacatgtatcatcgtgacctgcaggtaagtaaatcgttgctctatagcgtgaataactttttcagtcctttatgcaagtatctcaaaaacttaaacgcgatcctttctgccacgactttctggttccttctgggaaataccatatgagttgcctttgtatcgcggatagtaaggcccgctcttagaaattcctttttatcgtgcagtctatcttgatatgaggaaacggagcatgctacatacgaatagatatcagtttttgattttacatacatgggcttatatgaagatgtcatgctgtctatctctgatctgttcaagttggaactaacacgttttctaatattttttttacaaaactacaggcatgtgcgcttggtttgaagaatgtcagtaagatggagaactctagacttcctgctgataccatggagtaagtgaatttttatccgtccatgcatgccaaacccagaactttttagtttccaaaaatggtgcacacctctttttaccgtagacctatatgattttttcgatgatgtaaacttcagatcgtcaaatacggatagccctctgcctcggactcgcgattacgcgggagaaccctccgggggtcaggttatcttggtgagcgaaactcgcatcttttggtgcagtctgagaatctagtcatatctagcgtctactgtatcacatgtgtgcaacttctgtggtttggcgaacgttgaggttttacaaggttcgaaacactaacttgacgctgttaaaaaatctacagactttccgaggaacaaattgcagcattacagcagcagtatgaagatttatttggtacggtgaagcgtaagccaacttctgtgcgtcgtatccccatgggttacctgcagggtgaggcttttcgcacacatgcagatggatttcttcgtcagtctatgcgaaagggcgttccctcgcttttctcatctcttcgccctatctataaaatggcattgcgtaacaacatcgatgtttcagagtcaattcagaagcaagcgatggaacgtgttcagattcttggtgagctcgtggagggctacgtcaagtcactggatgccacaagtgagcttcccgccttggagggagattctgtcaaggaaaaggagtcgcctacaatgttattgtgggctctcttctttctcgcacaacactatgacatgatgtcggagtccgtaagtcatctgagtatctatgcaggcaccgaagtgcctgcaacagttggtgtgatggtggggtggggtgttttgggtagttgtgtgttctgctttctgtctcattgtctgttaagcttcttatccgcgggaggaaaaaattattcacagacctgtactgaaattctttgaggagcaaacaactttagcattctgatggacgggtccttttgacaatgacaatgtgcagaacacgcagatgttttggggaagtgggtcgaaggtgggtaggtggtgttaatcttgtgtgtaaatgtttatgcgcactgtggcgtgcgctgctagattgttgacagatccgcgggaggaaagaactattcacagacctgtactgaaatactttgaggagcaaacaactttagcattctgatggatttttaacattcagtagcatggcatttacgcactgggctgggctggaggggtttagtgtttgtgtctgggttaagcaacttggaagtactaacatgttttcaatggcttcatcgataacaggataaggcgcttgcaacgattgagagggcgattgagcacacgccgaccacgttggatctttttgtagtaagtgcatctcgttttattttgctgaaattctcagcttatctttattgtttatcagtttgttcaaagatggaacaagaccagcaacgttggagatgatggcaaaaattctattctacacctttagaggactgggactacggtcacccgtccatgaaaacaacgtttgctgatcctttggtgctggtattgctcgttgggtgaacatccatgatatgatcttcaagtcattgttggcattgaatgaaaaacaatttgtatgtttgttgtatgacagggatatctaacatctagttcgttgaattttacaggttaaagcacggatcctcaagcatatgggagattttattggtgctgctgctgcaatggagtcgggccgggaactcgaccttgcagacaagtggattaactccaaggctaccaagtatctgttaagagccggtcagattgacaaggccgaagatgtggttggtcttttcaccaaacacgagggtgacagccgtggctacctcaaagagatgcaggctgtttggtttgaaatcgaaattgcccgctctttcaagaggattggagaccttcaacttgctctgaagttctatgcagccattgttgagcattacgatgactttgaagaagaccaacttgaattccacttgtattgcttgcgcaaggctacaatgcgcgcatatgtatctacaattcgttatgaggaccatgttcgcggacatcccgcgtatggtcgtgcggctaagggcgttattgattgtctcctcgagcttcatgataagccagcgaagtactccgctgttgttgagaaagctaagaaggatgctccatccaagtctggcgacggtgaggaaggctcttcaggtggtgctaagaaatcctctgaagatagtttctctggcatgtctgctgctgaaaagaagaaggctaaggccaaggctcgtaaagaggaggcgaagcgtaagcaagaggaagagtcgggtgagaagaaagaaggagaggatgaaggcgaggacaaggccaagcgttctcgtgttgcgactgatgaggaccccaagggggctaagcttctcgcaaaatatgcggatagtcctctcgaggaagcgcacaagctttgtgaagttcttcgcaagtttgccccgtcccgtcttgatacgcaactttgcatctttgatgtggaagtgcgccgtggcaagtaccttcaggcccttcgtgctctgtgctgtgctgttgatttggctcctgggggtgccaagaatcctgctgtattcagtcgtctcgctccgtttattcagcttgtgcaaagcagtaaggttacttatgccccttgggctggaaagtctacttctgatgaagatgtcaacgttgccatctctgaaagtgttgagatccccgagtctgttagaactgctgtagagtctcatgcagcgcctcttattgatgggtcgccttctgatgcagctagcgcttttttcaaggagaactctggtagcccttccatctcgagtcgcgttgctgcagctgtagcgatgattcgcgttgatgctcaagttgctgagtctgctgagaaaaccttgacctccatagtgggtgatctcccggagtctgcctttttccaggatctttctgatatgcatgaagagctgactggccttggagcctctcagtccctgttagatgaccttaaggcgtcaatccttaagaagttcccacatggttcccttgaggtgccttctcccgattttggtaaggatactaagaagaaggagaccgaggctaccgacaaagaagagtaattttttttatatctaaccagtcttgaagctaatgtaaattctttttgtttaaatttgtcttgtcttgttatgtttttgttatcaatgtcgaaggattggtttctcagggatgtttaagtattcggtggtgtgcgcttgcttgtgagtgacctccaagaatttttgtcgcggacatgcggaggtaagactgctgctcgttcagatctggattcatctgagtcattttcagctccctcaattagaccacctgcatgttcatcgttgtcgtcatagtcatattcatcgtcatcatcaatatggctatcatcatcattgatgttgtttgcatcattttcatcattgtcttgatcatcattgttgttgtaatcgtcagtgtcatcgaagttactgttgtggtcttgaccagcagaatagcttaaaaatggatttgtagttctccgtgtgcttcgagatccattatcatcttcttctcggagatcaaagtgatcatggatgagagtgcgaggggtgaatgtggctgcagttggtgcagggctcggtgtttggttcgattgtccactgccaaaggatcttagacgattaaatgatctctgttgagcttcgatatctggagattctccgttggtgttttgttgctcgtttcctccggcatcatcctctggtgcgtctgcggggacaacaattggtgtttgttggtgttcgagttcatgtaattgatggcgggtaataattccaaccacaagattagacgtgttgaccacagttaagtggcgtagcccaagatggcggaatagttggtgaacacgtgaaacgtaaacagagtggtgaactgttaaagcgcttgagttgaggtagggacgaagatctactacacggtcaaagtcttcctctgaaagtctagtcaaaacatcgcgaatactcggtgatcttggatagtgtttgaagaaatctctccaagcaatagttgctccctttcgcttcatacgatcctgaaaagatgcattgttatcaacaaagacgcgttcaaacaagagaataagtagttcactacgtaggattgttccttcaaatatcccctttcctctaacttcatcgacctcatctgcatcaaggttagtacgttgagaattggcacgccgcttgcgtcctttcacattacgacgacgcgtgctcttgttagatgttgatttttgttcagatcctgtacgaaacaaagtagcatccagatcggagcggctgccaagactgcgatggcttacgaatctacgctgctctccaagagttggaggtcttataaggcggtctgccatttctgtcgagttttcagaggttgtgcggtgtaaacttgcagtggagtcaatgtctacacttgatctgcggttgtggtgagcgattgagatgtgtgacactacaggaaagccattatgtgagcagtcttgtagaacctgtaagatatcgcctacacgttcgaaaagattaaacactacgggctgtttcaccatgatgtcacgtaccctaattttgtgcgcattcggaggtggttggtcatgcacaaatttgattccttggagctcaatatgcatatcatacaggccgtctgtgaaaagatctcctactacctttgcagacataattgtgaccatgagaggaattgcataggttgagttattcgtcgtttccataagaatcaccacgatagagattgtcatccgcgtaacaccaccgagcattgccgctcctccaaggagtgagtacgtgcccgggtcaatgataccaaatatattcataaaggagccattgtcgacagaccacaaaccctgaccaaatgcacgtcccaaggcagcgccgatagtgatggctggaacgaaaagtccgctaggaatgctggtgccatacgtaaaacaagctaacatccaaacagtgaagccaaacaaaagcaaggctggccaagcgtacagagcttcactatggaaaaggcgtcgaacagctgaatcaagcgaactcagcatcagagtttcgaggtcattaacttcatcatcaccgtcacacatgtgaccattcattgcaataagctcgcaggtactattcttgactgggtgaacagggttgctatttgtccaagatgcgtaatgaacatcctttcgtgatcgacaaggataggcatacgagaggccaaaaaatactgtggaagaaataagggcaacaatgagagactcgaccagacgcactcgtgggtccacgatatatttggtacgaatgcggcttaaaacaagattgagagagttaaaagcggccccgagaaggccgcccatcgcaccaatgagaacgaaaagaggaagctgcatgaatcggtatgggggttgcataggatagcacggatctctagaggcaccttcgaaactgccaaatgaaacaacagcagattgtgacatgagaccccactcagcagtatcctttgcacctgagaggaccacatcaacaaatgaagcgcatgccatagtggcaaagaatgtgagccatgtgaggcgaacgctccagtatgatgctgcttcctcaataacaaaaagaacgccaccgagaggcgccgagaaagcagcagcaacaccacaagcgcaacccagcgaaacaaaagagcgcttttctttatcactgcggaacgaaagaatacctagcccgaacgagtaaaactcgtctcgtccttgagatatgatcgcgcctacaacagctccagcatgcatcatagggccttcttttcccaacacaagggacccagagacactgaaaacaactcccacaagcttacttactaatgtacgaatggagatgacacgatgaatctttcggccattgaggtagcttttaatctctgggatgccactgcctttggctttgaggtccaagaatgcaacaaacgccgtggcaatgctgacaaaaagcatgttgtagccagcataatataaaaacgctcgcggggccttctcatggtcgagtcggtagttcacttcactaaatttgtggcctgcaagtgcagtcacgctaacatctacaatgatggcaaggcaaccgacaataattgctatgacaagacctgttagccaacgcacagcctcgacattttgcaatactccaccggacgcggacacttgtgtaagttcttcaacacgttgtgagtacaatttattctccgacgtgtcaaagtcaagcccttcctcacgattcggtgttcgcaaggagttccagtgagcacgaagtttgcggagaagtcgctggacacatgttcctccttcgtcgcggtagctgttccacatagattggtacaagcggtggtggtgaacactcgcatgttcttcatcatctatatttccatcattgaagctgtaagaactagcactcgaaatccgtggtactggcctatcttgcctctgctcaaagctactctcatcggcacccaacaacggttctagaaaactattcgaatatgtctgcccactcgccatcttgtcaagctatccaagacacaaacaaagcctggcggtttcctctcttcccaaga

(The sequence listing continues in the following parts.)

1. A non-naturally occurring, engineered composition comprising a) a Fanzor polypeptide comprising a Ruv-C nuclease domain, the Ruv-C nuclease domain optionally comprising Ruv-CI, Ruv-CII, and Ruv-CIII subdomains, and b) an ωRNA component molecule comprising a scaffold and a reprogrammable spacer sequence, ωRNA component molecule capable of forming a complex with the Fanzor polypeptide and directing the Fanzor polypeptide to a target polynucleotide.

2. The composition of claim 1, wherein the Fanzor polypeptide further comprises a REC domain, a bridge helix domain, or both optionally wherein the Fanzor polypeptide comprises a non-native REC domain, a non-native WED domain, a non-native Ruv-C domain, a non-native NUC domain, or any combination thereof.

3. (canceled)

4. The composition of claim 1, wherein the Fanzor polypeptide comprises about 125 to about 1800 amino acids, optionally wherein the Fanzor polypeptide is about 400 to about 700 amino acids; optionally wherein the reprogrammable spacer sequence comprises a spacer of 10 nucleotides to 50 nucleotides in length; and optionally wherein the ωRNA component molecule comprises a scaffold of about 20 to 200 nucleotides in length.

5. (canceled)

6. (canceled)

7. The composition of claim 1, wherein the Fanzor complex binds a target adjacent motif (TAM) sequence 5′ and/or 3′ of the target polynucleotide.

8. The composition of claim 1, wherein the target polynucleotide is DNA, optionally wherein the target polynucleotide is double stranded DNA.

9. The composition of claim 1, further comprising a homologous recombination donor template comprising a donor sequence for insertion into a target polynucleotide.

10. The composition of claim 1, further comprising a functional domain associated with the Fanzor polypeptide wherein the functional domain is optionally a transposase, an integrase, a nucleobase deaminase, a reverse transcriptase, a recombinase, an integrase, a topoisomerase, a retrotransposon, a phosphatase, a polymerase, a ligase, a helitron, a helicase, a methylase, a demethylase, a translation activator, a translation repressor, a transcription activator, a transcription repressor, a transcription release factor, a chromatin modifier, a histone modifier, an acetylase, a deacetylase, a reverse transcriptase, a nuclease.

11. (canceled)

12. The composition of claim 1, wherein the Fanzor polypeptide is operatively coupled to one or more nuclear localization signal polypeptides at a C-terminus, an N-terminus, or both of the Fanzor polypeptide optionally wherein Fanzor activity is increased 1 to 50-fold or more as compared to a wild-type Fanzor or a Fanzor lacking one or more nuclear localization signals

13. The composition of claim 1, wherein the Fanzor polypeptide comprises one or more amino acid mutations as compared to a wild type, whereby the one or more amino acid mutations increase binding and/or interaction with a target DNA and/or an ωRNA component molecule, and/or increase Fanzor activity; optionally wherein the one or more amino acid mutations are made in and/or in effective proximity to a DNA interaction region of the Fanzor polypeptide; optionally wherein the one or more amino acid mutations comprise one or more mutations of one or more neutral and/or negatively charged amino acids to one or more positively charged amino acids, optionally wherein the one or more mutations is in a WED domain, REC domain, RuvC domain, NUC domain or any combination thereof, and optionally wherein one or more of the one or more mutations are in positions that correspond to a positively charged channel formed by the WED domain, REC domain, and RuvC domain when active and/or interacts with an RNA-DNA heteroduplex formed by the ωRNA component molecule and a target DNA; and optionally wherein the one or more amino acid mutations comprise one or more mutations of FIG. 10C-10E, FIG. 35, 56A-56D, 72D, 74E-74G, 75A-75C, 76B-76D, 77A-77C or any combination thereof, or wherein one or more of the amino acid mutations are at one or more amino acid residues identified in any one or more of FIG. 10C-10E, FIG. 35, 56A-56D, 72D, 74E-74G, 75A-75C, 76B-76D, 77A-77C or any combination thereof or are analogous thereto in a homologue, orthologue, or variant Fanzor polypeptide.

14. (canceled)

15. (canceled)

16. (canceled)

17. The composition of claim 1, wherein the Fanzor polypeptide comprises (a) a mutation at one or more amino acid residues selected from: W596^{NUC}, R601^{NUC}, N604^{NUC}, S598^{NUC}, Y602^{NUC}, R550^{NUC}, C611^{RuvC}, M607^{RuvC}, W603^{NUC}, L583^{NUC}, K562^{NUC}, R564^{NUC}, S567^{NUC}, R572^{NUC}, Q482^{RuvC}, R315^{WED}, R317^{WED}, K312^{WED}, R481^{RuvC}, K25^{WED}, R268^{REC} and R157^{REC}, Q148^{REC}, R407^{RuvC}, R420^{RuvC}, S269^{REC}, R268^{REC}, K440^{RuvC}, R260^{REC}, R96^{REC}, Q129^{REC}, and N133^{REC}, R291^{WED}, Q133^{REC}, and N133^{REC}, relative to SpuFz1, or in corresponding positions thereto in a homologue, orthologue, or a Fanzor variant; (b) one or more mutations selected from: D300R, C310R, D487K, E498R, and T513K relative to SpuFz1 or in corresponding mutations thereto in a homologue, orthologue, or a Fanzor variant; (c) a mutation at one or more amino acid residues selected from E541, D383, N385, D606, or any combination thereof, relative to SpuFz1, or in corresponding positions thereto in a homologue, orthologue, or a Fanzor variant; or (d) any combination of (a)-(d)(c).

18. (canceled)

19. The composition of claim 1, wherein the Fanzor polypeptide is
a. a yeast Fanzor polypeptide;
b. an amoeba Fanzor polypeptide;
c. a protist Fanzor polypeptide;
d. a metazoan Fanzor polypeptide;
e. an algae Fanzor polypeptide;
f. a fungi Fanzor polypeptide;
g. a eukaryotic Fanzor polypeptide;
h. a Mollusca Fanzor polypeptide;
i. from an organism of the genus Eremothecium, Ashbya, Spizellomyces, Torulaspora, Naegleria, Rhizopus, Guillardia, Batillaria, Dreissena, Mercenaria, Batrachochytrium, or Parasitella;
j. a virus Fanzor polypeptide, optionally a Bodo saltans virus Fanzor polypeptide, a Harvforvirus Fanzor polypeptide, Homavirus Fanzor polypeptide, Dishui Lake Large Algae virus 1 Fanzor polypeptide, or Yasminevirus Fanzor polypeptide;
k. a Fanzor polypeptide selected from a polypeptide or comprises a polypeptide or is encoded by a polynucleotide set forth in any one or more of Table 1, Table 6, Table 7, Table 8, Table 9, Table 10, Table 11, Table 12, Table 13, Table 14, Table 15, Table 18, Table 20, Table 21, Table 22 Example 16, Example 17, Example 18, FIG. 18A-18B, FIG. 19A-19B, FIG. 20, FIG. 33, FIG. 35, FIG. 53A-53G, FIG. 56A-56D, FIG. 66, FIG. 72D, FIG. 74E-74G, FIG. 75A-75C, FIG. 77A-77C or any combination thereof, or is a homolog, ortholog, or variant thereof, and/or is or comprises a polypeptide that is 80-100 percent identical to a polypeptide sequence set forth in or that is encoded by a polynucleotide sequence set forth in Table 1, Table 6, Table 7, Table 8, Table 9, Table 10, Table 11, Table 12, Table 13, Table 14, Table 15, Table 18, Table 20, Table 21, Table 22 Example 16, Example 17, Example 18, FIG. 18A-18B, FIG. 19A-19B, FIG. 20, FIG. 33, FIG. 35, FIG. 53A-53G, FIG. 56A-56D, FIG. 66, FIG. 72D, FIG. 74E-74G, FIG. 75A-75C, FIG. 77A-77C, or any combination thereof, or
l. any combination of a-k.

20. The engineered composition of claim 1, further comprising: (a) a vector system comprising one or more vectors encoding the Fanzor polypeptide, the ωRNA component molecule, or both; or (b) an engineered cell comprising the composition and/or the vector system.

21. (canceled)

22. A method of modifying a target polynucleotide sequence in a cell, comprising introducing the composition of claim 1 into the cell; optionally wherein modifying comprises cleaving a DNA polynucleotide; optionally wherein cleavage occurs distal to a target-adjacent motif (TAM); optionally wherein cleavage occurs at a spacer annealing site or 3′ of the target sequence, or wherein cleavage occurs about 20-22 nucleotides away from the TAM; optionally wherein the Fanzor polypeptide, the ωRNA component molecule, or both are provided via one or more polynucleotides encoding the Fanzor polypeptide, the ωRNA component molecule, or both, and wherein the one or more polynucleotides are operably configured to express the Fanzor polypeptide, the ωRNA component molecule, or both; and optionally wherein modifying comprises introducing one or more mutations into the target polynucleotide sequence; optionally wherein the one or more mutations comprise substitutions, deletions, insertions, or any combination thereof.

23. (canceled)

24. (canceled)

25. (canceled)

26. (canceled)

27. (canceled)

28. (canceled)

29. (canceled)

30. An engineered, non-naturally occurring composition comprising:
a. a Fanzor polypeptide, wherein the Fanzor polypeptide is catalytically inactive,
b. a nucleotide deaminase associated with or otherwise capable of forming a complex with the Fanzor polypeptide, and
c. an ωRNA component molecule capable of forming a complex with the Fanzor polypeptide and directing site-specific binding at a target sequence.

31. The composition of claim 30, wherein the nucleotide deaminase is an adenosine deaminase or a cytidine deaminase; optionally the Fanzor polypeptide is selected from a polypeptide, or comprises a polypeptide, or is encoded by a polynucleotide set forth in Table 1, Table 6, Table 7, Table 8, Table 9, Table 10, Table 11, Table 12, Table 13, Table 15, Table 18, Table 20, Table 21, Table 22 Example 16, Example 17, Example 18, FIG. 18A-18B, FIG. 19A-19B, FIG. 20, FIG. 33, FIG. 35, FIG. 53A-53G, FIG. 56A-56D, FIG. 66, FIG. 72D, FIG. 74E-74G, FIG. 75A-75C, FIG. 77A-77C, or any combination thereof, or is a homolog, ortholog, or variant thereof; and/or is or comprises a polypeptide that is 80-100 percent identical to a polypeptide sequence set forth in or encoded by a polynucleotide sequence set forth in the foregoing tables and figures.

32. (canceled)

33. One or more polynucleotides encoding one or more components of the composition of claim 30, optionally one or more vectors encoding the one or more polynucleotides; optionally a cell or progeny thereof genetically engineered to express one or more components of the composition of claim 30.

34. (canceled)

35. (canceled)

36. A method of editing nucleic acids in target polynucleotides comprising delivering the composition of claim 30 to a cell or population of cells comprising the target polynucleotides; optionally wherein the target polynucleotides are target sequences within genomic DNA; optionally wherein the target polynucleotides are edited at one or more bases to introduce (a) a G→A, C, or T mutation; (b) a C→A, T, or G mutation, (c) a A→C, T, or G mutation; (d) T→A, C, or G mutation; or any combination of (a)-(d); and optionally comprising an isolated cell or progeny thereof comprising one or more base edits made using said method.

37. (canceled)

38. (canceled)

39. (canceled)

40. An engineered, non-naturally occurring composition comprising:
a. a catalytically dead Fanzor polypeptide,
b. a reverse transcriptase associated with or otherwise capable of forming a complex with the catalytically dead Fanzor polypeptide, and
c. an ωRNA component molecule capable of forming a complex with the catalytically dead Fanzor polypeptide and directing site-specific binding of the complex to a target sequence of a target polynucleotide, the ωRNA component molecule further comprising a donor template encoding a donor sequence for insertion into the target polynucleotide.

41. One or more polynucleotides encoding one or more components of the composition of claim 40; optionally one or more vectors encoding the said polynucleotides.

42. (canceled)

43. A method of modifying target polynucleotides comprising; delivering the composition of claim 40 to a cell, or population of cells, comprising the target polynucleotides, wherein the complex directs the reverse transcriptase to the target sequence and the reverse transcriptase facilitates insertion of a donor sequence encoded by the donor template from the ωRNA component molecule into the target polynucleotide; optionally wherein insertion of the donor sequence: (a) introduces one or more base edits: (b) corrects or introduces a premature stop codon; (c) disrupts a splice site; (d) inserts or restores a splice site; (e) inserts a gene or gene fragment at one or both alleles of the target polynucleotides; or (f) any combination thereof; and optionally comprising an isolated cell or progeny thereof comprising one or more modifications made using said method.

44. (canceled)

45. (canceled)

46. An engineered, non-naturally occurring composition comprising:
a. a Fanzor polypeptide,
b. a non-LTR retrotransposon protein associated with or otherwise capable of forming a complex with the Fanzor polypeptide, and
c. an ωRNA component molecule capable of forming a complex with the Fanzor polypeptide and directing site-specific binding of the complex to a target sequence of a target polynucleotide, the ωRNA component molecule further comprising a donor template encoding a donor polynucleotide for insertion into the target polynucleotide and located between two binding elements capable of forming a complex with the non-LTR retrotransposon protein.

47. The composition of claim 46, wherein the Fanzor polypeptide is fused to an N-terminus of the non-LTR retrotransposon protein; optionally wherein the Fanzor polypeptide is engineered to have nickase activity; optionally wherein the ωRNA component molecule directs the Fanzor polypeptide to a target sequence 5′ of a targeted insertion site, and wherein the Fanzor polypeptide generates a strand break at the targeted insertion site; optionally wherein the ωRNA component molecule directs the Fanzor polypeptide to a target sequence 3′ of a targeted insertion site, and wherein the Fanzor polypeptide generates a strand break at the targeted insertion site; optionally wherein the donor polynucleotide further comprises a polymerase processing element to facilitate 3′ end processing of the donor polynucleotide; and optionally wherein the donor polynucleotide further comprises a homology region on a 5′ end of the donor template, a 3′ end of the donor template, or both, wherein the homology region has homology to the target sequence; optionally wherein the homology region is from 8 to 25 base pairs.

48. (canceled)

49. (canceled)

50. (canceled)

51. (canceled)

52. (canceled)

53. (canceled)

54. One or more polynucleotides encoding one or more components of the composition of claim 46; optionally one or more vectors comprising the polynucleotides.

55. (canceled)

56. A method of modifying a target polynucleotide comprising;
delivering the composition of claim 46 to a cell or population of cells comprising the target polynucleotide, wherein the complex directs the non-LTR retrotransposon protein to the target sequence and the non-LTR retrotransposon protein facilitates insertion of the donor polynucleotide from the donor template into the target polynucleotide; optionally wherein insertion of the donor polypeptide: (a) introduces one or more base edits; (b) corrects or introduces a premature stop codon; (c) disrupts a splice site; (d) inserts or restores a splice site; (e) inserts a gene or gene fragment at one or both alleles of the target polynucleotide; or (f) any combination thereof; and optionally comprising an isolated cell or progeny thereof comprising one or more modifications made using said method.

57. (canceled)

58. (canceled)

59. An engineered, non-naturally occurring composition comprising:
a. a Fanzor polypeptide,
b. an integrase protein associated with or otherwise capable of forming a complex with the Fanzor polypeptide, and optionally a reverse transcriptase, and
c. an ωRNA component molecule capable of forming a complex with the Fanzor polypeptide and directing site-specific binding of the complex to a target sequence of a target polynucleotide, the ωRNA component molecule further comprising a donor template encoding a donor polynucleotide for insertion into the target polynucleotide and located between two binding elements capable of forming a complex with the integrase protein.

60. The composition of claim 59, wherein the Fanzor polypeptide is fused to the integrase protein and optionally the reverse transcriptase; optionally wherein the Fanzor polypeptide is engineered to have nickase activity; optionally wherein the ωRNA component molecule directs the Fanzor polypeptide to a target sequence, and wherein the Fanzor polypeptide generates a nick at a targeted insertion site; and optionally wherein the donor polynucleotide further comprises a homology region on the 5′ end of the donor template, the 3′ end of the donor template, or both, wherein the homology region has homology to the target sequence.

61. (canceled)

62. (canceled)

63. (canceled)

64. One or more polynucleotides encoding one or more components of the composition of claim 59; optionally one or more vectors comprising the polynucleotides; and optionally an isolated cell of progeny thereof comprising one or more modifications made using a method of delivering the composition of claim 59 or said polynucleotides or vectors to a cell, wherein the integrase protein facilitates insertion of the donor polynucleotide from the donor template into the target polynucleotide; optionally wherein insertion of the donor polynucleotide: (a) introduces one or more base edits; (b) corrects or introduces a premature stop codon; (c) disrupts a splice site; (d) inserts or restores a splice site; (e) inserts a gene or gene fragment at one or both alleles of the target polynucleotide; or (f) any combination thereof.

65. (canceled)

66. (canceled)

67. (canceled)

68. (canceled)

69. A composition for detecting the presence of a target polynucleotide in a sample, comprising:
one or more Fanzor polypeptides possessing collateral activity;
at least one ωRNA component comprising a sequence capable of binding a target polynucleotide and designed to form a complex with the one or more Fanzor polypeptides;
a detection construct comprising a polynucleotide component, wherein the one or more Fanzor polypeptides exhibits collateral nuclease activity and cleaves the polynucleotide component of the detection construct once activated by the target sequence; and
optionally, one or more isothermal amplification reagents.

70. The composition of claim 69, wherein the Fanzor polypeptide is
a. a yeast Fanzor polypeptide;
b. an amoeba Fanzor polypeptide;
c. a protist Fanzor polypeptide;
d. a metazoan Fanzor polypeptide;
e. an algae Fanzor polypeptide;
f. a fungi Fanzor polypeptide;
g. a eukaryotic Fanzor polypeptide;
h. a Mollusca Fanzor polypeptide;
i. from an organism of the genus Eremothecium, Ashbya, Spizellomyces, Torulaspora, Naegleria, Rhizopus, Guillardia, Batillaria, Dreissena, Mercenaria, Batrachochytrium, or Parasitella;
j. a virus Fanzor polypeptide, optionally a Bodo saltans virus Fanzor polypeptide, a Harvforvirus Fanzor polypeptide, Homavirus Fanzor polypeptide, Dishui Lake Large Algae virus 1 Fanzor polypeptide, or Yasminevirus r Fanzor polypeptide;
k. a Fanzor polypeptide selected from a polypeptide, or comprises a polypeptide, or is encoded by a polynucleotide set forth in Table 1, Table 6, Table 7, Table 8, Table 9, Table 10, Table 11, Table 12, Table 13, Table 14, Table 15, Table 18, Table 20, Table 21, Table 22, Example 16, Example 17, Example 18, FIG. 18A-18B, FIG. 19A-19B, FIG. 20, FIG. 33, FIG. 35, FIG. 53A-53G, FIG. 56A-56D, FIG. 66, FIG. 72D, FIG. 74E-74G, FIG. 75A-75C, FIG. 77A-77C, or any combination thereof, or is a homolog, ortholog, or variant thereof; and/or is 80-100 percent identical to a polypeptide sequence set forth in or that is encoded by a polynucleotide sequence set forth in the foregoing tables and figures, or any combination thereof; or
l. any combination of a-k; optionally wherein the isothermal amplification reagents are loop-mediated isothermal amplification (LAMP) reagents; optionally wherein the LAMP reagents comprise LAMP primers; optionally further comprising one or more additives to increase reaction specificity or kinetics; and optionally further comprising polynucleotide binding beads.

71. (canceled)

72. (canceled)

73. (canceled)

74. (canceled)

75. A method for detecting polynucleotides in a sample, the method comprising;
contacting one or more target polynucleotides with a Fanzor polypeptide, at least one ωRNA component molecule capable of forming a complex with the Fanzor polypeptide and direct sequence-specific binding to one or more target polynucleotides and a detection construct, wherein the Fanzor polypeptide exhibits collateral nuclease activity and cleaves the detection construction once activated by the one or more target polynucleotides; and
detecting a signal produced by cleavage of the detection construction thereby detecting the one or more target polynucleotides; optionally further comprising amplifying the one or more target polynucleotides using isothermal amplification prior to contacting.

76. (canceled)
